United States Patent Application Publication US 2011/0183924 A1 - sequence listing, part 101

SEQ ID NO: 312509 - DNA, 2498 bp, Homo sapiens
agcagcgggaggggcggagggaggggattcggcagctccagttcagctcgctcggcgcacccacgcctcgctgccccgcttcctgccctcaacctgggcatgcgccccccacccttccggccccccagaacccgcgccatcccccggagcctccccagagctggccgcgcaggatgggcgccctcaggcccacgctgctgccgccttcgctgccgctgctgctgctgctaatgctaggaatgggatgctgggcccgggaggtgctggtccccgaggggcccttgtaccgcgtggctggcacagctgtctccatctcctgcaatgtgaccggctatgagggccctgcccagcagaacttcgagtggttcctgtataggcccgaggccccagatactgcactgggcattgtcagtaccaaggatacccagttctcctatgctgtcttcaagtcccgagtggtggcgggtgaggtgcaggtgcagcgcctacaaggtgatgccgtggtgctcaagattgcccgcctgcaggcccaggatgccggcatttatgagtgccacaccccctccactgatacccgctacctgggcagctacagcggcaaggtggagctgagagttcttccagatgtcctccaggtgtctgctgcccccccagggccccgaggccgccaggccccaacctcacccccacgcatgacggtgcatgaggggcaggagctggcactgggctgcctggcgaggacaagcacacagaagcacacacacctggcagtgtcctttgggcgatctgtgcccgaggcaccagttgggcggtcaactctgcaggaagtggtgggaatccggtcagacttggccgtggaggctggagctccctatgctgagcgattggctgcaggggagcttcgtctgggcaaggaagggaccgatcggtaccgcatggtagtagggggtgcccaggcaggggacgcaggcacctaccactgcactgccgctgagtggattcaggatcctgatggcagctgggcccagattgcagagaaaagggccgtcctggcccacgtggatgtgcagacgctgtccagccagctggcagtgacagtggggcctggtgaacgtcggatcggcccaggggagcccttggaactgctgtgcaatgtgtcaggggcacttcccccagcaggccgtcatgctgcatactctgtaggttgggagatggcacctgcgggggcacctgggcccggccgcctggtagcccagctggacacagagggtgtgggcagcctgggccctggctatgagggccgacacattgccatggagaaggtggcatccagaacataccggctacggctagaggctgccaggcctggtgatgcgggcacctaccgctgcctcgccaaagcctatgttcgagggtctgggacccggcttcgtgaagcagccagtgcccgttcccggcctctccctgtacatgtgcgggaggaaggtgtggtgctggaggctgtggcatggctagcaggaggcacagtgtaccgcggggagactgcctccctgctgtgcaacatctctgtgcggggtggccccccaggactgcggctggccgccagctggtgggtggagcgaccagaggacggagagctcagctctgtccctgcccagctggtgggtggcgtaggccaggatggtgtggcagagctgggagtccggcctggaggaggccctgtcagcgtagagctggtggggccccgaagccatcggctgagactacacagcttggggcccgaggatgaaggcgtgtaccactgtgcccccagcgcctgggtgcagcatgccgactacagctggtaccaggcgggcagtgcccgctcagggcctgttacagtctacccctacatgcatgccctggacaccctatttgtgcctctgctggtgggtacaggggtggccctagtcactggtgccactgtccttggtaccatcacttgctgcttcatgaagaggcttcgaaaacggtgatcccttactccccaggtgagggaaaagaaccccccaaccttgttttcattgggcttcccacccccaagtcctgaaccaagctgctccctcccaggccccacctggaggaggagtaggcagctcagatccacagggccctgttaaggggtggaggccgcgagggagccccactcagggctctctgtccttagcccacaccgggcacccttttcaggtcttgcaggtgtcgactgtcttccggcccagctccaagccctcctctggttgcctggacaccctctccctctgtccactcttcctttaatttatttgacctcccactacccagaatgggagacgtgcctccccttccccactccttccctcccaagcccctccctctggccttctgttcttgatctcttagggatcctatagggaggccatttcctgtcctggaattagtttttctaaaatgtgaataaacttgttttataaaaagca

SEQ ID NO: 312510 - DNA, 2841 bp, Homo sapiens
agcagcgggaggggcggagggaggggattcggcagctccagttcagctcgctcggcgcacccacgcctcgctgccccgcttcctgccctcaacctgggcatgcgccccccacccttccggccccccagaacccgcgccatcccccggagcctccccagagctggccgcgcaggatgggcgccctcaggcccacgctgctgccgccttcgctgccgctgctgctgctgctaatgctaggaatgggatgctgggcccgggaggtgctggtccccgaggggcccttgtaccgcgtggctggcacagctgtctccatctcctgcaatgtgaccggctatgagggccctgcccagcagaacttcgagtggttcctgtataggcccgaggccccagatactgcactgggcattgtcagtaccaaggatacccagttctcctatgctgtcttcaagtcccgagtggtggcgggtgaggtgcaggtgcagcgcctacaaggtgatgccgtggtgctcaagattgcccgcctgcaggcccaggatgccggcatttatgagtgccacaccccctccactgatacccgctacctgggcagctacagcggcaaggtggagctgagagttcttccagatgtcctccaggtgtctgctgcccccccagggccccgaggccgccaggccccaacctcacccccacgcatgacggtgcatgaggggcaggagctggcactgggctgcctggcgaggacaagcacacagaagcacacacacctggcagtgtcctttgggcgatctgtgcccgaggcaccagttgggcggtcaactctgcaggaagtggtgggaatccggtcagacttggccgtggaggctggagctccctatgctgagcgattggctgcaggggagcttcgtctgggcaaggaagggaccgatcggtaccgcatggtagtagggggtgcccaggcaggggacgcaggcacctaccactgcactgccgctgagtggattcaggatcctgatggcagctgggcccagattgcagagaaaagggccgtcctggcccacgtggatgtgcagacgctgtccagccagctggcagtgacagtggggcctggtgaacgtcggatcggcccaggggagcccttggaactgctgtgcaatgtgtcaggggcacttcccccagcaggccgtcatgctgcatactctgtaggttgggagatggcacctgcgggggcacctgggcccggccgcctggtagcccagctggacacagagggtgtgggcagcctgggccctggctatgagggccgacacattgccatggagaaggtggcatccagaacataccggctacggctagaggctgccaggcctggtgatgcgggcacctaccgctgcctcgccaaagcctatgttcgagggtctgggacccggcttcgtgaagcagccagtgcccgttcccggcctctccctgtacatgtgcgggaggaaggtgtggtgctggaggctgtggcatggctagcaggaggcacagtgtaccgcggggagactgcctccctgctgtgcaacatctctgtgcggggtggccccccaggactgcggctggccgccagctggtgggtggagcgaccagaggacggagagctcagctctgtccctgcccagctggtgggtggcgtaggccaggatggtgtggcagagctgggagtccggcctggaggaggccctgtcagcgtagagctggtggggccccgaagccatcggctgagactacacagcttggggcccgaggatgaaggcgtgtaccactgtgcccccagcgcctgggtgcagcatgccgactacagctggtaccaggcgggcagtgcccgctcagggcctgttacagtctacccctacatgcatggtgagtgacaccccctccaccctcctcactctgccttcctcctggcctctgccactggccttcccttcccatcttctgaccctcctgctactatctctctcctccacattatgtcacatgaagtctcaaaaaatccaacttccagccctgcagtgcccacctgcacggggtcctctgtggttgatgctgacttgcatgctgagggggcaggctgtgggcagggatgggggtgtctgtgaatggagaaggtgggttcagagaacttgatggggaaagcgcagaggcaagtgtatgggtggaggatgatggcatcctctctgaacagtcatcctctctcccccagccctggacaccctatttgtgcctctgctggtgggtacaggggtggccctagtcactggtgccactgtccttggtaccatcacttgctgcttcatgaagaggcttcgaaaacggtgatcccttactccccaggtgagggaaaagaaccccccaaccttgttttcattgggcttcccacccccaagtcctgaaccaagctgctccctcccaggccccacctggaggaggagtaggcagctcagatccacagggccctgttaaggggtggaggccgcgagggagccccactcagggctctctgtccttagcccacaccgggcacccttttcaggtcttgcaggtgtcgactgtcttccggcccagctccaagccctcctctggttgcctggacaccctctccctctgtccactcttcctttaatttatttgacctcccactacccagaatgggagacgtgcctccccttccccactccttccctcccaagcccctccctctggccttctgttcttgatctcttagggatcctatagggaggccatttcctgtcctggaattagtttttctaaaatgtgaataaacttgttttataaaaagca

SEQ ID NO: 312511 - DNA, 1396 bp, Homo sapiens
agcagcgggaggggcggagggaggggattcggcagctccagttcagctcgctcggcgcacccacgcctcgctgccccgcttcctgccctcaacctgggcatgcgccccccacccttccggccccccagaacccgcgccatcccccggagcctccccagagctggccgcgcaggatgggcgccctcaggcccacgctgctgccgccttcgctgccgctgctgctgctgctaatgctaggaatgggatgctgggcccgggaggtgctggtccccgaggggcccttgtaccgcgtggctggcacagctgtctccatctcctgcaatgtgaccggctatgagggccctgcccagcagaacttcgagtggttcctgtataggcccgaggccccagatactgcactgggcattgtcagtaccaaggatacccagttctcctatgctgtcttcaagtcccgagtggtggcgggtgaggtgcaggtgcagcgcctacaaggtgatgccgtggtgctcaagattgcccgcctgcaggcccaggatgccggcatttatgagtgccacaccccctccactgatacccgctacctgggcagctacagcggcaaggtggagctgagagttcttccagatgtcctccaggtgtctgctgcccccccagggccccgaggccgccaggccccaacctcacccccacgcatgacggtgcatgaggggcaggagctggcactgggctgcctggcgaggacaagcacacagaagcacacacacctggcagtgtcctttgggcgatctgtgcccgaggcaccagttgggcggtcaactctgcaggaagtggtgggaatccggtcagacttggccgtggaggctggagctccctatgctgagcgattggctgcaggggagcttcgtctgggcaaggaagggaccgatcggtaccgcatggtagtagggggtgcccaggcaggggacgcaggcacctaccactgcactgccgctgagtggattcaggatcctgatggcagctgggcccagattgcagagaaaagggccgtcctggcccacgtggatgtgcagacgctgtgtaagtgccacttatacatcccactgtgggagctgggagggacagtatcctggtgggcactgtggccacagggggtaccagatagccatcatctgactccaaggaactcatcttccacagagtgagcagccttgctagcatttctctcccccggcccttgatgggttttctctgctcagaaattgggtatagagataggaggcccatgctgaggggtgagattcaagcccctaaatagaaagatggtcatacctagtgagggggagacaggaggttttgaagttgctgctgtcaagtaggaaacaggaagttggggaat

SEQ ID NO: 312512 - DNA, 745 bp, Homo sapiens
gcccgctctccgacggggtggggtgaggacaggacaagagatctgggtgtggaaggatggccgggtttctgcagcagcaggaggaaagggtgggagcacacaggcacagaacactgtgagcaggactgccaggccagtgtcacaagcgctaccatctgggtgtagacagacctgagctgacaaagctgggggagcaaggccaacggctttaaacacaagctcaggggcttggggtttatcccgagggcacagggcaccccgcctgggtgcagcatgccgactacagctggtaccaggcgggcagtgcccgctcagggcctgttacagtctacccctacatgcatgccctggacaccctatttgtgcctctgctggtgggtacaggggtggccctagtcactggtgccactgtccttggtaccatcacttgctgcttcatgaagaggcttcgaaaacggtgatcccttactccccaggtcttgcaggtgtcgactgtcttccggcccagctccaagccctcctctggttgcctggacaccctctccctctgtccactcttcctttaatttatttgacctcccactacccagaatgggagacgtgcctccccttccccactccttccctcccaagcccctccctctggccttctgttcttgatctcttagggatcctatagggaggccatttcctgtcctggaattagtttttctaaaatgtgaataaacttgttttataaaaagca

SEQ ID NO: 312513 - DNA, 731 bp, Homo sapiens
agcagcgggaggggcggagggaggggattcggcagctccagttcagctcgctcggcgcacccacgcctcgctgccccgcttcctgccctcaacctgggcatgcgccccccacccttccggccccccagaacccgcgccatcccccggagcctccccagagctggccgcgcaggatgggcgccctcaggcccacgctgctgccgccttcgctgccgctgctgctgctgctaatgctaggaatgggatgctgggcccgggaggtgctggtccccgaggggcccttgtaccgcgtggctggcacagctgtctccatctcctgcaatgtgaccggctatgagggccctgcccagcagaacttcgagtggttcctgtataggcccgaggccccagatactgcactgggcattgtcagtaccaaggatacccagttctcctatgctgtcttcaagtcccgagtggtggcgggtgaggtgcaggtgcagcgcctacaaggtgatgccgtggtgctcaagattgcccgcctgcaggcccaggatgccggcatttatgagtgccacaccccctccactgatacccgctacctgggcagctacagcggcaaggtggagctgagaggtactgggccctgggacggggtggagccacacaccctctcaaggcagaaagtcaaggccacaagtgacctatctagttgccccttaggttttgtagccaaggaacttgaggcccaa

SEQ ID NO: 312514 - DNA, 2299 bp, Homo sapiens
agcagcgggaggggcggagggaggggattcggcagctccagttcagctcgctcggcgcacccacgcctcgctgccccgcttcctgccctcaacctgggcatgcgccccccacccttccggccccccagaacccgcgccatcccccggagcctccccagagctggccgcgcaggatgggcgccctcaggcccacgctgctgccgccttcgctgccgctgctgctgctgctaatgctaggaatgggatgctgggcccgggaggtgctggtccccgaggggcccttgtaccgcgtggctggcacagctgtctccatctcctgcaatgtgaccggctatgagggccctgcccagcagaacttcgagtggttcctgtataggcccgaggccccagatactgcactgggcattgtcagtaccaaggatacccagttctcctatgctgtcttcaagtcccgagtggtggcgggtgaggtgcaggtgcagcgcctacaaggtgatgccgtggtgctcaagattgcccgcctgcaggcccaggatgccggcatttatgagtgccacaccccctccactgatacccgctacctgggcagctacagcggcaaggtggagctgagagttcttccagatgtcctccaggtgtctgctgcccccccagggccccgaggccgccaggccccaacctcacccccacgcatgacggtgcatgaggggcaggagctggcactgggctgcctggcgaggacaagcacacagaagcacacacacctggcagtgtcctttgggcgatctgtgcccgaggcaccagttgggcggtcaactctgcaggaagtggtgggaatccggtcagacttggccgtggaggctggagctccctatgctgagcgattggctgcaggggagcttcgtctgggcaaggaagggaccgatcggtaccgcatggtagtagggggtgcccaggcaggggacgcaggcacctaccactgcactgccgctgagtggattcaggatcctgatggcagctgggcccagattgcagagaaaagggccgtcctggcccacgtggatgtgcagacgctgtccagccagctggcagtgacagtggggcctggtgaacgtcggatcggcccaggggagcccttggaactgctgtgcaatgtgtcaggggcacttcccccagcaggccgtcatgctgcatactctgtaggttgggagatggcacctgcgggggcacctgggcccggccgcctggtagcccagctggacacagagggtgtgggcagcctgggccctggctatgagggccgacacattgccatggagaaggtggcatccagaacataccggctacggctagaggctgccaggcctggtgatgcgggcacctaccgctgcctcgccaaagcctatgttcgagggtctgggacccggcttcgtgaagcagccagtgcccgttcccggcctctccctgtacatgtgcgggaggaaggtgtggtgctggaggctgtggcatggctagcaggaggcacagtgtaccgcggggagactgcctccctgctgtgcaacatctctgtgcggggtggccccccaggactgcggctggccgccagctggtgggtggagcgaccagaggacggagagctcagctctgtccctgcccagctggtgggtggcgtaggccaggatggtgtggcagagctgggagtccggcctggaggaggccctgtcagcgtagagctggtggggccccgaagccatcggctgagactacacagcttggggcccgaggatgaaggcgtgtaccactgtgcccccagcgcctgggtgcagcatgccgactacagctggtaccaggcgggcagtgcccgctcagggcctgttacagtctacccctacatgcatgccctggacaccctatttgtgcctctgctggtgggtacaggggtggccctagtcactggtgccactgtccttggtaccatcacttgctgcttcatgaagaggcttcgaaaacggtgatcccttactccccaggtcttgcaggtgtcgactgtcttccggcccagctccaagccctcctctggttgcctggacaccctctccctctgtccactcttcctttaatttatttgacctcccactacccagaatgggagacgtgcctccccttccccactccttccctcccaagcccctccctctggccttctgttcttgatctcttagggatcctatagggaggccatttcctgtcctggaattagtttttctaaaatgtgaataaacttgttttataaaaagca

SEQ ID NO: 312515 - DNA, 2168 bp, Homo sapiens
ggtctcctttccttttgtaggcagagatcaagaatggtgcttgtggcggcagagggcatggaatgaggaaccaggcatctccaactccttctgcctttccctacaggaatgggatgctgggcccgggaggtgctggtccccgaggggcccttgtaccgcgtggctggcacagctgtctccatctcctgcaatgtgaccggctatgagggccctgcccagcagaacttcgagtggttcctgtataggcccgaggccccagatactgcactgggcattgtcagtaccaaggatacccagttctcctatgctgtcttcaagtcccgagtggtggcgggtgaggtgcaggtgcagcgcctacaaggtgatgccgtggtgctcaagattgcccgcctgcaggcccaggatgccggcatttatgagtgccacaccccctccactgatacccgctacctgggcagctacagcggcaaggtggagctgagagttcttccagatgtcctccaggtgtctgctgcccccccagggccccgaggccgccaggccccaacctcacccccacgcatgacggtgcatgaggggcaggagctggcactgggctgcctggcgaggacaagcacacagaagcacacacacctggcagtgtcctttgggcgatctgtgcccgaggcaccagttgggcggtcaactctgcaggaagtggtgggaatccggtcagacttggccgtggaggctggagctccctatgctgagcgattggctgcaggggagcttcgtctgggcaaggaagggaccgatcggtaccgcatggtagtagggggtgcccaggcaggggacgcaggcacctaccactgcactgccgctgagtggattcaggatcctgatggcagctgggcccagattgcagagaaaagggccgtcctggcccacgtggatgtgcagacgctgtccagccagctggcagtgacagtggggcctggtgaacgtcggatcggcccaggggagcccttggaactgctgtgcaatgtgtcaggggcacttcccccagcaggccgtcatgctgcatactctgtaggttgggagatggcacctgcgggggcacctgggcccggccgcctggtagcccagctggacacagagggtgtgggcagcctgggccctggctatgagggccgacacattgccatggagaaggtggcatccagaacataccggctacggctagaggctgccaggcctggtgatgcgggcacctaccgctgcctcgccaaagcctatgttcgagggtctgggacccggcttcgtgaagcagccagtgcccgttcccggcctctccctgtacatgtgcgggaggaaggtgtggtgctggaggctgtggcatggctagcaggaggcacagtgtaccgcggggagactgcctccctgctgtgcaacatctctgtgcggggtggccccccaggactgcggctggccgccagctggtgggtggagcgaccagaggacggagagctcagctctgtccctgcccagctggtgggtggcgtaggccaggatggtgtggcagagctgggagtccggcctggaggaggccctgtcagcgtagagctggtggggccccgaagccatcggctgagactacacagcttggggcccgaggatgaaggcgtgtaccactgtgcccccagcgcctgggtgcagcatgccgactacagctggtaccaggcgggcagtgcccgctcagggcctgttacagtctacccctacatgcatgccctggacaccctatttgtgcctctgctggtgggtacaggggtggccctagtcactggtgccactgtccttggtaccatcacttgctgcttcatgaagaggcttcgaaaacggtgatcccttactccccaggtcttgcaggtgtcgactgtcttccggcccagctccaagccctcctctggttgcctggacaccctctccctctgtccactcttcctttaatttatttgacctcccactacccagaatgggagacgtgcctccccttccccactccttccctcccaagcccctccctctggccttctgttcttgatctcttagggatcctatagggaggccatttcctgtcctggaattagtttttctaaaatgtgaataaacttgttttataaaaagca

SEQ ID NO: 312516 - DNA, 2238 bp, Homo sapiens
ccacagctcatgaggagggatgctccctagtttgtgtccctccacaacaaaacaagagggtggtcgtcgctcctactcacaatgagctgaacgacaggatgagtttgctgtgtgttgcctccactccggagtctgcttgattatatgaaacctaccccgccgcggcgcgcgcgtttcttatataatataacctaccactccagccatacgctagacgacccctccttcttctcttacatataaacaaagttggtggcgtcgtagataagtatcaccaccccccccacgtgaggataaataatatgagcccccccccctttttttttttttttttttttttttttttttttttttttttttttttttttttttttttttttttttttttttttttttttttttttttttttttttttttttttttttttttttttttttttttttctttgccctctgggagctcacagtttatttagggagataggctatacacaggaaacagtaacaagggctgccagctcccagccctccctcactccagctgttctctccagttcttccagatgtcctccaggtgtctgctgcccccccagggccccgaggccgccaggccccaacctcacccccacgcatgacggtgcatgaggggcaggagctggcactgggctgcctggcgaggacaagcacacagaagcacacacacctggcagtgtcctttgggcgatctgtgcccgaggcaccagttgggcggtcaactctgcaggaagtggtgggaatccggtcagacttggccgtggaggctggagctccctatgctgagcgattggctgcaggggagcttcgtctgggcaaggaagggaccgatcggtaccgcatggtagtagggggtgcccaggcaggggacgcaggcacctaccactgcactgccgctgagtggattcaggatcctgatggcagctgggcccagattgcagagaaaagggccgtcctggcccacgtggatgtgcagacgctgtccagccagctggcagtgacagtggggcctggtgaacgtcggatcggcccaggggagcccttggaactgctgtgcaatgtgtcaggggcacttcccccagcaggccgtcatgctgcatactctgtaggttgggagatggcacctgcgggggcacctgggcccggccgcctggtagcccagctggacacagagggtgtgggcagcctgggccctggctatgagggccgacacattgccatggagaaggtggcatccagaacataccggctacggctagaggctgccaggcctggtgatgcgggcacctaccgctgcctcgccaaagcctatgttcgagggtctgggacccggcttcgtgaagcagccagtgcccgttcccggcctctccctgtacatgtgcgggaggaaggtgtggtgctggaggctgtggcatggctagcaggaggcacagtgtaccgcggggagactgcctccctgctgtgcaacatctctgtgcggggtggccccccaggactgcggctggccgccagctggtgggtggagcgaccagaggacggagagctcagctctgtccctgcccagctggtgggtggcgtaggccaggatggtgtggcagagctgggagtccggcctggaggaggccctgtcagcgtagagctggtggggccccgaagccatcggctgagactacacagcttggggcccgaggatgaaggcgtgtaccactgtgcccccagcgcctgggtgcagcatgccgactacagctggtaccaggcgggcagtgcccgctcagggcctgttacagtctacccctacatgcatgccctggacaccctatttgtgcctctgctggtgggtacaggggtggccctagtcactggtgccactgtccttggtaccatcacttgctgcttcatgaagaggcttcgaaaacggtgatcccttactccccaggtcttgcaggtgtcgactgtcttccggcccagctccaagccctcctctggttgcctggacaccctctccctctgtccactcttcctttaatttatttgacctcccactacccagaatgggagacgtgcctccccttccccactccttccctcccaagcccctccctctggccttctgttcttgatctcttagggatcctatagggaggccatttcctgtcctggaattagtttttctaaaatgtgaataaacttgttttataaaaagca

SEQ ID NO: 312517 - DNA, 2601 bp, Homo sapiens
agcagcgggaggggcggagggaggggattcggcagctccagttcagctcgctcggcgcacccacgcctcgctgccccgcttcctgccctcaacctgggcatgcgccccccacccttccggccccccagaacccgcgccatcccccggagcctccccagagctggccgcgcaggatgggcgccctcaggcccacgctgctgccgccttcgctgccgctgctgctgctgctaatgctaggaatgggatgctgggcccgggaggtgctggtccccgaggggcccttgtaccgcgtggctggcacagctgtctccatctcctgcaatgtgaccggctatgagggccctgcccagcagaacttcgagtggttcctgtataggcccgaggccccagatactgcactgggcattgtcagtaccaaggatacccagttctcctatgctgtcttcaagtcccgagtggtggcgggtgaggtgcaggtgcagcgcctacaaggtgatgccgtggtgctcaagattgcccgcctgcaggcccaggatgccggcatttatgagtgccacaccccctccactgatacccgctacctgggcagctacagcggcaaggtggagctgagagttcttccagatgtcctccaggtgtctgctgcccccccagggccccgaggccgccaggccccaacctcacccccacgcatgacggtgcatgaggggcaggagctggcactgggctgcctggcgaggacaagcacacagaagcacacacacctggcagtgtcctttgggcgatctgtgcccgaggcaccagttgggcggtcaactctgcaggaagtggtgggaatccggtcagacttggccgtggaggctggagctccctatgctgagcgattggctgcaggggagcttcgtctgggcaaggaagggaccgatcggtaccgcatggtagtagggggtgcccaggcaggggacgcaggcacctaccactgcactgccgctgagtggattcaggatcctgatggcagctgggcccagattgcagagaaaagggccgtcctggcccacgtggatgtgcagacgctgtccagccagctggcagtgacagtggggcctggtgaacgtcggatcggcccaggggagcccttggaactgctgtgcaatgtgtcaggggcacttcccccagcaggccgtcatgctgcatactctgtaggttgggagatggcacctgcgggggcacctgggcccggccgcctggtagcccagctggacacagagggtgtgggcagcctgggccctggctatgagggccgacacattgccatggagaaggtggcatccagaacataccggctacggctagaggctgccaggcctggtgatgcgggcacctaccgctgcctcgccaaagcctatgttcgagggtctgggacccggcttcgtgaagcagccagtgcccgttcccggcctctccctgtacatgtgcgggaggaaggtgtggtgctggaggctgtggcatggctagcaggaggcacagtgtaccgcggggagactgcctccctgctgtgcaacatctctgtgcggggtggccccccaggactgcggctggccgccagctggtgggtggagcgaccagaggacggagagctcagctctgtccctgcccagctggtgggtggcgtaggccaggatggtgtggcagagctgggagtccggcctggaggaggccctgtcagcgtagagctggtggggccccgaagccatcggctgagactacacagcttggggcccgaggatgaaggcgtgtaccactgtgcccccagcgcctgggtgcagcatgccgactacagctggtaccaggcgggcagtgcccgctcagggcctgttacagtctacccctacatgcatgccctggacaccctatttgtgcctctgctggtgggtacaggggtggccctagtcactggtgccactgtccttggtaccatcacttgctgcttcatgaagaggcttcgaaaacggtgatcccttactccccaggtcttgcaggtgtcgactgtcttccggcccagctccaagccctcctctggttgcctggacaccctctccctctgtccactcttcctttaatttatttgacctcccactacccagaatgggagacgtgcctccccttccccactccttccctcccaagcccctccctctggccttctgttcttgatctcttagggatcctatagggaggccatttcctgtcctggaattagtttttctaaaatgtgaataaacttgttttataaaaagcaaaaaaaaaaaaaaaaaaaaaaaaaaaaaaaaaaaaaggggggcgggcgcgcgccggggccccgggaaagagtttaaaaaacatccgtagtgggggacggggcccaaaagggaacgggaaaggggcaaaacacggggaaccaagagaaaacggggacagaaaaagggaggggattcacaacaaaaaaaaaaacgcccggggggaaacacaaagggtccgaacacaccgaaggggaaacagggggagacaaggggcacacaaaagggagcccaagaagcacagataaaataaccccgccagggg

SEQ ID NO: 312518 - DNA, 2352 bp, Homo sapiens
agcagcgggaggggcggagggaggggattcggcagctccagttcagctcgctcggcgcacccacgcctcgctgccccgcttcctgccctcaacctgggcatgcgccccccacccttccggccccccagaacccgcgccatcccccggagcctccccagagctggccgcgcaggatgggcgccctcaggcccacgctgctgccgccttcgctgccgctgctgctgctgctaatgctaggaatgggatgctgggcccgggaggtgctggtccccgaggggcccttgtaccgcgtggctggcacagctgtctccatctcctgcaatgtgaccggctatgagggccctgcccagcagaacttcgagtggttcctgtataggcccgaggccccagatactgcactgggcattgtcagtaccaaggatacccagttctcctatgctgtcttcaagtcccgagtggtggcgggtgaggtgcaggtgcagcgcctacaaggtgatgccgtggtgctcaagattgcccgcctgcaggcccaggatgccggcatttatgagtgccacaccccctccactgatacccgctacctgggcagctacagcggcaaggtggagctgagagttcttccagatgtcctccaggtgtctgctgcccccccagggccccgaggccgccaggccccaacctcacccccacgcatgacggtgcatgaggggcaggagctggcactgggctgcctggcgaggacaagcacacagaagcacacacacctggcagtgtcctttgggcgatctgtgcccgaggcaccagttgggcggtcaactctgcaggaagtggtgggaatccggtcagacttggccgtggaggctggagctccctatgctgagcgattggctgcaggggagcttcgtctgggcaaggaagggaccgatcggtaccgcatggtagtagggggtgcccaggcaggggacgcaggcacctaccactgcactgccgctgagtggattcaggatcctgatggcagctgggcccagattgcagagaaaagggccgtcctggcccacgtggatgtgcagacgctgtccagctggacacagagggtgtgggcagcctgggccctggctatgagggccgacacattgccatggagaaggtggcatccagaacataccggctacggctagaggctgccaggcctggtgatgcgggcacctaccgctgcctcgccaaagcctatgttcgagggtctgggacccggcttcgtgaagcagccagtgcccgttcccggcctctccctgtacatgtgcgggaggaaggtgagagggggctgggccctggacggggttcgaggattgtcaaccccttttccttctgtttccatgacccctccctctccgtcagctgtttgcaggccacagcctcacgctcctcttctaccaagattgtgggaataccctgagtttcctggggcggtgcttggcggcagccctaaccccatgctccctggccctgcaccctctgaccccatgtcctttgttctgcaggtgtggtgctggaggctgtggcatggctagcaggaggcacagtgtaccgcggggagactgcctccctgctgtgcaacatctctgtgcggggtggccccccaggactgcggctggccgccagctggtgggtggagcgaccagaggacggagagctcagctctgtccctgcccagctggtgggtggcgtaggccaggatggtgtggcagagctgggagtccggcctggaggaggccctgtcagcgtagagctggtggggccccgaagccatcggctgagactacacagcttggggcccgaggatgaaggcgtgtaccactgtgcccccagcgcctgggtgcagcatgccgactacagctggtaccaggcgggcagtgcccgctcagggcctgttacagtctacccctacatgcatgccctggacaccctatttgtgcctctgctggtgggtacaggggtggccctagtcactggtgccactgtccttggtaccatcacttgctgcttcatgaagaggcttcgaaaacggtgatcccttactccccaggtcttgcaggtgtcgactgtcttccggcccagctccaagccctcctctggttgcctggacaccctctccctctgtccactcttcctttaatttatttgacctcccactacccagaatgggagacgtgcctccccttccccactccttccctcccaagcccctccctctggccttctgttcttgatctcttagggatcctatagggaggccatttcctgtcctggaattagtttttctaaaatgtgaataaacttgttttataaaaagca

SEQ ID NO: 312519 - DNA, 2322 bp, Homo sapiens
agcagcgggaggggcggagggaggggattcggcagctccagttcagctcgctcggcgcacccacgcctcgctgccccgcttcctgccctcaacctgggcatgcgccccccacccttccggccccccagaacccgcgccatcccccggagcctccccagagctggccgcgcaggatgggcgccctcaggcccacgctgctgccgccttcgctgccgctgctgctgctgctaatgctaggaatgggatgctgggcccgggaggtgctggtccccgaggggcccttgtaccgcgtggctggcacagctgtctccatctcctgcaatgtgaccggctatgagggccctgcccagcagaacttcgagtggttcctgtataggcccgaggccccagatactgcactgggcattgtcagtaccaaggatacccagttctcctatgctgtcttcaagtcccgagtggtggcgggtgaggtgcaggtgcagcgcctacaaggtgatgccgtggtgctcaagattgcccgcctgcaggcccaggatgccggcatttatgagtgccacaccccctccactgatacccgctacctgggcagctacagcggcaaggtggagctgagagttcttccagatgtcctccaggtgtctgctgcccccccagggccccgaggccgccaggccccaacctcacccccacgcatgacggtgcatgaggggcaggagctggcactgggctgcctggcgaggacaagcacacagaagcacacacacctggcagtgtcctttgggcgatctgtgcccgaggcaccagttgggcggtcaactctgcaggaagtggtgggaatccggtcagacttggccgtggaggctggagctccctatgctgagcgattggctgcaggggagcttcgtctgggcaaggaagggaccgatcggtaccgcatggtagtagggggtgcccaggcaggggacgcaggcacctaccactgcactgccgctgagtggattcaggatcctgatggcagctgggcccagattgcagagaaaagggccgtcctggcccacgtggatgtgcagacgctgtccagccagctggcagtgacagtggggcctggtgaacgtcggatcggcccaggggagcccttggaactgctgtgcaatgtgtcaggggcacttcccccagcaggccgtcatgctgcatactctgtaggttgggagatggcacctgcgggggcacctgggcccggccgcctggtagcccagctggacacagagggtgtgggcagcctgggccctggctatgagggccgacacattgccatggagaaggtggcatccagaacataccggctacggctagaggctgccaggcctggtgatgcgggcacctaccgctgcctcgccaaagcctatgttcgagggtctgggacccggcttcgtgaagcagccagtgcccgttcccggcctctccctgtacatgtgcgggaggaaggtgtggtgctggaggctgtggcatggctagcaggaggcacagtgtaccgcggggagactgcctccctgctgtgcaacatctctgtgcggggtggccccccaggactgcggctggccgccagctggtgggtggagcgaccagaggacggagagctcagctctgtccctgcccagctggtgggtggcgtaggccaggatggtgtggcagagctgggagtccggcctggaggaggccctgtcagcgtagagctggtggggccccgaagccatcggctgagactacacagcttggggcccgaggatgaaggcgtgtaccactgtgcccccagcgcctgggtgcagcatgccgactacagctggtaccaggcgggcagtgcccgctcagggcctgttacagtctacccctacatgcatgccctggacaccctatttgtgcctctgctggtgggtacaggggtggccctagtcactggtgccactgtccttggtaccatcacttgctgcttcatgaagaggcttcgaaaacggtgatcccttactccccagcccacaccgggcacccttttcaggtcttgcaggtgtcgactgtcttccggcccagctccaagccctcctctggttgcctggacaccctctccctctgtccactcttcctttaatttatttgacctcccactacccagaatgggagacgtgcctccccttccccactccttccctcccaagcccctccctctggccttctgttcttgatctcttagggatcctatagggaggccatttcctgtcctggaattagtttttctaaaatgtgaataaacttgttttataaaaagca

SEQ ID NO: 312520 - DNA, 2081 bp, Homo sapiens
agcagcgggaggggcggagggaggggattcggcagctccagttcagctcgctcggcgcacccacgcctcgctgccccgcttcctgccctcaacctgggcatgcgccccccacccttccggccccccagaacccgcgccatcccccggagcctccccagagctggccgcgcaggatgggcgccctcaggcccacgctgctgccgccttcgctgccgctgctgctgctgctaatgctaggaatgggatgctgggcccgggaggtgctggtccccgaggggcccttgtaccgcgtggctggcacagctgtctccatctcctgcaatgtgaccggctatgagggccctgcccagcagaacttcgagtggttcctgtataggcccgaggccccagatactgcactgggcattgtcagtaccaaggatacccagttctcctatgctgtcttcaagtcccgagtggtggcgggtgaggtgcaggtgcagcgcctacaaggtgatgccgtggtgctcaagattgcccgcctgcaggcccaggatgccggcatttatgagtgccacaccccctccactgatacccgctacctgggcagctacagcggcaaggtggagctgagagttcttccagatgtcctccaggtgtctgctgcccccccagggccccgaggccgccaggccccaacctcacccccacgcatgacggtgcatgaggggcaggagctggcactgggctgcctggcgaggacaagcacacagaagcacacacacctggcagtgtcctttgggcgatctgtgcccgaggcaccagttgggcggtcaactctgcaggaagtggtgggaatccggtcagacttggccgtggaggctggagctccctatgctgagcgattggctgcaggggagcttcgtctgggcaaggaagggaccgatcggtaccgcatggtagtagggggtgcccaggcaggggacgcaggcacctaccactgcactgccgctgagtggattcaggatcctgatggcagctgggcccagattgcagagaaaagggccgtcctggcccacgtggatgtgcagacgctgtccagccagctggcagtgacagtggggcctggtgaacgtcggatcggcccaggggagcccttggaactgctgtgcaatgtgtcaggggcacttcccccagcaggccgtcatgctgcatactctgtaggttgggagatggcacctgcgggggcacctgggcccggccgcctggtagcccagctggacacagagggtgtgggcagcctgggccctggctatgagggccgacacattgccatggagaaggtggcatccagaacataccggctacggctagaggctgccaggcctggtgatgcgggcacctaccgctgcctcgccaaagcctatgttcgagggtctgggacccggcttcgtgaagcagccagtgcccgttcccggcctctccctgtacatgtgcgggaggaaggtgtggtgctggaggctgtggcatggctagcaggaggcacagtgtaccgcggggagactgcctccctgctgtgcaacatctctgtgcggggtggccccccaggactgcggctggccgccagctggtgggtggagcgaccagaggacggagagctcagctctgtccctgcccagctggtgggtggcgtaggccaggatggtgtggcagagctgggagtccggcctggaggaggccctgtcagcgtagagctggtggggccccgaagccatcggctgagactacacagcttggggcccgaggatgaaggcgtgtaccactgtgcccccagcgcctgggtgcagcatgccgactacagctggtaccaggcgggcagtgcccgctcagggcctgttacagtctacccctacatgcatgccctggacaccctatttgtgcctctgctggtgggtacaggggtggccctagtcactggtgccactgtccttggtaccatcacttgctgcttcatgaagaggcttcgaaaacggtgatcccttactccccagcttgcaggtgtcgactgtctacccctacatgcatgcctgacacccctcgtg

SEQ ID NO: 312521 - DNA, 610 bp, Homo sapiens
gcggccgctccaacatcaggggtggccctagtcactggtgccactgtccttggtaccatcacttgctgcttcatgaagaggcttcgaaaacggtgatcccttactccccaggtcttgcaggtgtcgactgcctcagctctgtccctgcccagctggtgggtggcgtaggccaggatggtgtggcagagctgggagtccggcctggaggaggccctgtcagcgtagagctggtggggccccgaagccatcggctgagactacacagcttggggcccgaggatgaaggcgtgtaccactgtgcccccagcgcctgggtgcagcatgccgactacagctggtaccaggcgggcagtgcccgctcagggcctgttacagtctacccctacatgcatggcctggacaccctctccctctgtccactcttcctttaatttatttgacctcccactacccagaatgggagacgtgcctccccttccccactccttccctcccaagcccctccctctggccttctgttcttgatctcttagggatcctatagggaggccatttcctgtcctggaattagtttttctaaaatgtgaataaacttgttttataaaaagca

SEQ ID NO: 312522 - DNA, 347 bp, Homo sapiens
gtctcccatttgtgggtgggtttgctgcagctggctggatcccgtccttactcctaaggtggggaggggcgttctcaccctaggggctactcacctggtggatgggagtggacagtgtggagcctgtttgccctgccccgtgagaaagatgacttcatccagacacatgtggaactggctccatagacccaaagcaagcttagtccaaacaatgtctgaaattgtccatctaaaatagaaaccacatgttacatctcgagtcctttctctcgagcctttcttcagtcggggcagaggcccagactcattggagacggagagccctgggcagggggggcagcaccagg

SEQ ID NO: 312523 - DNA, 1639 bp, Homo sapiens
tcgcccaggttggaatgcagtggcacaatctcgggtcactgcaacctccacttcctgagttctagcaattctcctgcctcagcctcctgagtagctgggattacaggtgcccaccaccacgcccagctaatttttgtatttttagtaaaatggggtttcactatgttagccaggcttatctcagactcctggcctcaggtgatccccctgccttggcttcccatagtgctgggattacaggtgttagccaccacgcccagcctatatgtattttttgagacagggtcttgctctattgcccaggctgaagtgcagtggcatgatcacagctcacaaatgccttgatctcctgggctcaagctatctcctcccacctcagcctcttaagtagctggagctacaggttatctgccaccacactcagctaatttttaattttttagaaagacggggtcttcctgtgttccccaggctggccccaaactcctgggctcaagcaatcctgccttacctcccaaagtgctgggattacaggtgtgagccaccacatctggcccaagtcacccaaattttttacagcttggtttggaaggcaatgtagtatattaaaattatgggccctggagtcagaaagatccaggtttgaatacagagtccgtcatttattagctttatgaatttgagcaatttcgtctcacttgtaaatatagggaatagctcctacctctcaggtatgttgcaaaaaactatataaaagcacttagcatagtggccatgacagagtaagcactcagtaaatcatgccatttatctcatctataaggcatgaaagtagaattttacaagttgtacagaaatagaaggcttggagtggacactacattaaaaggataaaaaaatggagccaggcagaggcaggcatctatagtcccagctattgaggaggcctgaggctggaggatcccttgaacctaggagtttgaggccagcctggacaacaatgtgagattgtggctccaaaaaaataataaaaaataggctgctctgcctatggagtagccattcttttattcctttacttttttaataaacttgcttttactttatggaaaaaataaatttttaaatgactagatgagaaacttgaatatcaatctgagaaataaaatctgattaggaatgtaattgggataacctgaagttttggtaagagtgacctaaagaaaacagcacttagataagctactttgttttcctttttcactttactatttttctgatatatatttgttcatatttatggggtacttgtgatattctgagacatgcatagaatgtataatgatcaagtcaggatatttatgttattcattatctcaaacatttatcatttgtttgtgttgggaacatttcaaatcttctagccattttgaaacttacattaagtatagtcaccgtactatgctatcaagcattaaaacttattccttctatctaactgtatgtttgtatctacccattaacctaccttccttcatcgccccaccctgtacacccactacccagcctctggtaactatcattctactctctacctccatgaaataaattttttagctcacatgagtaagaacatgca

SEQ ID NO: 312524 - DNA, 16433 bp, Homo sapiens
aaagacagaaccccagagaaaaacgctgccaattcgttgctttattgttccctgcctggggacctcaatagccttttccattaaccttcccttcttacgcaacggttaatgacttttggggttgttttgctttctgtttctgctgagtcactaaattttgcctctttgtccccaggtgctgctcagcataaaagttaaaagtgcaattcaggaagtactgggattctgtgtagagccgaggaaaccatttccctaagagaagctctgttccttggcttgtccttccttcccgggaaggaagcttccgaggaacgaagggagaagctttgttttgcctgcagaagcagccctgtgctcggctgagggttctcagctggctgtgaactgcggagcattgtaggcgcctggctggctcaggccaatgcagaagtctctcccttctccaaagacccaaatccccacagaaccagcttcgagttactttcccttcaaggggattaaaataattgtgatttgtggcgctctccgttcgcggtggtattttcctgttgtgttaaatgcctcttattaagtaatagatgtgatttatgtgaacgacgaaggggtgtgtggtggattcggtgattaatcagtgaattcccatccgctggcatctctcactgcccctcttgcgtgatgtaagatcagacgtaccctgcattgaaaagtcaagacacacgggcgtctcgctcgcgctcacacacgctctgcctcctctctcccgcacgcgcgcatccctccaccttccacatcctgctccaggcaggagaaggctgactggctggactcattgagctgaagaatttccagtgacatttgtaaatgacgccgctcgattccaggctccaagcggccgctgccgccgccgccgccgccgggccgaaggtgccgccgagcagtctccagcgcaggcttccttaccgggcgaccacaatgtccgagtttctcctcgccttactcactctctcgggattattgccgattgccagggtgctgaccgtgggagccgaccgagatcagcagttgtgtgatcctggtgaatttctttgccacgatcacgtgacttgtgtctcccagagctggctgtgtgatggggaccctgactgccctgatgattcagacgagtctttagatacctgtcccgaggaggtagaaatcaagtgccccttgaatcacattgcttgccttggtaccaacaaatgtgttcatttatcccagctgtgcaatggtgtcttggactgcccagatgggtatgacgaaggagtacattgtcaggaactgttatccaattgccaacagctgaattgtcagtataaatgtacaatggtcagaaatagtacaagatgttactgtgaggatggattcgaaataacagaagatgggagaagctgtaaagatcaagatgaatgtgctgtttatggtacatgcagccagacctgcagaaacacacatggatcctacacttgcagttgtgtggaaggctacctaatgcagccagacaacagatcttgcaaggctaaaattgaacctacagatagaccacctatactattaattgcaaattttgaaacaattgaggttttctatcttaatggaagtaaaatggcaactctaagctcagtcaatggaaatgaaattcatactctggattttatttataatgaagatatgatttgttggattgaatcaagagaatcttcaaatcaactcaaatgtatccagataacaaaagcaggaggattaacagatgaatggacaatcaatattcttcaatccttccacaatgtgcaacaaatggcgattgactggctcactcgaaatctctattttgtggaccatgtcggtgaccggatctttgtttgtaattccaacggttctgtatgtgtcaccctgattgatctggagcttcacaatcctaaagcaatagcagtagatccaatagcaggaaaacttttctttactgactacgggaatgtcgccaaagtggagagatgtgacatggatgggatgaaccgaacaaggataattgattcaaagacagagcagccagctgcactggcactagacctagtcaacaaattggtttactgggtagatctttacttggactatgtgggagtagtggactatcaaggaaaaaatagacacactgtcattcaaggcagacaagtcagacatctttatggtataactgtgtttgaagattatttgtatgcaaccaattctgataactacaatatcgtaaggataaaccgatttaatgggactgatattcactcattaattaaaattgagaatgcttggggaatccgaatttatcaaaaaagaactcaaccaacagtcagaagccatgcatgtgaagtcgatccatatggaatgccagggggctgttcacacatctgtctactcagcagcagttacaaaactcggacttgtcgctgcaggactggcttcaacttgggaagtgatggcaggtcatgcaaaagaccaaagaatgagttgttcctcttttatgggaaaggacgcccaggaattgttagaggaatggacttgaataccaagatagctgatgaatacatgatccccatagaaaatctggtaaaccctcgtgctttagactttcacgcagaaaccaattacatctactttgctgacaccaccagtttcctaattggccggcagaagatagatggcacagagagagaaaccatcctgaaagatgatctggataatgtagagggcattgctgtggactggattggaaataatctttactggaccaatgatggccataggaaaaccattaatgtggccaggctggaaaaagcttctcagagtcggaagactcttttagagggtgaaatgtctcatcccagaggaattgtggtggatccagttaatggttggatgtattggacagactgggaggaagatgaaatagatgacagcgtgggaaggattgagaaggcctggatggatggattcaatcggcagatttttgtgacttcaaagatgctgtggccaaacggtttaactctggactttcacaccaacacattatactggtgtgatgcctattacgatcatattgaaaaagtatttttgaatgggactcacaggaagattgtttacagtgggagagagttgaaccaccctttcggactgtcgcatcatggaaattatgtgttctggactgattatatgaatggttccatttttcaactagatttgataacaagtgaggtgacattgctgaggcatgaaagaccacccctatttgggcttcagatttatgatccacgaaagcaacaaggtgacaatatgtgccgagtaaataatgggggctgtagtacactttgcttggctatcccaggaggccgggtgtgtgcttgtgccgataatcaacttttggatgaaaatgggacaacttgcacatttaatcctggagaagcactacctcacatatgtaaagctggagagtttcgctgcaaaaacagacactgtatccaagctcggtggaaatgtgatggcgacgatgactgcctagacggaagcgatgaggattcagtaaactgcttcaatcatagctgtcctgatgatcagtttaaatgccagaataatcgctgcatccccaagagatggctttgtgatggagctaatgactgtgggagcaatgaagatgaatccaatcaaacttgcacagccagaacatgccaggtagaccagttttcttgcggaaatgggcgttgcattcccagagcatggctgtgtgacagggaagacgactgtggtgaccagacagatgaaatggcatcttgtgaattcccaacttgtgagccactaacccaattcgtatgcaaaagtggaagatgcattagcagcaaatggcactgcgactctgatgacgactgtggggacgggagtgatgaggtgggctgtgttcactcttgctttgataatcagttcagatgttccagtggcagatgcatcccaggccactgggcctgtgatggtgacaatgactgtggggacttcagtgatgaagcccagatcaattgtactaaagaagagattcattctcctgctggttgtaacggaaatgaatttcagtgccaccctgatggtaattgcgttcctgatttgtggcgctgtgatggagaaaaagactgtgaagatggtagtgatgaaaaaggttgcaatggtaccatacgattgtgtgaccacaaaaccaagttttcctgttggagtacagggagatgcatcaacaaagcatgggtgtgtgatggagatattgattgcgaagatcagtcagatgaagatgactgtgacagtttcttgtgtggaccacccaagcatccttgtgctaatgacacctcagtctgcctgcagccagagaaactctgcaatgggaaaaaggattgtcctgatggctctgatgaaggctatctctgtgatgagtgttcgctgaacaatggaggctgtagcaaccactgttctgttgttcctggaagaggaattgtctgttcctgccctgaaggacttcaactcaacaaagacaataaaacatgtgaaattgtggattattgtagcaatcatctaaagtgcagccaagtatgtgagcagcacaagcacacagtcaagtgctcatgttatgaaggttggaagctggatgtagacggtgaaagttgtacaagtgttgatccttttgaagcattcatcatcttttctattcgtcatgagatcagaaggattgatcttcacaaaagagactatagtctacttgttcctggattgagaaacacaatagcacttgattttcacttcaatcaaagtttactttattggacagatgttgtagaagacagaatataccggggaaagctttctgaaagtggaggtgtcagtgccattgaagtggttgtggagcatggcctggctactccagaaggcctgacagtcgactggatagcaggaaacatatactggatagacagcaatctggaccaaatcgaagtggccaaactagatggctccctaagaactacactaatagcaggagccatggaacaccccagggccattgctttggacccaagatatggaattcttttctggacagactgggatgcaaattttcctcgcattgaatctgcctctatgagtggtgctgggagaaaaaccatctataaagacatgaaaactggggcttggcctaatggactaactgtggaccactttgagaaaaggatagtgtggacagacgccaggtcagatgctatttattcagccctctatgatggaacaaacatgatagaaatcatccgaggtcatgaatacctttcccatccctttgctgtgtctctatatgggagtgaagtctactggacagactggaggaccaacacattgtccaaagccaataagtggacagggcagaatgtcagtgtgattcagaaaaccagtgcacagccatttgaccttcagatataccatcccagtcgccagccacaggctcccaatccttgtgcagctaatgatggcaaaggcccctgctctcacatgtgtctaatcaatcacaataggagtgctgcctgtgcgtgcccccacttgatgaagctttcttcagacaagaagacctgctatgaaatgaaaaaatttcttctttatgcaagacgttctgaaatcagaggagtggatattgacaatccatactttaacttcatcacggcatttacagtccctgatattgatgacgttactgtgatagacttcgatgcatctgaggaacgtttatactggacagatattaaaacacaaaccattaaacgagcttttattaacggaactgggttagaaactgttatttcaagagatattcagagtatcagagggctagcagtggattgggtgtcacgtaatttatactggattagctcagaatttgatgaaacgcaaattaatgtggcaaggctagatggctctttgaaaacctcaattatccatggaatcgataagccacagtgtcttgcagctcacccagtcaggggaaaactctactggaccgatggaaacacaattaacatggcaaatatggatggcagtaatagcaagattctgtttcagaatcagaaggagccagttggtctatcgatagactatgtggaaaacaagctttattggatcagttcggggaatggaaccataaatagatgcaacctggatggtggtaatttagaagtaatcgagtcaatgaaagaagaattaacaaaagctacagccctaaccatcatggataagaaactgtggtgggcagaccaaaacttagcccagctaggaacctgcagcaaaagagacggaagaaaccccaccatcctacggaataagacttctggggtagttcatatgaaagtctatgataaagaagcacagcaaggcagcaattcctgccaactaaacaatggtggatgctctcaactttgtttaccaacatctgaaactacaaggacttgtatgtgtacagtgggatattatctccaaaagaaccgtatgtcatgtcaaggtatagaatcatttcttatgtactctgttcatgaaggaatcaggggaatacctcttgaaccaagtgacaaaatggatgctttgatgcctatatcaggaacttcatttgccgtgggaatagatttccatgcagaaaatgataccatctactggacagacatgggcttcaataaaattagcagagctaaaagagatcagacttggaaagaagatatcattaccaatggcttgggaagagtggaagggatagctgttgactggattgctggtaacatatattggacagatcatggtttcaacttaattgaagttgcaagactcaatggttctttccgttatgtaattatttcccaaggcctggatcaaccaagatctatagctgtgcacccagagaaaggcctcttgttctggactgaatggggacaaatgccctgtattggaaaggctcgcttggatggctcagagaaggttgtccttgtaagcatgggaatagcatggccgaatggcatctccatcgactatgaggaaaataaattgtactggtgtgatgctcgcacagacaagatagagagaatcgaccttgagactggagggaatcgcgagatggtgctgtcaggaagcaatgtggatatgttttcagttgcagtctttggggcttacatctactggtctgacagagcacatgcaaacgggtctgtcagaaggggccacaagaatgatgccacagaaacgataaccatgagaaccggccttggagtcaacctgaaggaggttaaaatatttaaccgagtaagagagaaagggaccaatgtttgtgccagggacaatggtggctgtaagcaactctgtctttatcgaggaaattcccggagaacttgtgcttgtgcccatggatatttggcagaagatggagttacttgcctgaggcatgaaggctatttactgtattcaggaagaacaatattaaaaagtatacatctttctgatgaaaccaatttaaattccccaataaggccatatgagaatccacgttatttcaagaatgtcatagccttggcttttgactataatcaaagaagaaaaggtaccaaccgaatcttttacagtgatgcacactttggaaatatacagcttattaaagacaactgggaagacagacaagtaattgttgaaaatgtgggttctgtggaaggacttgcctatcacagagcctgggatacactgtactggacaagctctaccacctcatccatcaccagacacactgtggaccagactcggcctggagcatttgacagggaagctgtcatcaccatgtcagaagatgaccatccacatgtgctagccttggatgaatgtcaaaatttaatgttttggaccaactggaatgaacaacatccaagtatcatgagatctactctgactgggaaaaatgctcaagtggtggtcagtacagacatactcactccaaatggacttactatcgactaccgtgcagagaagctgtatttctcagatggcagtctaggaaaaattgaaaggtgtgaatacgatggatcccagagacatgtgatagttaaatctgggccagggactttcctcagtttggctgtttatgacaattatatattctggtcggactggggaagaagagctatactgcggtccaacaagtacacaggaggagatacaaaaattcttcgttccgatattccacatcagccaatgggaatcatagctgttgccaatgacaccaatagctgtgaactttctccatgtgcattattgaatggaggctgccatgacttgtgccttttaactcccaatgggagagtgaattgttcctgcagaggggaccgaatattgctagaggacaacagatgtgtgactaaaaattcctcctgcaacgcttattcggagtttgaatgtggaaatggtgagtgcattgactaccagctcacctgtgatggcattcctcactgtaaagataaatcagatgaaaaactgctctactgtgaaaacagaagctgtcgaagaggcttcaagccatgctataatcgccgctgcattcctcatggcaagttatgtgatggagaaaatgactgcggagacaactctgatgaattagattgtaaagtttcaacctgtgccacggttgagttccgctgtgcagatgggacttgtattccaagatcagcacgatgcaaccagaacatagattgtgcagatgcttcagatgaaaagaactgcaataacacagactgcacacatttctataagcttggagtgaaaaccacagggttcataagatgtaattctacctcactgtgtgttctgccaacctggatatgcgacgggtctaatgactgtggagactattcagatgaattaaagtgcccagttcagaacaaacacaaatgtgaagaaaattattttagttgtcctagtggaagatgcattttgaatacctggatatgcgatggtcagaaagattgtgaggatggacgtgatgaattccactgtgattcttcttgctcttggaaccaatttgcttgttccgcacaaaaatgtatttctaagcattggatttgtgatggagaagatgactgtggggatgggttagatgaaagtgacagcatttgtggtgccataacctgtgctgctgacatgttcagctgccagggctctcgtgcctgcgtgccccgacattggctttgtgatggtgaaagggactgtccagatggaagcgatgagctttccacagcaggctgcgctcccaataatacatgtgatgaaaatgctttcatgtgccataataaagtatgcattcccaagcaatttgtttgtgaccatgatgacgactgtggagatggctctgatgagtcaccgcagtgtggataccgacagtgtggtacagaagaatttagttgtgctgatgggcggtgtcttctaaatactcaatggcagtgtgatggagactttgactgtcctgaccattctgatgaagcacctttaaacccaaagtgtaaaagtgcagaacagtcatgcaacagttcattttttatgtgcaaaaatggcaggtgcattcccagtggaggtctttgtgacaataaggatgactgtggcgatggttcagatgagagaaactgccatataaatgaatgtttgagtaagaaagtcagtggatgttctcaagattgtcaagaccttccggtcagttataagtgcaaatgctggcctggattccaactgaaggatgacggcaaaacatgtgtagacattgatgaatgctcttcaggctttccctgtagccagcaatgcatcaatacatacgggacttacaagtgcctctgtacagatgggtatgaaatacaacctgataacccaaatggctgcaaatcgctctcagatgaagaaccttttttaattcttgctgatcatcatgagataaggaaaattagcactgatggctccaactacacacttttaaaacagggattaaacaatgttattgctatagactttgattacagagaagaattcatctattggatcgattctagccgacccaatggcagtcgcataaatagaatgtgtttaaatggaagtgacattaaggtagttcataacacagcggtccccaatgcacttgctgtcgattggattggaaaaaacctctattggtctgacacagaaaaaagaatcattgaagtatccaaactcaatggcttgtaccctactatactcgttagcaaaaggctgaagtttcccagagacttgtctttagatcctcaagctggatatttgtattggattgactgctgcgagtatcctcatattggccgtgttggaatggatggaaccaatcagagtgttgtcatagaaaccaagatttctagacctatggcactaacaatagattatgttaatcgtagactctactgggccgatgaaaatcacattgaatttagcaacatggatggatctcatagacacaaagtccctaatcaagatattccaggggtgattgcactaacattgtttgaagactacatctactggactgatgggaaaaccaagtcactcagccgtgcccataaaacatcgggagcagacagactctcactgatttactcatggcatgccatcacagatatccaggtgtatcattcttatagacaacctgatgtctccaaacatctctgcatgataaataatggtggttgcagtcatttgtgccttttagcccctggaaaaacccacacttgtgcatgtcccactaacttctatctggcagctgataataggacttgcttatccaactgcacagccagccagtttcgttgcaaaactgacaaatgtattccattctggtggaaatgtgacaccgtggatgactgtggtgatggatctgatgaacctgatgactgtcctgaatttagatgtcagccaggccgatttcagtgtgggactggactctgtgctctaccagctttcatctgtgatggagagaatgattgtggagacaattctgatgaactcaactgtgacacacatgtctgcctgtcaggtcaattcaaatgtaccaagaaccagaaatgtatcccagtaaacttaagatgtaatgggcaagatgactgtggtgatgaggaagatgaaagagactgtcctgaaaacagctgttctccagactatttccagtgtaagactacgaagcattgcatttccaagctgtgggtttgtgacgaggatccagactgtgcagatgcatcagacgaggccaactgcgataaaaagacttgtggacctcatgaattccagtgtaaaaacaacaactgtattcccgatcactggcggtgtgatagccaaaatgactgcagtgataattcagatgaagaaaactgtaagccacagacatgtacattgaaagatttcctctgtgccaatggggactgtgtttcttcaaggttttggtgtgatggagattttgactgtgcagatggctctgatgagagaaattgtgagacaagttgttccaaagatcagttccggtgttccaatggtcagtgtataccagcaaaatggaaatgtgatggccatgaagactgcaaatatggggaagatgagaaaagctgtgagccagcttctcctacttgctcatcacgtgaatatatatgtgccagtgatggatgtatttcagcatctttgaaatgtaatggagaatatgattgtgctgatggttcagatgagatggactgtgtgactgaatgtaaggaagatcagtttcggtgcaaaaataaagcccactgtattccaattagatggctgtgtgatggaattcatgactgtgtggatggcagtgatgaagagaactgtgaaagaggaggaaatatatgtagagctgatgagttcctttgcaataattctctctgcaaactacatttctgggtgtgtgatggagaggacgactgtggagacaactctgatgaagcccctgatatgtgtgtcaaatttctttgtccatccacgagacctcacagatgcagaaataacagaatatgcctacagtcggagcaaatgtgcaatgggattgatgaatgcggtgacaattcagatgaagatcactgtggtggtaagctgacatataaagcaaggccttgtaaaaaggatgagtttgcttgtagtaataaaaaatgcatccctatggatctccagtgtgatcgacttgatgactgcggagatggttcagatgagcaaggatgcagaatagctcctactgaatatacctgtgaagataatgtgaatccatgtggagatgatgcatattgtaatcaaataaaaacatctgttttctgtcgctgtaagcctggatttcagagaaacatgaaaaacagacaatgtgaagaccttaatgaatgtttggtgtttggcacatgttcccatcaatgtataaatgtggaaggatcatataaatgtgtgtgtgaccagaattttcaagaaagaaataacacctgcatagcagaaggctctgaagatcaagttctctacattgctaatgacactgatatcctgggttttatatatccattcaactacagtggcgatcatcaacaaatttctcatattgaacataattcaagaataacagggatggatgtatattatcaaagagatatgattatttggagtactcagtttaatccaggcggaattttctacaaaaggatccatggcagagaaaaaaggcaagcaaacagtggcttgatttgtcctgaatttaaaaggcccagggacattgcagttgactgggtggctggaaacatttactggactgatcattctagaatgcattggttcagttactacactactcactggaccagtctgaggtactctatcaacgtagggcagctgaatggccccaactgcaccagactcttaacaaatatggctggagaaccctatgctattgcagtaaatcctaaaagagggatgatgtactggactgttgttggggatcattcccatatagaagaagcagccatggatggtacactgagaaggattttagtacaaaagaacttacagagacccacaggtttggctgtggattattttagtgaacgcatatattgggctgactttgagctctccatcattggcagtgttctgtatgatggctctaattcagtagtctctgtcagcagcaaacaaggtttattacatccacataggatcgatatctttgaagattatatatatggagcaggacctaaaaatggtgtatttcgagttcaaaaatttggccatggttcagtagagtacttagctttaaatattgataaaacaaaaggtgttttgatatctcatcgttataaacaactagatttacccaatccatgcttggatttagcatgcgaatttctttgcttgctaaatccttctggggccacttgtgtgtgtccagaaggaaaatatttgattaatggcacctgcaatgatgacagcctgttagatgattcatgtaagttaacttgtgaaaatggaggaagatgcattttaaatgagaaaggtgatttgaggtgtcactgttggcccagttattcaggagaaagatgtgaagtcaaccactgtagcaactactgccagaatggaggaacttgcgtaccatcagttctagggagacccacctgcagctgtgcactgggtttcactgggccaaactgtggtaagacagtctgtgaggatttttgtcaaaatggaggaacctgcattgtgactgctggaaaccagccttactgccactgccagccggaatacaccggagacagatgtcagtactacgtgtgccaccactattgtgtgaattctgaatcatgtaccattggggatgatggaagtgttgaatgtgtctgtccaacgcgctatgaaggaccaaaatgtgaggttgacaagtgtgtaaggtgccatggggggcactgcattataaataaagacagtgaagatatattttgcaactgcactaatggaaagattgcctctagctgtcagttatgtgatggctactgttacaatggtggcacatgccagctggaccccgagacaaatgtacctgtgtgtctatgctccaccaactggtcaggcacacagtgtgaaaggccagccccaaagagcagcaagtctgatcatatcagcacaagaagcattgccatcattgtgcctctcgtcctcttggtgactttgataaccaccttagtaattggtttagtgctttgtaaaagaaaaagaaggacaaaaacaattagaagacaacctattatcaatggaggaataaatgtagaaattggcaatccatcttataacatgtatgaggtagatcatgatcacaacgatggaggtcttttagatcctggctttatgatagacccaacaaagccaacaaattactccaatccggtatatgcaaaattatatatggatgggcaaaactgtcgaaactccttaggaagtgttgatgaaaggaaagaactgcttccaaagaaaatagaaattggtataagagagacagtggcataatcagtgatatcttttatatgctgtataaatgtataaaatataaggattacttttgtatgttccaacagtattatacttgttttggcatcagcattacctctttctttatctttttcctggttaattgttttctgagttttttgggttttattttttgctgatgactattgattgaccatttgtatggtatttttatgaaaaagaactgcactacagtacaatttacaacaatgctgctgatatgacacacctttgaatttgttaaaattaaaaacaacgtattcctttgtagtgtgaatatgagcaatctattttatatgaacttttttggttgtacttaatcaacgaggagaatctctgcacttttccattatacggtttgaaggctgtaatacagtgtcattttatttttctgtttaaattgatggaaaaatgattgaatggtcaactctcttctttgtgcccataaagatcgattcagactctgctgaaaatatatagctctcacaagttcagcatcacctgctttgaaattagccttagattgccaaccaatagatgagaattttgaggaaaaaaattaaaaatatgtaaaattaataatttgcatgaacacagatgactacattttccaaaacttagtggactctatgtgatgtactaaatgtatacaccttgtaagcaatagttatatttaggtggtagaacatagcaaaaatataaccgaaagttggccgactgcacttgctatggaataagaccttttattctccctcagtctcgagataaatagccagcctagagcacaacagggcattgggtacttgcatcttaggtatttcttcccagtcacatccattttgtggaagattaacccaaccccttacactacactgaacactaaagaataacatataagcacacaaattggtgacagaatttcaattacgtgaacgcatcctctttgctaggtcaaaaacaaagggcaaagcagacattttagtatacagagtgattggcaaatattttcaagatttaatatgagcaacccattatttgccctatccaaaatatattcaagggccttccaagttgtagaagaacaatgatcttcccataatcaaaagtggagagtcgaaatgctgtgccagttgctctggtattcaggtttctctgggttttacagaacgcatggaccccattcacgtttggtttgtttatcttcaaatttgagttgaaacgagtgcgatttatttaagttgtatataaaaataaaaggatagcatttttatacaaatatctttaaaggcacaaaagatttattcacaagttttggagggctttttgttcctctgatagacatgactgacttttagctgtcataatgtattaacctaacagatgaaatatgttaaatatgtggttgctctttatccctttgtacaagcattaaaaaaactgctgttttataagaagactttttgttgtactatgtgcatgcatactacctatttctaaactttgccatattgaggcctttataaactattgatttatgtaatactagtgcaattttgcttgaacaatgttatgcatatcataaactttttcaggttcttgtttaagtacattttttaaattgaacagtatttttcattttggttataatatagtcattttgcctatgtttctacaatgaagtgttaaatactttataaaaaattgttgactgacttatttaaatgaaattctacatattt

SEQ ID NO: 312525 - DNA, 16424 bp, Homo sapiens
ggagttgttgacagcctcctgaaagcaattctgagtgtgaattaagcaagatgctctttgaagaaaggtgctgctcagcataaaagttaaaagtgcaattcaggaagtactgggattctgtgtagagccgaggaaaccatttccctaagagaagctctgttccttggcttgtccttccttcccgggaaggaagcttccgaggaacgaagggagaagctttgttttgcctgcagaagcagccctgtgctcggctgagggttctcagctggctgtgaactgcggagcattgtaggcgcctggctggctcaggccaatgcagaagtctctcccttctccaaagacccaaatccccacagaaccagcttcgagttactttcccttcaaggggattaaaataattgtgatttgtggcgctctccgttcgcggtggtattttcctgttgtgttaaatgcctcttattaagtaatagatgtgatttatgtgaacgacgaaggggtgtgtggtggattcggtgattaatcagtgaattcccatccgctggcatctctcactgcccctcttgcgtgatgtaagatcagacgtaccctgcattgaaaagtcaagacacacgggcgtctcgctcgcgctcacacacgctctgcctcctctctcccgcacgcgcgcatccctccaccttccacatcctgctccaggcaggagaaggctgactggctggactcattgagctgaagaatttccagtgacatttgtaaatgacgccgctcgattccaggctccaagcggccgctgccgccgccgccgccgccgggccgaaggtgccgccgagcagtctccagcgcaggcttccttaccgggcgaccacaatgtccgagtttctcctcgccttactcactctctcgggattattgccgattgccagggtgctgaccgtgggagccgaccgagatcagcagttgtgtgatcctggtgaatttctttgccacgatcacgtgacttgtgtctcccagagctggctgtgtgatggggaccctgactgccctgatgattcagacgagtctttagatacctgtcccgaggaggtagaaatcaagtgccccttgaatcacattgcttgccttggtaccaacaaatgtgttcatttatcccagctgtgcaatggtgtcttggactgcccagatgggtatgacgaaggagtacattgtcaggaactgttatccaattgccaacagctgaattgtcagtataaatgtacaatggtcagaaatagtacaagatgttactgtgaggatggattcgaaataacagaagatgggagaagctgtaaagatcaagatgaatgtgctgtttatggtacatgcagccagacctgcagaaacacacatggatcctacacttgcagttgtgtggaaggctacctaatgcagccagacaacagatcttgcaaggctaaaattgaacctacagatagaccacctatactattaattgcaaattttgaaacaattgaggttttctatcttaatggaagtaaaatggcaactctaagctcagtcaatggaaatgaaattcatactctggattttatttataatgaagatatgatttgttggattgaatcaagagaatcttcaaatcaactcaaatgtatccagataacaaaagcaggaggattaacagatgaatggacaatcaatattcttcaatccttccacaatgtgcaacaaatggcgattgactggctcactcgaaatctctattttgtggaccatgtcggtgaccggatctttgtttgtaattccaacggttctgtatgtgtcaccctgattgatctggagcttcacaatcctaaagcaatagcagtagatccaatagcaggaaaacttttctttactgactacgggaatgtcgccaaagtggagagatgtgacatggatgggatgaaccgaacaaggataattgattcaaagacagagcagccagctgcactggcactagacctagtcaacaaattggtttactgggtagatctttacttggactatgtgggagtagtggactatcaaggaaaaaatagacacactgtcattcaaggcagacaagtcagacatctttatggtataactgtgtttgaagattatttgtatgcaaccaattctgataactacaatatcgtaaggataaaccgatttaatgggactgatattcactcattaattaaaattgagaatgcttggggaatccgaatttatcaaaaaagaactcaaccaacagtcagaagccatgcatgtgaagtcgatccatatggaatgccagggggctgttcacacatctgtctactcagcagcagttacaaaactcggacttgtcgctgcaggactggcttcaacttgggaagtgatggcaggtcatgcaaaagaccaaagaatgagttgttcctcttttatgggaaaggacgcccaggaattgttagaggaatggacttgaataccaagatagctgatgaatacatgatccccatagaaaatctggtaaaccctcgtgctttagactttcacgcagaaaccaattacatctactttgctgacaccaccagtttcctaattggccggcagaagatagatggcacagagagagaaaccatcctgaaagatgatctggataatgtagagggcattgctgtggactggattggaaataatctttactggaccaatgatggccataggaaaaccattaatgtggccaggctggaaaaagcttctcagagtcggaagactcttttagagggtgaaatgtctcatcccagaggaattgtggtggatccagttaatggttggatgtattggacagactgggaggaagatgaaatagatgacagcgtgggaaggattgagaaggcctggatggatggattcaatcggcagatttttgtgacttcaaagatgctgtggccaaacggtttaactctggactttcacaccaacacattatactggtgtgatgcctattacgatcatattgaaaaagtatttttgaatgggactcacaggaagattgtttacagtgggagagagttgaaccaccctttcggactgtcgcatcatggaaattatgtgttctggactgattatatgaatggttccatttttcaactagatttgataacaagtgaggtgacattgctgaggcatgaaagaccacccctatttgggcttcagatttatgatccacgaaagcaacaaggtgacaatatgtgccgagtaaataatgggggctgtagtacactttgcttggctatcccaggaggccgggtgtgtgcttgtgccgataatcaacttttggatgaaaatgggacaacttgcacatttaatcctggagaagcactacctcacatatgtaaagctggagagtttcgctgcaaaaacagacactgtatccaagctcggtggaaatgtgatggcgacgatgactgcctagacggaagcgatgaggattcagtaaactgcttcaatcatagctgtcctgatgatcagtttaaatgccagaataatcgctgcatccccaagagatggctttgtgatggagctaatgactgtgggagcaatgaagatgaatccaatcaaacttgcacagccagaacatgccaggtagaccagttttcttgcggaaatgggcgttgcattcccagagcatggctgtgtgacagggaagacgactgtggtgaccagacagatgaaatggcatcttgtgaattcccaacttgtgagccactaacccaattcgtatgcaaaagtggaagatgcattagcagcaaatggcactgcgactctgatgacgactgtggggacgggagtgatgaggtgggctgtgttcactcttgctttgataatcagttcagatgttccagtggcagatgcatcccaggccactgggcctgtgatggtgacaatgactgtggggacttcagtgatgaagcccagatcaattgtactaaagaagagattcattctcctgctggttgtaacggaaatgaatttcagtgccaccctgatggtaattgcgttcctgatttgtggcgctgtgatggagaaaaagactgtgaagatggtagtgatgaaaaaggttgcaatggtaccatacgattgtgtgaccacaaaaccaagttttcctgttggagtacagggagatgcatcaacaaagcatgggtgtgtgatggagatattgattgcgaagatcagtcagatgaagatgactgtgacagtttcttgtgtggaccacccaagcatccttgtgctaatgacacctcagtctgcctgcagccagagaaactctgcaatgggaaaaaggattgtcctgatggctctgatgaaggctatctctgtgatgagtgttcgctgaacaatggaggctgtagcaaccactgttctgttgttcctggaagaggaattgtctgttcctgccctgaaggacttcaactcaacaaagacaataaaacatgtgaaattgtggattattgtagcaatcatctaaagtgcagccaagtatgtgagcagcacaagcacacagtcaagtgctcatgttatgaaggttggaagctggatgtagacggtgaaagttgtacaagtgttgatccttttgaagcattcatcatcttttctattcgtcatgagatcagaaggattgatcttcacaaaagagactatagtctacttgttcctggattgagaaacacaatagcacttgattttcacttcaatcaaagtttactttattggacagatgttgtagaagacagaatataccggggaaagctttctgaaagtggaggtgtcagtgccattgaagtggttgtggagcatggcctggctactccagaaggcctgacagtcgactggatagcaggaaacatatactggatagacagcaatctggaccaaatcgaagtggccaaactagatggctccctaagaactacactaatagcaggagccatggaacaccccagggccattgctttggacccaagatatggaattcttttctggacagactgggatgcaaattttcctcgcattgaatctgcctctatgagtggtgctgggagaaaaaccatctataaagacatgaaaactggggcttggcctaatggactaactgtggaccactttgagaaaaggatagtgtggacagacgccaggtcagatgctatttattcagccctctatgatggaacaaacatgatagaaatcatccgaggtcatgaatacctttcccatccctttgctgtgtctctatatgggagtgaagtctactggacagactggaggaccaacacattgtccaaagccaataagtggacagggcagaatgtcagtgtgattcagaaaaccagtgcacagccatttgaccttcagatataccatcccagtcgccagccacaggctcccaatccttgtgcagctaatgatggcaaaggcccctgctctcacatgtgtctaatcaatcacaataggagtgctgcctgtgcgtgcccccacttgatgaagctttcttcagacaagaagacctgctatgaaatgaaaaaatttcttctttatgcaagacgttctgaaatcagaggagtggatattgacaatccatactttaacttcatcacggcatttacagtccctgatattgatgacgttactgtgatagacttcgatgcatctgaggaacgtttatactggacagatattaaaacacaaaccattaaacgagcttttattaacggaactgggttagaaactgttatttcaagagatattcagagtatcagagggctagcagtggattgggtgtcacgtaatttatactggattagctcagaatttgatgaaacgcaaattaatgtggcaaggctagatggctctttgaaaacctcaattatccatggaatcgataagccacagtgtcttgcagctcacccagtcaggggaaaactctactggaccgatggaaacacaattaacatggcaaatatggatggcagtaatagcaagattctgtttcagaatcagaaggagccagttggtctatcgatagactatgtggaaaacaagctttattggatcagttcggggaatggaaccataaatagatgcaacctggatggtggtaatttagaagtaatcgagtcaatgaaagaagaattaacaaaagctacagccctaaccatcatggataagaaactgtggtgggcagaccaaaacttagcccagctaggaacctgcagcaaaagagacggaagaaaccccaccatcctacggaataagacttctggggtagttcatatgaaagtctatgataaagaagcacagcaaggcagcaattcctgccaactaaacaatggtggatgctctcaactttgtttaccaacatctgaaactacaaggacttgtatgtgtacagtgggatattatctccaaaagaaccgtatgtcatgtcaaggtatagaatcatttcttatgtactctgttcatgaaggaatcaggggaatacctcttgaaccaagtgacaaaatggatgctttgatgcctatatcaggaacttcatttgccgtgggaatagatttccatgcagaaaatgataccatctactggacagacatgggcttcaataaaattagcagagctaaaagagatcagacttggaaagaagatatcattaccaatggcttgggaagagtggaagggatagctgttgactggattgctggtaacatatattggacagatcatggtttcaacttaattgaagttgcaagactcaatggttctttccgttatgtaattatttcccaaggcctggatcaaccaagatctatagctgtgcacccagagaaaggcctcttgttctggactgaatggggacaaatgccctgtattggaaaggctcgcttggatggctcagagaaggttgtccttgtaagcatgggaatagcatggccgaatggcatctccatcgactatgaggaaaataaattgtactggtgtgatgctcgcacagacaagatagagagaatcgaccttgagactggagggaatcgcgagatggtgctgtcaggaagcaatgtggatatgttttcagttgcagtctttggggcttacatctactggtctgacagagcacatgcaaacgggtctgtcagaaggggccacaagaatgatgccacagaaacgataaccatgagaaccggccttggagtcaacctgaaggaggttaaaatatttaaccgagtaagagagaaagggaccaatgtttgtgccagggacaatggtggctgtaagcaactctgtctttatcgaggaaattcccggagaacttgtgcttgtgcccatggatatttggcagaagatggagttacttgcctgaggcatgaaggctatttactgtattcaggaagaacaatattaaaaagtatacatctttctgatgaaaccaatttaaattccccaataaggccatatgagaatccacgttatttcaagaatgtcatagccttggcttttgactataatcaaagaagaaaaggtaccaaccgaatcttttacagtgatgcacactttggaaatatacagcttattaaagacaactgggaagacagacaagtaattgttgaaaatgtgggttctgtggaaggacttgcctatcacagagcctgggatacactgtactggacaagctctaccacctcatccatcaccagacacactgtggaccagactcggcctggagcatttgacagggaagctgtcatcaccatgtcagaagatgaccatccacatgtgctagccttggatgaatgtcaaaatttaatgttttggaccaactggaatgaacaacatccaagtatcatgagatctactctgactgggaaaaatgctcaagtggtggtcagtacagacatactcactccaaatggacttactatcgactaccgtgcagagaagctgtatttctcagatggcagtctaggaaaaattgaaaggtgtgaatacgatggatcccagagacatgtgatagttaaatctgggccagggactttcctcagtttggctgtttatgacaattatatattctggtcggactggggaagaagagctatactgcggtccaacaagtacacaggaggagatacaaaaattcttcgttccgatattccacatcagccaatgggaatcatagctgttgccaatgacaccaatagctgtgaactttctccatgtgcattattgaatggaggctgccatgacttgtgccttttaactcccaatgggagagtgaattgttcctgcagaggggaccgaatattgctagaggacaacagatgtgtgactaaaaattcctcctgcaacgcttattcggagtttgaatgtggaaatggtgagtgcattgactaccagctcacctgtgatggcattcctcactgtaaagataaatcagatgaaaaactgctctactgtgaaaacagaagctgtcgaagaggcttcaagccatgctataatcgccgctgcattcctcatggcaagttatgtgatggagaaaatgactgcggagacaactctgatgaattagattgtaaagtttcaacctgtgccacggttgagttccgctgtgcagatgggacttgtattccaagatcagcacgatgcaaccagaacatagattgtgcagatgcttcagatgaaaagaactgcaataacacagactgcacacatttctataagcttggagtgaaaaccacagggttcataagatgtaattctacctcactgtgtgttctgccaacctggatatgcgacgggtctaatgactgtggagactattcagatgaattaaagtgcccagttcagaacaaacacaaatgtgaagaaaattattttagttgtcctagtggaagatgcattttgaatacctggatatgcgatggtcagaaagattgtgaggatggacgtgatgaattccactgtgattcttcttgctcttggaaccaatttgcttgttccgcacaaaaatgtatttctaagcattggatttgtgatggagaagatgactgtggggatgggttagatgaaagtgacagcatttgtggtgccataacctgtgctgctgacatgttcagctgccagggctctcgtgcctgcgtgccccgacattggctttgtgatggtgaaagggactgtccagatggaagcgatgagctttccacagcaggctgcgctcccaataatacatgtgatgaaaatgctttcatgtgccataataaagtatgcattcccaagcaatttgtttgtgaccatgatgacgactgtggagatggctctgatgagtcaccgcagtgtggataccgacagtgtggtacagaagaatttagttgtgctgatgggcggtgtcttctaaatactcaatggcagtgtgatggagactttgactgtcctgaccattctgatgaagcacctttaaacccaaagtgtaaaagtgcagaacagtcatgcaacagttcattttttatgtgcaaaaatggcaggtgcattcccagtggaggtctttgtgacaataaggatgactgtggcgatggttcagatgagagaaactgccatataaatgaatgtttgagtaagaaagtcagtggatgttctcaagattgtcaagaccttccggtcagttataagtgcaaatgctggcctggattccaactgaaggatgacggcaaaacatgtgtagacattgatgaatgctcttcaggctttccctgtagccagcaatgcatcaatacatacgggacttacaagtgcctctgtacagatgggtatgaaatacaacctgataacccaaatggctgcaaatcgctctcagatgaagaaccttttttaattcttgctgatcatcatgagataaggaaaattagcactgatggctccaactacacacttttaaaacagggattaaacaatgttattgctatagactttgattacagagaagaattcatctattggatcgattctagccgacccaatggcagtcgcataaatagaatgtgtttaaatggaagtgacattaaggtagttcataacacagcggtccccaatgcacttgctgtcgattggattggaaaaaacctctattggtctgacacagaaaaaagaatcattgaagtatccaaactcaatggcttgtaccctactatactcgttagcaaaaggctgaagtttcccagagacttgtctttagatcctcaagctggatatttgtattggattgactgctgcgagtatcctcatattggccgtgttggaatggatggaaccaatcagagtgttgtcatagaaaccaagatttctagacctatggcactaacaatagattatgttaatcgtagactctactgggccgatgaaaatcacattgaatttagcaacatggatggatctcatagacacaaagtccctaatcaagatattccaggggtgattgcactaacattgtttgaagactacatctactggactgatgggaaaaccaagtcactcagccgtgcccataaaacatcgggagcagacagactctcactgatttactcatggcatgccatcacagatatccaggtgtatcattcttatagacaacctgatgtctccaaacatctctgcatgataaataatggtggttgcagtcatttgtgccttttagcccctggaaaaacccacacttgtgcatgtcccactaacttctatctggcagctgataataggacttgcttatccaactgcacagccagccagtttcgttgcaaaactgacaaatgtattccattctggtggaaatgtgacaccgtggatgactgtggtgatggatctgatgaacctgatgactgtcctgaatttagatgtcagccaggccgatttcagtgtgggactggactctgtgctctaccagctttcatctgtgatggagagaatgattgtggagacaattctgatgaactcaactgtgacacacatgtctgcctgtcaggtcaattcaaatgtaccaagaaccagaaatgtatcccagtaaacttaagatgtaatgggcaagatgactgtggtgatgaggaagatgaaagagactgtcctgaaaacagctgttctccagactatttccagtgtaagactacgaagcattgcatttccaagctgtgggtttgtgacgaggatccagactgtgcagatgcatcagacgaggccaactgcgataaaaagacttgtggacctcatgaattccagtgtaaaaacaacaactgtattcccgatcactggcggtgtgatagccaaaatgactgcagtgataattcagatgaagaaaactgtaagccacagacatgtacattgaaagatttcctctgtgccaatggggactgtgtttcttcaaggttttggtgtgatggagattttgactgtgcagatggctctgatgagagaaattgtgagacaagttgttccaaagatcagttccggtgttccaatggtcagtgtataccagcaaaatggaaatgtgatggccatgaagactgcaaatatggggaagatgagaaaagctgtgagccagcttctcctacttgctcatcacgtgaatatatatgtgccagtgatggatgtatttcagcatctttgaaatgtaatggagaatatgattgtgctgatggttcagatgagatggactgtgtgactgaatgtaaggaagatcagtttcggtgcaaaaataaagcccactgtattccaattagatggctgtgtgatggaattcatgactgtgtggatggcagtgatgaagagaactgtgaaagaggaggaaatatatgtagagctgatgagttcctttgcaataattctctctgcaaactacatttctgggtgtgtgatggagaggacgactgtggagacaactctgatgaagcccctgatatgtgtgtcaaatttctttgtccatccacgagacctcacagatgcagaaataacagaatatgcctacagtcggagcaaatgtgcaatgggattgatgaatgcggtgacaattcagatgaagatcactgtggtggtaagctgacatataaagcaaggccttgtaaaaaggatgagtttgcttgtagtaataaaaaatgcatccctatggatctccagtgtgatcgacttgatgactgcggagatggttcagatgagcaaggatgcagaatagctcctactgaatatacctgtgaagataatgtgaatccatgtggagatgatgcatattgtaatcaaataaaaacatctgttttctgtcgctgtaagcctggatttcagagaaacatgaaaaacagacaatgtgaagaccttaatgaatgtttggtgtttggcacatgttcccatcaatgtataaatgtggaaggatcatataaatgtgtgtgtgaccagaattttcaagaaagaaataacacctgcatagcagaaggctctgaagatcaagttctctacattgctaatgacactgatatcctgggttttatatatccattcaactacagtggcgatcatcaacaaatttctcatattgaacataattcaagaataacagggatggatgtatattatcaaagagatatgattatttggagtactcagtttaatccaggcggaattttctacaaaaggatccatggcagagaaaaaaggcaagcaaacagtggcttgatttgtcctgaatttaaaaggcccagggacattgcagttgactgggtggctggaaacatttactggactgatcattctagaatgcattggttcagttactacactactcactggaccagtctgaggtactctatcaacgtagggcagctgaatggccccaactgcaccagactcttaacaaatatggctggagaaccctatgctattgcagtaaatcctaaaagagggatgatgtactggactgttgttggggatcattcccatatagaagaagcagccatggatggtacactgagaaggattttagtacaaaagaacttacagagacccacaggtttggctgtggattattttagtgaacgcatatattgggctgactttgagctctccatcattggcagtgttctgtatgatggctctaattcagtagtctctgtcagcagcaaacaaggtttattacatccacataggatcgatatctttgaagattatatatatggagcaggacctaaaaatggtgtatttcgagttcaaaaatttggccatggttcagtagagtacttagctttaaatattgataaaacaaaaggtgttttgatatctcatcgttataaacaactagatttacccaatccatgcttggatttagcatgcgaatttctttgcttgctaaatccttctggggccacttgtgtgtgtccagaaggaaaatatttgattaatggcacctgcaatgatgacagcctgttagatgattcatgtaagttaacttgtgaaaatggaggaagatgcattttaaatgagaaaggtgatttgaggtgtcactgttggcccagttattcaggagaaagatgtgaagtcaaccactgtagcaactactgccagaatggaggaacttgcgtaccatcagttctagggagacccacctgcagctgtgcactgggtttcactgggccaaactgtggtaagacagtctgtgaggatttttgtcaaaatggaggaacctgcattgtgactgctggaaaccagccttactgccactgccagccggaatacaccggagacagatgtcagtactacgtgtgccaccactattgtgtgaattctgaatcatgtaccattggggatgatggaagtgttgaatgtgtctgtccaacgcgctatgaaggaccaaaatgtgaggttgacaagtgtgtaaggtgccatggggggcactgcattataaataaagacagtgaagatatattttgcaactgcactaatggaaagattgcctctagctgtcagttatgtgatggctactgttacaatggtggcacatgccagctggaccccgagacaaatgtacctgtgtgtctatgctccaccaactggtcaggcacacagtgtgaaaggccagccccaaagagcagcaagtctgatcatatcagcacaagaagcattgccatcattgtgcctctcgtcctcttggtgactttgataaccaccttagtaattggtttagtgctttgtaaaagaaaaagaaggacaaaaacaattagaagacaacctattatcaatggaggaataaatgtagaaattggcaatccatcttataacatgtatgaggtagatcatgatcacaacgatggaggtcttttagatcctggctttatgatagacccaacaaaggccaggtacatagggggaggacccagtgctttcaagcttccacacacagcgccgcccatctacctaaactctgatttgaaaggaccactaactgctgggccaacaaattactccaatccggtatatgcaaaattatatatggatgggcaaaactgtcgaaactccttaggaagtgttgatgaaaggaaagaactgcttccaaagaaaatagaaattggtataagagagacagtggcataatcagtgatatcttttatatgctgtataaatgtataaaatataaggattacttttgtatgttccaacagtattatacttgttttggcatcagcattacctctttctttatctttttcctggttaattgttttctgagttttttgggttttattttttgctgatgactattgattgaccatttgtatggtatttttatgaaaaagaactgcactacagtacaatttacaacaatgctgctgatatgacacacctttgaatttgttaaaattaaaaacaacgtattcctttgtagtgtgaatatgagcaatctattttatatgaacttttttggttgtacttaatcaacgaggagaatctctgcacttttccattatacggtttgaaggctgtaatacagtgtcattttatttttctgtttaaattgatggaaaaatgattgaatggtcaactctcttctttgtgcccataaagatcgattcagactctgctgaaaatatatagctctcacaagttcagcatcacctgctttgaaattagccttagattgccaaccaatagatgagaattttgaggaaaaaaattaaaaatatgtaaaattaataatttgcatgaacacagatgactacattttccaaaacttagtggactctatgtgatgtactaaatgtatacaccttgtaagcaatagttatatttaggtggtagaacatagcaaaaatataaccgaaagttggccgactgcacttgctatggaataagaccttttattctccctcagtctcgagataaatagccagcctagagcacaacagggcattgggtacttgcatcttaggtatttcttcccagtcacatccattttgtggaagattaacccaaccccttacactacactgaacactaaagaataacatataagcacacaaattggtgacagaatttcaattacgtgaacgcatcctctttgctaggtcaaaaacaaagggcaaagcagacattttagtatacagagtgattggcaaatattttcaagatttaatatgagcaacccattatttgccctatccaaaatatattcaagggccttccaagttgtagaagaacaatgatcttcccataatcaaaagtggagagtcgaaatgctgtgccagttgctctggtattcaggtttctctgggttttacagaacgcatggaccccattcacgtttggtttgtttatcttcaaatttgagttgaaacgagtgcgatttatttaagttgtatataaaaataaaaggatagcatttttatacaaatatctttaaaggcacaaaagatttattcacaagttttggagggctttttgttcctctgatagacatgactgacttttagctgtcataatgtattaacctaacagatgaaatatgttaaatatgtggttgctctttatccctttgtacaagcattaaaaaaactgctgttttataagaagactttttgttgtactatgtgcatgcatactacctatttctaaactttgccatattgaggcctttataaactattgatttatgtaatactagtgcaattttgcttgaacaatgttatgcatatcataaactttttcaggttcttgtttaagtacattttttaaattgaacagtatttttcattttggttataatatagtcattttgcctatgtttctacaatgaagtgttaaatactttataaaaaattgttgactgacttatttaaatgaaattctacatattt

SEQ ID NO: 312526 - DNA, 426 bp, Homo sapiens
gtctgtaaaatttgcttttaataaataaatatgttctccaaagctacattttaatggcagttttctttctaagctgaaaacagctgttctccagactatttccagtgtaagactacgaagcattgcatttccaagctgtgggtttgtgacgaggatccagactgtgcagatgcatcagacgaggccaactgcggtgagtgtctgtgactctgggtcttatctctccgtatttgagtcatcatctgcgacaaccacagttaaacaaatttgaacacaattcttttgaagctaaggtcttacctgaaaaggttttgtctctgtgttcacagattcataaaaacttaggttagctactttacaagaagcctggagtgataagatggaagagtaagtattccttaatataacccagaactttataaaaca

SEQ ID NO: 312527 - DNA, 16532 bp, Homo sapiens
aaagacagaaccccagagaaaaacgctgccaattcgttgctttattgttccctgcctggggacctcaatagccttttccattaaccttcccttcttacgcaacggttaatgacttttggggttgttttgctttctgtttctgctgagtcactaaattttgcctctttgtccccaggtgctgctcagcataaaagttaaaagtgcaattcaggaagtactgggattctgtgtagagccgaggaaaccatttccctaagagaagctctgttccttggcttgtccttccttcccgggaaggaagcttccgaggaacgaagggagaagctttgttttgcctgcagaagcagccctgtgctcggctgagggttctcagctggctgtgaactgcggagcattgtaggcgcctggctggctcaggccaatgcagaagtctctcccttctccaaagacccaaatccccacagaaccagcttcgagttactttcccttcaaggggattaaaataattgtgatttgtggcgctctccgttcgcggtggtattttcctgttgtgttaaatgcctcttattaagtaatagatgtgatttatgtgaacgacgaaggggtgtgtggtggattcggtgattaatcagtgaattcccatccgctggcatctctcactgcccctcttgcgtgatgtaagatcagacgtaccctgcattgaaaagtcaagacacacgggcgtctcgctcgcgctcacacacgctctgcctcctctctcccgcacgcgcgcatccctccaccttccacatcctgctccaggcaggagaaggctgactggctggactcattgagctgaagaatttccagtgacatttgtaaatgacgccgctcgattccaggctccaagcggccgctgccgccgccgccgccgccgggccgaaggtgccgccgagcagtctccagcgcaggcttccttaccgggcgaccacaatgtccgagtttctcctcgccttactcactctctcgggattattgccgattgccagggtgctgaccgtgggagccgaccgagatcagcagttgtgtgatcctggtgaatttctttgccacgatcacgtgacttgtgtctcccagagctggctgtgtgatggggaccctgactgccctgatgattcagacgagtctttagatacctgtcccgaggaggtagaaatcaagtgccccttgaatcacattgcttgccttggtaccaacaaatgtgttcatttatcccagctgtgcaatggtgtcttggactgcccagatgggtatgacgaaggagtacattgtcaggaactgttatccaattgccaacagctgaattgtcagtataaatgtacaatggtcagaaatagtacaagatgttactgtgaggatggattcgaaataacagaagatgggagaagctgtaaagatcaagatgaatgtgctgtttatggtacatgcagccagacctgcagaaacacacatggatcctacacttgcagttgtgtggaaggctacctaatgcagccagacaacagatcttgcaaggctaaaattgaacctacagatagaccacctatactattaattgcaaattttgaaacaattgaggttttctatcttaatggaagtaaaatggcaactctaagctcagtcaatggaaatgaaattcatactctggattttatttataatgaagatatgatttgttggattgaatcaagagaatcttcaaatcaactcaaatgtatccagataacaaaagcaggaggattaacagatgaatggacaatcaatattcttcaatccttccacaatgtgcaacaaatggcgattgactggctcactcgaaatctctattttgtggaccatgtcggtgaccggatctttgtttgtaattccaacggttctgtatgtgtcaccctgattgatctggagcttcacaatcctaaagcaatagcagtagatccaatagcaggaaaacttttctttactgactacgggaatgtcgccaaagtggagagatgtgacatggatgggatgaaccgaacaaggataattgattcaaagacagagcagccagctgcactggcactagacctagtcaacaaattggtttactgggtagatctttacttggactatgtgggagtagtggactatcaaggaaaaaatagacacactgtcattcaaggcagacaagtcagacatctttatggtataactgtgtttgaagattatttgtatgcaaccaattctgataactacaatatcgtaaggataaaccgatttaatgggactgatattcactcattaattaaaattgagaatgcttggggaatccgaatttatcaaaaaagaactcaaccaacagtcagaagccatgcatgtgaagtcgatccatatggaatgccagggggctgttcacacatctgtctactcagcagcagttacaaaactcggacttgtcgctgcaggactggcttcaacttgggaagtgatggcaggtcatgcaaaagaccaaagaatgagttgttcctcttttatgggaaaggacgcccaggaattgttagaggaatggacttgaataccaagatagctgatgaatacatgatccccatagaaaatctggtaaaccctcgtgctttagactttcacgcagaaaccaattacatctactttgctgacaccaccagtttcctaattggccggcagaagatagatggcacagagagagaaaccatcctgaaagatgatctggataatgtagagggcattgctgtggactggattggaaataatctttactggaccaatgatggccataggaaaaccattaatgtggccaggctggaaaaagcttctcagagtcggaagactcttttagagggtgaaatgtctcatcccagaggaattgtggtggatccagttaatggttggatgtattggacagactgggaggaagatgaaatagatgacagcgtgggaaggattgagaaggcctggatggatggattcaatcggcagatttttgtgacttcaaagatgctgtggccaaacggtttaactctggactttcacaccaacacattatactggtgtgatgcctattacgatcatattgaaaaagtatttttgaatgggactcacaggaagattgtttacagtgggagagagttgaaccaccctttcggactgtcgcatcatggaaattatgtgttctggactgattatatgaatggttccatttttcaactagatttgataacaagtgaggtgacattgctgaggcatgaaagaccacccctatttgggcttcagatttatgatccacgaaagcaacaaggtgacaatatgtgccgagtaaataatgggggctgtagtacactttgcttggctatcccaggaggccgggtgtgtgcttgtgccgataatcaacttttggatgaaaatgggacaacttgcacatttaatcctggagaagcactacctcacatatgtaaagctggagagtttcgctgcaaaaacagacactgtatccaagctcggtggaaatgtgatggcgacgatgactgcctagacggaagcgatgaggattcagtaaactgcttcaatcatagctgtcctgatgatcagtttaaatgccagaataatcgctgcatccccaagagatggctttgtgatggagctaatgactgtgggagcaatgaagatgaatccaatcaaacttgcacagccagaacatgccaggtagaccagttttcttgcggaaatgggcgttgcattcccagagcatggctgtgtgacagggaagacgactgtggtgaccagacagatgaaatggcatcttgtgaattcccaacttgtgagccactaacccaattcgtatgcaaaagtggaagatgcattagcagcaaatggcactgcgactctgatgacgactgtggggacgggagtgatgaggtgggctgtgttcactcttgctttgataatcagttcagatgttccagtggcagatgcatcccaggccactgggcctgtgatggtgacaatgactgtggggacttcagtgatgaagcccagatcaattgtactaaagaagagattcattctcctgctggttgtaacggaaatgaatttcagtgccaccctgatggtaattgcgttcctgatttgtggcgctgtgatggagaaaaagactgtgaagatggtagtgatgaaaaaggttgcaatggtaccatacgattgtgtgaccacaaaaccaagttttcctgttggagtacagggagatgcatcaacaaagcatgggtgtgtgatggagatattgattgcgaagatcagtcagatgaagatgactgtgacagtttcttgtgtggaccacccaagcatccttgtgctaatgacacctcagtctgcctgcagccagagaaactctgcaatgggaaaaaggattgtcctgatggctctgatgaaggctatctctgtgatgagtgttcgctgaacaatggaggctgtagcaaccactgttctgttgttcctggaagaggaattgtctgttcctgccctgaaggacttcaactcaacaaagacaataaaacatgtgaaattgtggattattgtagcaatcatctaaagtgcagccaagtatgtgagcagcacaagcacacagtcaagtgctcatgttatgaaggttggaagctggatgtagacggtgaaagttgtacaagtgttgatccttttgaagcattcatcatcttttctattcgtcatgagatcagaaggattgatcttcacaaaagagactatagtctacttgttcctggattgagaaacacaatagcacttgattttcacttcaatcaaagtttactttattggacagatgttgtagaagacagaatataccggggaaagctttctgaaagtggaggtgtcagtgccattgaagtggttgtggagcatggcctggctactccagaaggcctgacagtcgactggatagcaggaaacatatactggatagacagcaatctggaccaaatcgaagtggccaaactagatggctccctaagaactacactaatagcaggagccatggaacaccccagggccattgctttggacccaagatatggaattcttttctggacagactgggatgcaaattttcctcgcattgaatctgcctctatgagtggtgctgggagaaaaaccatctataaagacatgaaaactggggcttggcctaatggactaactgtggaccactttgagaaaaggatagtgtggacagacgccaggtcagatgctatttattcagccctctatgatggaacaaacatgatagaaatcatccgaggtcatgaatacctttcccatccctttgctgtgtctctatatgggagtgaagtctactggacagactggaggaccaacacattgtccaaagccaataagtggacagggcagaatgtcagtgtgattcagaaaaccagtgcacagccatttgaccttcagatataccatcccagtcgccagccacaggctcccaatccttgtgcagctaatgatggcaaaggcccctgctctcacatgtgtctaatcaatcacaataggagtgctgcctgtgcgtgcccccacttgatgaagctttcttcagacaagaagacctgctatgaaatgaaaaaatttcttctttatgcaagacgttctgaaatcagaggagtggatattgacaatccatactttaacttcatcacggcatttacagtccctgatattgatgacgttactgtgatagacttcgatgcatctgaggaacgtttatactggacagatattaaaacacaaaccattaaacgagcttttattaacggaactgggttagaaactgttatttcaagagatattcagagtatcagagggctagcagtggattgggtgtcacgtaatttatactggattagctcagaatttgatgaaacgcaaattaatgtggcaaggctagatggctctttgaaaacctcaattatccatggaatcgataagccacagtgtcttgcagctcacccagtcaggggaaaactctactggaccgatggaaacacaattaacatggcaaatatggatggcagtaatagcaagattctgtttcagaatcagaaggagccagttggtctatcgatagactatgtggaaaacaagctttattggatcagttcggggaatggaaccataaatagatgcaacctggatggtggtaatttagaagtaatcgagtcaatgaaagaagaattaacaaaagctacagccctaaccatcatggataagaaactgtggtgggcagaccaaaacttagcccagctaggaacctgcagcaaaagagacggaagaaaccccaccatcctacggaataagacttctggggtagttcatatgaaagtctatgataaagaagcacagcaaggcagcaattcctgccaactaaacaatggtggatgctctcaactttgtttaccaacatctgaaactacaaggacttgtatgtgtacagtgggatattatctccaaaagaaccgtatgtcatgtcaaggtatagaatcatttcttatgtactctgttcatgaaggaatcaggggaatacctcttgaaccaagtgacaaaatggatgctttgatgcctatatcaggaacttcatttgccgtgggaatagatttccatgcagaaaatgataccatctactggacagacatgggcttcaataaaattagcagagctaaaagagatcagacttggaaagaagatatcattaccaatggcttgggaagagtggaagggatagctgttgactggattgctggtaacatatattggacagatcatggtttcaacttaattgaagttgcaagactcaatggttctttccgttatgtaattatttcccaaggcctggatcaaccaagatctatagctgtgcacccagagaaaggcctcttgttctggactgaatggggacaaatgccctgtattggaaaggctcgcttggatggctcagagaaggttgtccttgtaagcatgggaatagcatggccgaatggcatctccatcgactatgaggaaaataaattgtactggtgtgatgctcgcacagacaagatagagagaatcgaccttgagactggagggaatcgcgagatggtgctgtcaggaagcaatgtggatatgttttcagttgcagtctttggggcttacatctactggtctgacagagcacatgcaaacgggtctgtcagaaggggccacaagaatgatgccacagaaacgataaccatgagaaccggccttggagtcaacctgaaggaggttaaaatatttaaccgagtaagagagaaagggaccaatgtttgtgccagggacaatggtggctgtaagcaactctgtctttatcgaggaaattcccggagaacttgtgcttgtgcccatggatatttggcagaagatggagttacttgcctgaggcatgaaggctatttactgtattcaggaagaacaatattaaaaagtatacatctttctgatgaaaccaatttaaattccccaataaggccatatgagaatccacgttatttcaagaatgtcatagccttggcttttgactataatcaaagaagaaaaggtaccaaccgaatcttttacagtgatgcacactttggaaatatacagcttattaaagacaactgggaagacagacaagtaattgttgaaaatgtgggttctgtggaaggacttgcctatcacagagcctgggatacactgtactggacaagctctaccacctcatccatcaccagacacactgtggaccagactcggcctggagcatttgacagggaagctgtcatcaccatgtcagaagatgaccatccacatgtgctagccttggatgaatgtcaaaatttaatgttttggaccaactggaatgaacaacatccaagtatcatgagatctactctgactgggaaaaatgctcaagtggtggtcagtacagacatactcactccaaatggacttactatcgactaccgtgcagagaagctgtatttctcagatggcagtctaggaaaaattgaaaggtgtgaatacgatggatcccagagacatgtgatagttaaatctgggccagggactttcctcagtttggctgtttatgacaattatatattctggtcggactggggaagaagagctatactgcggtccaacaagtacacaggaggagatacaaaaattcttcgttccgatattccacatcagccaatgggaatcatagctgttgccaatgacaccaatagctgtgaactttctccatgtgcattattgaatggaggctgccatgacttgtgccttttaactcccaatgggagagtgaattgttcctgcagaggggaccgaatattgctagaggacaacagatgtgtgactaaaaattcctcctgcaacgcttattcggagtttgaatgtggaaatggtgagtgcattgactaccagctcacctgtgatggcattcctcactgtaaagataaatcagatgaaaaactgctctactgtgaaaacagaagctgtcgaagaggcttcaagccatgctataatcgccgctgcattcctcatggcaagttatgtgatggagaaaatgactgcggagacaactctgatgaattagattgtaaagtttcaacctgtgccacggttgagttccgctgtgcagatgggacttgtattccaagatcagcacgatgcaaccagaacatagattgtgcagatgcttcagatgaaaagaactgcaataacacagactgcacacatttctataagcttggagtgaaaaccacagggttcataagatgtaattctacctcactgtgtgttctgccaacctggatatgcgacgggtctaatgactgtggagactattcagatgaattaaagtgcccagttcagaacaaacacaaatgtgaagaaaattattttagttgtcctagtggaagatgcattttgaatacctggatatgcgatggtcagaaagattgtgaggatggacgtgatgaattccactgtgattcttcttgctcttggaaccaatttgcttgttccgcacaaaaatgtatttctaagcattggatttgtgatggagaagatgactgtggggatgggttagatgaaagtgacagcatttgtggtgccataacctgtgctgctgacatgttcagctgccagggctctcgtgcctgcgtgccccgacattggctttgtgatggtgaaagggactgtccagatggaagcgatgagctttccacagcaggctgcgctcccaataatacatgtgatgaaaatgctttcatgtgccataataaagtatgcattcccaagcaatttgtttgtgaccatgatgacgactgtggagatggctctgatgagtcaccgcagtgtggataccgacagtgtggtacagaagaatttagttgtgctgatgggcggtgtcttctaaatactcaatggcagtgtgatggagactttgactgtcctgaccattctgatgaagcacctttaaacccaaagtgtaaaagtgcagaacagtcatgcaacagttcattttttatgtgcaaaaatggcaggtgcattcccagtggaggtctttgtgacaataaggatgactgtggcgatggttcagatgagagaaactgccatataaatgaatgtttgagtaagaaagtcagtggatgttctcaagattgtcaagaccttccggtcagttataagtgcaaatgctggcctggattccaactgaaggatgacggcaaaacatgtgtagacattgatgaatgctcttcaggctttccctgtagccagcaatgcatcaatacatacgggacttacaagtgcctctgtacagatgggtatgaaatacaacctgataacccaaatggctgcaaatcgctctcagatgaagaaccttttttaattcttgctgatcatcatgagataaggaaaattagcactgatggctccaactacacacttttaaaacagggattaaacaatgttattgctatagactttgattacagagaagaattcatctattggatcgattctagccgacccaatggcagtcgcataaatagaatgtgtttaaatggaagtgacattaaggtagttcataacacagcggtccccaatgcacttgctgtcgattggattggaaaaaacctctattggtctgacacagaaaaaagaatcattgaagtatccaaactcaatggcttgtaccctactatactcgttagcaaaaggctgaagtttcccagagacttgtctttagatcctcaagctggatatttgtattggattgactgctgcgagtatcctcatattggccgtgttggaatggatggaaccaatcagagtgttgtcatagaaaccaagatttctagacctatggcactaacaatagattatgttaatcgtagactctactgggccgatgaaaatcacattgaatttagcaacatggatggatctcatagacacaaagtccctaatcaagatattccaggggtgattgcactaacattgtttgaagactacatctactggactgatgggaaaaccaagtcactcagccgtgcccataaaacatcgggagcagacagactctcactgatttactcatggcatgccatcacagatatccaggtgtatcattcttatagacaacctgatgtctccaaacatctctgcatgataaataatggtggttgcagtcatttgtgccttttagcccctggaaaaacccacacttgtgcatgtcccactaacttctatctggcagctgataataggacttgcttatccaactgcacagccagccagtttcgttgcaaaactgacaaatgtattccattctggtggaaatgtgacaccgtggatgactgtggtgatggatctgatgaacctgatgactgtcctgaatttagatgtcagccaggccgatttcagtgtgggactggactctgtgctctaccagctttcatctgtgatggagagaatgattgtggagacaattctgatgaactcaactgtgacacacatgtctgcctgtcaggtcaattcaaatgtaccaagaaccagaaatgtatcccagtaaacttaagatgtaatgggcaagatgactgtggtgatgaggaagatgaaagagactgtcctgaaaacagctgttctccagactatttccagtgtaagactacgaagcattgcatttccaagctgtgggtttgtgacgaggatccagactgtgcagatgcatcagacgaggccaactgcgataaaaagacttgtggacctcatgaattccagtgtaaaaacaacaactgtattcccgatcactggcggtgtgatagccaaaatgactgcagtgataattcagatgaagaaaactgtaagccacagacatgtacattgaaagatttcctctgtgccaatggggactgtgtttcttcaaggttttggtgtgatggagattttgactgtgcagatggctctgatgagagaaattgtgagacaagttgttccaaagatcagttccggtgttccaatggtcagtgtataccagcaaaatggaaatgtgatggccatgaagactgcaaatatggggaagatgagaaaagctgtgagccagcttctcctacttgctcatcacgtgaatatatatgtgccagtgatggatgtatttcagcatctttgaaatgtaatggagaatatgattgtgctgatggttcagatgagatggactgtgtgactgaatgtaaggaagatcagtttcggtgcaaaaataaagcccactgtattccaattagatggctgtgtgatggaattcatgactgtgtggatggcagtgatgaagagaactgtgaaagaggaggaaatatatgtagagctgatgagttcctttgcaataattctctctgcaaactacatttctgggtgtgtgatggagaggacgactgtggagacaactctgatgaagcccctgatatgtgtgtcaaatttctttgtccatccacgagacctcacagatgcagaaataacagaatatgcctacagtcggagcaaatgtgcaatgggattgatgaatgcggtgacaattcagatgaagatcactgtggtggtaagctgacatataaagcaaggccttgtaaaaaggatgagtttgcttgtagtaataaaaaatgcatccctatggatctccagtgtgatcgacttgatgactgcggagatggttcagatgagcaaggatgcagaatagctcctactgaatatacctgtgaagataatgtgaatccatgtggagatgatgcatattgtaatcaaataaaaacatctgttttctgtcgctgtaagcctggatttcagagaaacatgaaaaacagacaatgtgaagaccttaatgaatgtttggtgtttggcacatgttcccatcaatgtataaatgtggaaggatcatataaatgtgtgtgtgaccagaattttcaagaaagaaataacacctgcatagcagaaggctctgaagatcaagttctctacattgctaatgacactgatatcctgggttttatatatccattcaactacagtggcgatcatcaacaaatttctcatattgaacataattcaagaataacagggatggatgtatattatcaaagagatatgattatttggagtactcagtttaatccaggcggaattttctacaaaaggatccatggcagagaaaaaaggcaagcaaacagtggcttgatttgtcctgaatttaaaaggcccagggacattgcagttgactgggtggctggaaacatttactggactgatcattctagaatgcattggttcagttactacactactcactggaccagtctgaggtactctatcaacgtagggcagctgaatggccccaactgcaccagactcttaacaaatatggctggagaaccctatgctattgcagtaaatcctaaaagagggatgatgtactggactgttgttggggatcattcccatatagaagaagcagccatggatggtacactgagaaggattttagtacaaaagaacttacagagacccacaggtttggctgtggattattttagtgaacgcatatattgggctgactttgagctctccatcattggcagtgttctgtatgatggctctaattcagtagtctctgtcagcagcaaacaaggtttattacatccacataggatcgatatctttgaagattatatatatggagcaggacctaaaaatggtgtatttcgagttcaaaaatttggccatggttcagtagagtacttagctttaaatattgataaaacaaaaggtgttttgatatctcatcgttataaacaactagatttacccaatccatgcttggatttagcatgcgaatttctttgcttgctaaatccttctggggccacttgtgtgtgtccagaaggaaaatatttgattaatggcacctgcaatgatgacagcctgttagatgattcatgtaagttaacttgtgaaaatggaggaagatgcattttaaatgagaaaggtgatttgaggtgtcactgttggcccagttattcaggagaaagatgtgaagtcaaccactgtagcaactactgccagaatggaggaacttgcgtaccatcagttctagggagacccacctgcagctgtgcactgggtttcactgggccaaactgtggtaagacagtctgtgaggatttttgtcaaaatggaggaacctgcattgtgactgctggaaaccagccttactgccactgccagccggaatacaccggagacagatgtcagtactacgtgtgccaccactattgtgtgaattctgaatcatgtaccattggggatgatggaagtgttgaatgtgtctgtccaacgcgctatgaaggaccaaaatgtgaggttgacaagtgtgtaaggtgccatggggggcactgcattataaataaagacagtgaagatatattttgcaactgcactaatggaaagattgcctctagctgtcagttatgtgatggctactgttacaatggtggcacatgccagctggaccccgagacaaatgtacctgtgtgtctatgctccaccaactggtcaggcacacagtgtgaaaggccagccccaaagagcagcaagtctgatcatatcagcacaagaagcattgccatcattgtgcctctcgtcctcttggtgactttgataaccaccttagtaattggtttagtgctttgtaaaagaaaaagaaggacaaaaacaattagaagacaacctattatcaatggaggaataaatgtagaaattggcaatccatcttataacatgtatgaggtagatcatgatcacaacgatggaggtcttttagatcctggctttatgatagacccaacaaaggccaggtacatagggggaggacccagtgctttcaagcttccacacacagcgccgcccatctacctaaactctgatttgaaaggaccactaactgctgggccaacaaattactccaatccggtatatgcaaaattatatatggatgggcaaaactgtcgaaactccttaggaagtgttgatgaaaggaaagaactgcttccaaagaaaatagaaattggtataagagagacagtggcataatcagtgatatcttttatatgctgtataaatgtataaaatataaggattacttttgtatgttccaacagtattatacttgttttggcatcagcattacctctttctttatctttttcctggttaattgttttctgagttttttgggttttattttttgctgatgactattgattgaccatttgtatggtatttttatgaaaaagaactgcactacagtacaatttacaacaatgctgctgatatgacacacctttgaatttgttaaaattaaaaacaacgtattcctttgtagtgtgaatatgagcaatctattttatatgaacttttttggttgtacttaatcaacgaggagaatctctgcacttttccattatacggtttgaaggctgtaatacagtgtcattttatttttctgtttaaattgatggaaaaatgattgaatggtcaactctcttctttgtgcccataaagatcgattcagactctgctgaaaatatatagctctcacaagttcagcatcacctgctttgaaattagccttagattgccaaccaatagatgagaattttgaggaaaaaaattaaaaatatgtaaaattaataatttgcatgaacacagatgactacattttccaaaacttagtggactctatgtgatgtactaaatgtatacaccttgtaagcaatagttatatttaggtggtagaacatagcaaaaatataaccgaaagttggccgactgcacttgctatggaataagaccttttattctccctcagtctcgagataaatagccagcctagagcacaacagggcattgggtacttgcatcttaggtatttcttcccagtcacatccattttgtggaagattaacccaaccccttacactacactgaacactaaagaataacatataagcacacaaattggtgacagaatttcaattacgtgaacgcatcctctttgctaggtcaaaaacaaagggcaaagcagacattttagtatacagagtgattggcaaatattttcaagatttaatatgagcaacccattatttgccctatccaaaatatattcaagggccttccaagttgtagaagaacaatgatcttcccataatcaaaagtggagagtcgaaatgctgtgccagttgctctggtattcaggtttctctgggttttacagaacgcatggaccccattcacgtttggtttgtttatcttcaaatttgagttgaaacgagtgcgatttatttaagttgtatataaaaataaaaggatagcatttttatacaaatatctttaaaggcacaaaagatttattcacaagttttggagggctttttgttcctctgatagacatgactgacttttagctgtcataatgtattaacctaacagatgaaatatgttaaatatgtggttgctctttatccctttgtacaagcattaaaaaaactgctgttttataagaagactttttgttgtactatgtgcatgcatactacctatttctaaactttgccatattgaggcctttataaactattgatttatgtaatactagtgcaattttgcttgaacaatgttatgcatatcataaactttttcaggttcttgtttaagtacattttttaaattgaacagtatttttcattttggttataatatagtcattttgcctatgtttctacaatgaagtgttaaatactttataaaaaattgttgactgacttatttaaatgaaattctacatattt

SEQ ID NO: 312528 - DNA, 1633 bp, Homo sapiens
atcaatgaacccgcaatcatgaaacttctgacaccaccaggagctgactcacacctgaacagtacaccgtcgaagcttcgacggtgttctgccaagaactagtaatacccttgttttaaaatcttcacaaggtaaaacttaaaaagccaaccaaacaaattgctctccattctacttttaattgggccaaacagcatatgctacagtagtaacatgtttttcggagagtgtaaaaaactctgtttacatttgcctcctccgtgggttgatcgaaaatgtataaaactgactgcttctcgccagcctcagacaagaagagtgagttgctggtactcgctactcttttacttcttttgtaaagtattgactcttggaaggctacagtatacaaagtctcaacatgttttttaaaagaaataaggagcaagcgactgccctgctagaaatcacaaaccgatttttgtagaatattttgtgccccaggcattaatttcactgactccagaacctgcagttcagagaatgatttcttatgatgataaaaatcgaatgggatcagacgatgtttgcatttttttaatacttgaataggacacctcaagtttgagatttcattttcttttagaacacagtcacaagattaatctggtgaatccttttgtcacagttctcgtgtgtgtgtgcgcgtctccgtgtgtgtgtgtgtgcatgtgtgtaaaactgaatggtcacatttaattgctttttggaccattgaatagttgggaagtaagaattttttaattggcatgagacggttcctcaactgttaaattaaccaactttgacctgtctttagaaaaaggcttatttgtatgattttgggctaactccccggggaccatattaaatgacaaaaatgctcctttgggtgacacaccctacaaagtatttgctgttacgaacataaacgcccacattcttaatatctaatatttttgaccagtgatgttttatgctgtcatctgaaccctagagaagcagtgtcagaggaaaccttggtgtcacatgtgtcttagcaaaagggttaccatgatcgagggtcatgtgaccaaaagatgctccagagaagcttgagaatttgtttcaagttgggaggagggttggagatacaaaaatcactctgctctacaggactcttcagctgtctatgcaagaaattccgttttctctttcagcacctggaaagacacagcagcccaccgaggcgataggtgattcactaagcacaagaggaatgttttctaagcaaggcgtcccttgcctctcaaacaaatgccctccaagtttgttagggtttctattcctgcaacttgtggtatcaaaaccacttcctggaattgtcaaagcactgccaaaataaatgtttttcccccttctaagaaaaaaaaaatgacagtgctcatatttgacacttgtgtattggactctcttttgaatgaataaaaaggaaaaggggtttggtgtaattcctgatggggtgcgtgttgtttttcatgccatggtttgtgaattttaattgtggtttcccatttcgttgttgtaactgggcagaaattaaaaaagaaaaatcaataaaaatacaaagaaatgg

SEQ ID NO: 312529 - DNA, 1766 bp, Homo sapiens
caggagtcagttctgaatcttacaaagtgctctgcttaataagtaccttacttagcagagcactttgcaaacatattacttattagcagagctctttgtagaccttccacatctggctgtcagatcttaaggttgtgaatttaggctccagttacattcactggagagcataatcccacacgggttatttataaatacagagcctctgattggacggtgttctgccaagaactagtaatacccttgttttaaaatcttcacaaggtaaaacttaaaaagccaaccaaacaaattgctctccattctacttttaattgggccaaacagcatatgctacagtagtaacatgtttttcggagagtgtaaaaaactctgtttacatttgcctcctccgtgggttgatcgaaaatgtataaaactgactgcttctcgccagcctcagacaagaagagtgagttgctggtactcgctactcttttacttcttttgtaaagtattgactcttggaaggctacagtatacaaagtctcaacatgttttttaaaagaaataaggagcaagcgactgccctgctagaaatcacaaaccgatttttgtagaatattttgtgccccaggcattaatttcactgactccagaacctgcagttcagagaatgatttcttatgatgataaaaatcgaatgggatcagacgatgtttgcatttttttaatacttgaataggacacctcaagtttgagatttcattttcttttagaacacagtcacaagattaatctggtgaatccttttgtcacagttctcgtgtgtgtgtgcgcgtctccgtgtgtgtgtgtgtgcatgtgtgtaaaactgaatggtcacatttaattgctttttggaccattgaatagttgggaagtaagaattttttaattggcatgagacggttcctcaactgttaaattaaccaactttgacctgtctttagaaaaaggcttatttgtatgattttgggctaactccccggggaccatattaaatgacaaaaatgctcctttgggtgacacaccctacaaagtatttgctgttacgaacataaacgcccacattcttaatatctaatatttttgaccagtgatgttttatgctgtcatctgaaccctagagaagcagtgtcagaggaaaccttggtgtcacatgtgtcttagcaaaagggttaccatgatcgagggtcatgtgaccaaaagatgctccagagaagcttgagaatttgtttcaagttgggaggagggttggagatacaaaaatcactctgctctacaggactcttcagctgtctatgcaagaaattccgttttctctttcagcacctggaaagacacagcagcccaccgaggcgataggtgattcactaagcacaagaggaatgttttctaagcaaggcgtcccttgcctctcaaacaaatgccctccaagtttgttagggtttctattcctgcaacttgtggtatcaaaaccacttcctggaattgtcaaagcactgccaaaataaatgtttttcccccttctaagaaaaaaaaaatgacagtgctcatatttgacacttgtgtattggactctcttttgaatgaataaaaaggaaaaggggtttggtgtaattcctgatggggtgcgtgttgtttttcatgccatggtttgtgaattttaattgtggtttcccatttcgttgttgtaactgggcagaaattaaaaaagaaaaatcaataaaaatacaaagaaatgg

SEQ ID NO: 312530 - DNA, 791 bp, Homo sapiens
caaatccttcagacttgacagtgtgaggctggggttggcagtctgcttaacaagatgctgggaccacctctgaattagtgaatcagggagctgctgtgtgatcccctcctccaggctttcttggagtttgtctctgccacttcctcaagccctttaaaaaggctcctgtgctttagagagttaggatgttaatgaccgttcttttttcttgtactttattaagtactagtcttactagactagtgcttaagtggcagtgtctgcctttgccttctcccatctctttatgctcctttcttccaacttctcacgtttctgtttctcgcacggccaggtgtccagcatcccatgctgacttgcggttggccaatcccctcctcgtagatttcctccacattttcctcttcctccttttcctgtgggaagttctttttctgggctgtggctggtcttacgtagttcggtggaaaaagtattgaggtagtgttagatactgtgctgcacctccaggagtgtccaatcttttggcttccctgggccacactggaacaagaagaactgtcttgggccacacgtaaaatacacggacactaacgatagctgatgagctaaaaaaaaaaaaaattgcaaaaaaaatctcatagcgttttaagaaagtttgtgaatttgtgttgagccacattcaaagctgtcctggaccacatcttggacaagcttgcttacagtatttctgctggatttctggttccaactagctatggaaccctgtgagagatttgagtctccgctca

SEQ ID NO: 312531 - DNA, 879 bp, Homo sapiens
ttaatgcgagttccatgtgatgtgggccccttcaaaacaaagaccaaagaaatggtctatttcacagcggagcaggagtgagcggaggatggaagggtgtgatcaaggcccgacttgactctgacatccctttcctctggttagggggcgggacaccacgtgagggtctgcagggagagggtctgggagtggccttcctgggttttatggcctgcttcagggaagaaaggcagggaggttagaatggcctcaacggtgaaatatttatctttttcttcctccctaatcccagaattcagaaactgttagtgggtttgcataagttcaatgagaatctgttcttgtaatagggcacaattgaaaacattggttatattaccaaggctttgactggaatgtcctattttcagatacgactaaaggagttagggttgactgcatggtccaataaagccccttggaaaaaagctggcctggtacctcacatacgtggttcccttacagatgagtaaagaatgtcaattcctggcaggtcccagaatcttaagataccttagggacctcaagaagagaggaattcccctaaatctgtacttattgcaggcaaagtctgatggcaagtctttgcgatggcttcctagcctcaagaggcttttaaaagcccaatctcagattccttataaaaagttccagtaggccaggcacagtggctcacacctgtaatcccagcactttgggaggccacggtgggcagatcacgaggtcaggggatcgagaccatcctggctaacacggtgaaaccccgtctctactaaaaataaaaaaattagccgggcatggtggcgggtgcctgtagtcccagctatgcgggaggctgag

SEQ ID NO: 312532 - DNA, 989 bp, Homo sapiens
  misc_feature (15)..(15): n is a, c, g, or t
  misc_feature (76)..(76): n is a, c, g, or t
  misc_feature (92)..(92): n is a, c, g, or t
  misc_feature (96)..(96): n is a, c, g, or t
  misc_feature (115)..(115): n is a, c, g, or t
  misc_feature (121)..(121): n is a, c, g, or t
  misc_feature (131)..(131): n is a, c, g, or t
  misc_feature (134)..(134): n is a, c, g, or t
  misc_feature (146)..(146): n is a, c, g, or t
  misc_feature (158)..(158): n is a, c, g, or t
  misc_feature (163)..(163): n is a, c, g, or t
  misc_feature (196)..(196): n is a, c, g, or t
  misc_feature (202)..(202): n is a, c, g, or t
  misc_feature (204)..(204): n is a, c, g, or t
  misc_feature (209)..(209): n is a, c, g, or t
  misc_feature (233)..(233): n is a, c, g, or t
  misc_feature (239)..(239): n is a, c, g, or t
  misc_feature (241)..(241): n is a, c, g, or t
  misc_feature (248)..(248): n is a, c, g, or t
  misc_feature (254)..(255): n is a, c, g, or t
  misc_feature (278)..(278): n is a, c, g, or t
  misc_feature (282)..(282): n is a, c, g, or t
  misc_feature (299)..(299): n is a, c, g, or t
  misc_feature (303)..(303): n is a, c, g, or t
  misc_feature (317)..(317): n is a, c, g, or t
  misc_feature (328)..(328): n is a, c, g, or t
  misc_feature (351)..(351): n is a, c, g, or t
  misc_feature (356)..(356): n is a, c, g, or t
  misc_feature (360)..(360): n is a, c, g, or t
  misc_feature (371)..(371): n is a, c, g, or t
  misc_feature (382)..(382): n is a, c, g, or t
  misc_feature (388)..(388): n is a, c, g, or t
  misc_feature (405)..(405): n is a, c, g, or t
  misc_feature (411)..(411): n is a, c, g, or t
  misc_feature (421)..(421): n is a, c, g, or t
  misc_feature (429)..(429): n is a, c, g, or t
  misc_feature (467)..(468): n is a, c, g, or t
  misc_feature (474)..(474): n is a, c, g, or t
  misc_feature (505)..(505): n is a, c, g, or t
  misc_feature (521)..(521): n is a, c, g, or t
  misc_feature (527)..(527): n is a, c, g, or t
taaaaatgcttattngtcaattaaaaagaaaacccaaaaagaattggggaatgctttggaaagggtggtgtcctanggaatttcggaagaanaaanggaatttcttggcccaaanccaaancccaatggcnganaaattaatcaanggttttgcagcnctccngcatgggtgaatcaaaaggggaggaatggagcnttcggnangagtnccaaatttgaaaaatttatttaangaaagnancaaatcntttgtnnttttcgttgaaggggttagccanagcntgttttttcaaagttgngtcncacttggggtagcncaagcatgtgnagaacaaggttgtgtcccttgtnaaaanagcntttttatttcncttatattgtngtggcnacaatttcacaacatcncacaantgaggtcttntcaaaaanaacttttttttttttttgaaattattattttttttttnnagattnaatacaattaattagatacaaacagttttantgaacgcccgcgcggntttgcntttgtaacgtaactaaataatgtaatggcatctatattcagttgaagtgttttgatgtgcatgtgtacttcctaaggtgaaatgcatctatatacagacagcctctaaatcaagtccttcagtataattgatatatgtttttataatttcctcactggtataagtgtttcatatttgaaaaagttatctctgggtattgcataaaaggcttcatcttataaagtgaaatcattgttattgaattttaggaaggattaatggttaagtgtatataaaatactaatattaagtaaacttcatattggccaacaccagggttgtattctatggatgtcattattttgaattaagaattagtgtttaacattcctaaattgttttgagtgcttgattataatttgtaaaaaatgtttattttcaatacttctttaaatttaaaataaagcttatatttcaaatgtc

SEQ ID NO: 312533 - DNA, 2352 bp, Homo sapiens
gtgattgagcccaagaaaccagggacttacgcatttggccaatgtcaaaagaacagaactttgcccactgcacacttgctgtgtacaatgactgagccctttcttgtagtttgtttccttgtttgagaggtgtgcatgcgaccgtggcttttcccaaagtttctgactttgtggtttacccccttcaccttccagggacgcagttgttacgaggttagacgtggcagctctgtgcagtgtttgagcctacagtgggatacatagggtcaaattgagaataataaactgagtcattctcctggaaaaaaaaaaaaaaaaaactcgaggacgccgcgtgtacccggttgtcctcaggcgctgtcagatctgtggtttttctacttgaaggacacaatgttttccaaactagcacatttgcagaggtttgctgtacttagtcgcggagttcattcttcagtggcttctgctacatctgttgcaactaaaaaaacagtccaaggccctccaacctctgatgacatttttgaaagggaatataagtatggtgcacacaactaccatcctttacctgtagccctggagagaggaaaaggtatttacttatgggatgtagaaggcagaaaatattttgacttcctgagttcttacagtgctgtcaaccaagggcattgtcaccccaagattgtgaatgctctgaagagtcaagtggacaaattgaccttaacatctagagctttctataataacgtacttggtgaatatgaggagtatattactaaacttttcaactaccacaaagttcttcctatgaatacaggagtggaggctggagagactgcctgtaaactagctcgtaagtggggctataccgtgaagggcattcagaaatacaaagcaaagattgtttttgcagctgggaacttctggggtaggacgttgtctgctatctccagttccacagacccaaccagttacgatggttttggaccatttatgccgggattcgacatcattccctataatgatctgcccgcactggagcgtgctcttcaggatccaaatgtggctgcgttcatggtagaaccaattcagggtgaagcaggcgttgttgttccggatccaggttacctaatgggagtgcgagagctctgcaccaggcaccaggttctctttattgctgatgaaatacagacaggattggccagaactggtagatggctggctgttgattatgaaaatgtcagacctgatatagtcctccttggaaaggccctttctgggggcttataccctgtgtctgcagtgctgtgtgatgatgacatcatgctgaccattaagccaggggagcatgggtccacatacggtggcaatccactaggctgccgagtggccatcgcagcccttgaggttttagaagaagaaaaccttgctgaaaatgcagacaaattgggcattatcttgagaaatgaactcatgaagctaccttctgatgttgtaactgccgtaagaggaaaaggattattaaacgctattgtcattaaagaaaccaaagattgggatgcttggaaggtgtgtctacgacttcgagataatggacttctggccaagccaacccatggcgacattatcaggtttgcgcctccgctggtgatcaaggaggatgagcttcgagagtccattgaaattattaacaagaccatcttgtctttctgagggtagccagctgttttcagtggtccctgggagccagctggagacaggtggtcctgtaaaagctttattcctaatgtgggcacattccactcccatgagtcttcaaaaactttttttttgaatatatttttttcagttgatacataatagaacaacgtttatgaacctgccgtttgctttgtaacgtaactaaataatgtaatggcatctatattcagttgaagtgttttgatgtgcatgtgtacttcctaaggtgaaatgcatctatatacagacagcctctaaatcaagtccttcagtataattgatatatgtttttataatttcctcactggtataagtgtttcatatttgaaaaagttatctctgggtattgcataaaaggcttcatcttataaagtgaaatcattgttattgaattttaggaaggattaatggttaagtgtatataaaatactaatattaagtaaacttcatattggccaacaccagggttgtattctatggatgtcattattttgaattaagaattagtgtttaacattcctaaattgttttgagtgcttgattataatttgtaaaaaatgtttattttcaatacttctttaaatttaaaataaagcttatatttcaaatgtc

SEQ ID NO: 312534 - DNA, 1931 bp, Homo sapiens
  misc_feature (1908)..(1908): n is a, c, g, or t
aagttgcattgacgctccggcgtcactgttgcgcttcatagacgccgcgtgtacccggttgtcctcaggcgctgtcagatctgtggtttttctacttgaaggacacaatgttttccaaactagcacatttgcagaggtttgctgtacttagtcgcggagttcattcttcagtggcttctgctacatctgttgcaactaaaaaaacagtccaaggccctccaacctctgatgacatttttgaaagggaatataagtatggtgcacacaactaccatcctttacctgtagccctggagagaggaaaaggtatttacttatgggatgtagaaggcagaaaatattttgacttcctgagttcttacagtgctgtcaaccaagggcattgtcaccccaagattgtgaatgctctgaagagtcaagtggacaaattgaccttaacatctagagctttctataataacgtacttggtgaatatgaggagtatattactaaacttttcaactaccacaaagttcttcctatgaatacaggagtggaggctggagagactgcctgtaaactagctcgtaagtggggctataccgtgaagggcattcagaaatacaaagcaaagattgtttttgcagctgggaacttctggggtaggacgttgtctgctatctccagttccacagacccaaccagttacgatggttttggaccatttatgccgggattcgacatcattccctataatgatctgcccgcactggagcgtgctcttcaggatccaaatgtggctgcgttcatggtagaaccaattcagggtgaagcaggcgttgttgttccggatccaggttacctaatgggagtgcgagagctctgcaccaggcaccaggttctctttattgctgatgaaatacagacaggattggccagaactggtagatggctggctgttgattatgaaaatgtcagacctgatatagtcctccttggaaaggccctttctgggggcttataccctgtgtctgcagtgctgtgtgatgatgacatcatgctgaccattaagccaggggagcatgggtccacatacggtggcaatccactaggctgccgagtggccatcgcagcccttgaggttttagaagaagaaaaccttgctgaaaatgcagacaaattgggcattatcttgagaaatgaactcatgaagctaccttctgatgttgtaactgccgtaagaggaaaaggattattaaacgctattgtcattaaagaaaccaaagattgggatgcttggaaggtgtgtctacgacttcgagataatggacttctggccaagccaacccatggcgacattatcaggtttgcgcctccgctggtgatcaaggaggatgagcttcgagagtccattgaaattattaacaagaccatcttgtctttctgagggtagccagctgttttcagtggtccctgggagccagctggagacaggtggtcctgtaaaagctttattcctaatgtgggcacattccactcccatgagtcttcaaaaactttttttttgaatatatttttttcagttgatacataatagaacaacgtttatgaacctgccgtttgctttgtaacgtaactaaataatgtaatggcatctatattcagttgaagtgttttgatgtgcatgtgtacttcctaaggtgaaatgcatctatatacagacagcctctaaatcaagtccttcagtataattgatatatgtttttataatttcctcactggtataagtgtttcatatttgaaaaagttatctctgggtattgcataaaaggcttcatcttataaagtgaaatcattgttattgaattttaggaaggattaatggttaagtgttgcattattttgaataagcattagcgttaaccatnctaaattggttgaagggctgatt

SEQ ID NO: 312535 - DNA, 2026 bp, Homo sapiens
aagttgcattgacgctccggcgtcactgttgcgcttcatagacgccgcgtgtacccggttgtcctcaggcgctgtcagatctgtggtttttctacttgaaggacacaatgttttccaaactagcacatttgcagaggtttgctgtacttagtcgcggagttcattcttcagtggcttctgctacatctgttgcaactaaaaaaacagtccaaggccctccaacctctgatgacatttttgaaagggaatataagtatggtgcacacaactaccatcctttacctgtagccctggagagaggaaaaggtatttacttatgggatgtagaaggcagaaaatattttgacttcctgagttcttacagtgctgtcaaccaagggcattgtcaccccaagattgtgaatgctctgaagagtcaagtggacaaattgaccttaacatctagagctttctataataacgtacttggtgaatatgaggagtatattactaaacttttcaactaccacaaagttcttcctatgaatacaggagtggaggctggagagactgcctgtaaactagctcgtaagtggggctataccgtgaagggcattcagaaatacaaagcaaagattgtttttgcagctgggaacttctggggtaggacgttgtctgctatctccagttccacagacccaaccagttacgatggttttggaccatttatgccgggattcgacatcattccctataatgatctgcccgcactggagcgtgctcttcaggatccaaatgtggctgcgttcatggtagaaccaattcagggtgaagcaggcgttgttgttccggatccaggttacctaatgggagtgcgagagctctgcaccaggcaccaggttctctttattgctgatgaaatacagacaggattggccagaactggtagatggctggctgttgattatgaaaatgtcagacctgatatagtcctccttggaaaggccctttctgggggcttataccctgtgtctgcagtgctgtgtgatgatgacatcatgctgaccattaagccaggggagcatgggtccacatacggtggcaatccactaggctgccgagtggccatcgcagcccttgaggttttagaagaagaaaaccttgctgaaaatgcagacaaattgggcattatcttgagaaatgaactcatgaagctaccttctgatgttgtaactgccgtaagaggaattgggatgcttggaaggtgtgtctacgacttcgagataatggacttctggccaagccaacccatggcgacattatcaggtttgcgcctccgctggtgatcaaggaggatgagcttcgagagtccattgaaattattaacaagaccatcttgtctttctgagggtagccagctgttttcagtggtccctgggagccagctggagacaggtggtcctgtaaaagctttattcctaatgtgggcacattccactcccatgagtcttcaaaaactttttttttgaatatatttttttcagttgatacataatagaacaacgtttatgaacctgccgtttgctttgtaacgtaactaaataatgtaatggcatctatattcagttgaagtgttttgatgtgcatgtgtacttcctaaggtgaaatgcatctatatacagacagcctctaaatcaagtccttcagtataattgatatatgtttttataatttcctcactggtataagtgtttcatatttgaaaaagttatctctgggtattgcataaaaggcttcatcttataaagtgaaatcattgttattgaattttaggaaggattaatggttaagtgtatataaaatactaatattaagtaaacttcatattggccaacaccagggttgtattctatggatgtcattattttgaattaagaattagtgtttaacattcctaaattgttttgagtgcttgattataatttgtaaaaaatgtttattttcaatacttctttaaatttaaaataaagcttatatttcaaatgtc

SEQ ID NO: 312536 - DNA, 1975 bp, Homo sapiens
aagttgcattgacgctccggcgtcactgttgcgcttcatagacgccgcgtgtacccggttgtcctcaggcgctgtcagatctgtggtttttctacttgaaggacacaatgttttccaaactagcacatttgcagaggtttgctgtacttagtcgcggagttcattcttcagtggcttctgctacatctgttgcaactaaaaaaacagtccaaggccctccaacctctgatgacatttttgaaagggaatataagtatggtgcacacaactaccatcctttacctgtagccctggagagaggaaaaggtatttacttatgggatgtagaaggcagaaaatattttgacttcctgagttcttacagtgctgtcaaccaagggcattgtcaccccaagattgtgaatgctctgaagagtcaagtggacaaattgaccttaacatctagagctttctataataacgtacttggtgaatatgaggagtatattactaaacttttcaactaccacaaagttcttcctatgaatacaggagtggaggctggagagactgcctgtaaactagctcgtaagtggggctataccgtgaagggcattcagaaatacaaagcaaagattgtttttgcagctgggaacttctggggtaggacgttgtctgctatctccagttccacagacccaaccagttacgatggttttggaccatttatgccgggattcgacatcattccctataatgatctgcccgcactggagcgtgctcttcaggatccaaatgtggctgcgttcatggtagaaccaattcagggtgaagcaggcgttgttgttccggatccaggttacctaatgggagtgcgagagctctgcaccaggcaccaggttctctttattgctgatgaaatacagacaggattggccagaactggtagatggctggctgttgattatgaaaatgtcagacctgatatagtcctccttggaaaggccctttctgggggcttataccctgtgtctgcagtgctgtgtgatgatgacatcatgctgaccattaagccaggggagcatgggtccacatacggtggcaatccactaggctgccgagtggccatcgcagcccttgaggttttagaagaagaaaaccttgctgaaaatgcagacaaattgggcattatcttgagaaatgaactcatgaagctaccttctgatgttgtaactgccgtaagaggaaaaggattattaaacgctattgtcattaaagaaaccaaagattgggatgcttggaaggtgtgtctacgacttcgagataatggacttctggccaagccaacccatggcgacattatcaggtttgcgcctccgctggtgatcaaggaggatgagcttcgagagtccattgaaattattaacaagaccatcttgtctttctgagggtagccagctgttttcagtggtccctgggagccagctggagacaggtggtcctgtaaaagctttattcctaatgtgggcacattccactcccatgagtcttcaaaaactttttttttgaatatatttttttcagttgatacataatagaacaacgtttatgaacctgccgtttgctttgtaacgtaactaaataatgtaatggcatctatattcagttgaagtgttttgatgtgcatgtgtacttcctaaggtgaaatgcatctatatacagacagcctctaaatcaagtccttcaatcttataaagtgaaatcattgttattgaattttaggaaggattaatggttaagtgtatataaaatactaatattaagtaaacttcatattggccaacaccagggttgtattctatggatgtcattattttgaattaagaattagtgtttaacattcctaaattgttttgagtgcttgattataatttgtaaaaaatgtttattttcaatacttctttaaatttaaaataaagcttatatttcaaatgtc

SEQ ID NO: 312537 - DNA, 1786 bp, Homo sapiens
  misc_feature (1693)..(1693): n is a, c, g, or t
  misc_feature (1695)..(1695): n is a, c, g, or t
  misc_feature (1704)..(1704): n is a, c, g, or t
  misc_feature (1715)..(1715): n is a, c, g, or t
aagttgcattgacgctccggcgtcactgttgcgcttcatagacgccgcgtgtacccggttgtcctcaggcgctgtcagatctgtggtttttctacttgaaggacacaatgttttccaaactagcacatttgcagaggtttgctgtacttagtcgcggagttcattcttcagtggcttctgctacatctgttgcaactaaaaaaacagtccaaggccctccaacctctgatgacatttttgaaagggaatataagtatggtgcacacaactaccatcctttacctgtagccctggagagaggaaaaggtatttacttatgggatgtagaaggcagaaaatattttgacttcctgagttcttacagtgctgtcaaccaagggcattgtcaccccaagattgtgaatgctctgaagagtcaagtggacaaattgaccttaacatctagagctttctataataacgtacttggtgaatatgaggagtatattactaaacttttcaactaccacaaagttcttcctatgaatacaggagtggaggctggagagactgcctgtaaactagctcgtaagtggggctataccgtgaagggcattcagaaatacaaagcaaagattgtttttgcagctgggaacttctggggtaggacgttgtctgctatctccagttccacagacccaaccagttacgatggttttggaccatttatgccgggattcgacatcattccctataatgatctgcccgcactggagcgtgctcttcaggatccaaatgtggctgcgttcatggtagaaccaattcagggtgaagcaggcgttgttgttccggatccaggttacctaatgggagtgcgagagctctgcaccaggcaccaggttctctttattgctgatgaaatacagacaggattggccagaactggtagatggctggctgttgattatgaaaatgtcagacctgatatagtcctccttggaaaggccctttctgggggcttataccctgtgtctgcagtgctgtgtgatgatgacatcatgctgaccattaagccaggggagcatgggtccacatacggtggcaatccactaggctgccgagtggccatcgcagcccttgaggttttagaagaagaaaaccttgctgaaaatgcagacaaattgggcattatcttgagaaatgaactcatgaagctaccttctgatgttgtaactgccgtaagaggaaaaggattattaaacgctattgtcattaaagaaaccaaagattgggatgcttggaaggtgtgtctacgacttcgagataatggacttctggccaagccaacccatggcgacattatcaggtttgcgcctccgctggtgatcaaggaggatgagcttcgagagtccattgaaattattaacaagaccatcttgtctttctgagggtagccagctgttttcagtggtccctgggagccagctggagacaggtggtcctgtaaaagctttattcctaatgtgggcacattccactcccatgagtcttcaaaaactttttttttgaatatatttttttcagttgatacataatagaacaacgtttatgaacctgccgtttgctttgtaacgtaactaaataatgtaatggcatctatattcagttgaagtgttttgatgtgcatgtgtacttcctaaggtgaagggttatntnagaaggctnaaaagcttcgnaatgaagaagtggaaaaacccccggggaggggcccattgaaggatccgggttggaaaggggctctaggaac

SEQ ID NO: 312538 - DNA, 2013 bp, Homo sapiens
aagttgcattgacgctccggcgtcactgttgcgcttcatagacgccgcgtgtacccggttgtcctcaggcgctgtcagatctgtggtttttctacttgaaggacacaatgttttccaaactagcacatttgcagaggtttgctgtacttagtcgcggagttcattcttcagtggcttctgctacatctgttgcaactaaaaaaacagtccaaggccctccaacctctgatgacatttttgaaagggaatataagtatggtgcacacaactaccatcctttacctgtagccctggagagaggaaaaggtatttacttatgggatgtagaaggcagaaaatattttgacttcctgagttcttacagtgctgtcaaccaagggcattgtcaccccaagattgtgaatgctctgaagagtcaagtggacaaattgaccttaacatctagagctttctataataacgtacttggtgaatatgaggagtatattactaaacttttcaactaccacaaagttcttcctatgaatacaggagtggaggctggagagactgcctgtaaactagctcgtaagtggggctataccgtgaagggcattcagaaatacaaagcaaagattgtttttgcagctgggaacttctggggtaggacgttgtctgctatctccagttccacagacccaaccagttacgatggttttggaccatttatgccgggattcgacatcattccctataatgatctgcccgcactggagcgtgctcttcaggatccaaatgtggctgcgttcatggtagaaccaattcagggtgaagcaggcgttgttgttccggatccaggttacctaatgggagtgcgagagctctgcaccaggcaccaggttctctttattgctgatgaaatacagacaggattggccagaactggtagatggctggctgttgattatgaaaatgtcagacctgatatagtcctccttggaaaggccctttctgggggcttataccctgtgtctgcagtgctgtgtgatgatgacatcatgctgaccattaagccaggggagcatgggtccacatacggtggcaatccactaggctgccgagtggccatcgcagcccttgaggttttagaagaagaaaaccttgctgaaaatgcagacaaattgggcattatcttgagaaatgaactcatgaagctaccttctgatgttgtaactgccgtaagaggaaaaggattattaaacgctattgtcattaaagaaaccaaagattgggatgcttggaaggtgtgtctacgacttcgagataatggacttctggccaagccaacccatggcgacattatcaggtttgcgcctccgctggtgatcaaggaggatgagcttcgagagtccattgaaattattaacaagaccatcttgtctttctgagggtagccagctgttttcagtggtccctgggagccagctggagacaggtggtcctgtaaaagctttattcctaatgtgggcacattccactcccatgagtcttcattatgaacctgccgtttgctttgtaacgtaactaaataatgtaatggcatctatattcagttgaagtgttttgatgtgcatgtgtacttcctaaggtgaaatgcatctatatacagacagcctctaaatcaagtccttcagtataattgatatatgtttttataatttcctcactggtataagtgtttcatatttgaaaaagttatctctgggtattgcataaaaggcttcatcttataaagtgaaatcattgttattgaattttaggaaggattaatggttaagtgtatataaaatactaatattaagtaaacttcatattggccaacaccagggttgtattctatggatgtcattattttgaattaagaattagtgtttaacattcctaaattgttttgagtgcttgattataatttgtaaaaaatgtttattttcaatacttctttaaatttaaaataaagcttatatttcaaatgtc

SEQ ID NO: 312539 - DNA, 2328 bp, Homo sapiens
catgtaattctgcattttatttcaggagattttggactctctgcagactgtccctggatcttgggttaaaaatctgtattctagactgaaccgtgggaagaaaaaatagtcagtgagtctttggcaaaccggagtactggattttgtttagcaattgcaaattcctgaacatactggatttactgggtagtgccaagtttaaagggaagtaagccaaactccaagtattatgttttgctaatttggcagctcgaatcaagagtggctgtgagattatacatggtttgacttgtcattggtagacttctgttgaaacatgaattaactagtcttttagaaaatctgtggtttttctacttgaaggacacaatgttttccaaactagcacatttgcagaggtttgctgtacttagtcgcggagttcattcttcagtggcttctgctacatctgttgcaactaaaaaaacagtccaaggccctccaacctctgatgacatttttgaaagggaatataagtatggtgcacacaactaccatcctttacctgtagccctggagagaggaaaaggtatttacttatgggatgtagaaggcagaaaatattttgacttcctgagttcttacagtgctgtcaaccaagggcattgtcaccccaagattgtgaatgctctgaagagtcaagtggacaaattgaccttaacatctagagctttctataataacgtacttggtgaatatgaggagtatattactaaacttttcaactaccacaaagttcttcctatgaatacaggagtggaggctggagagactgcctgtaaactagctcgtaagtggggctataccgtgaagggcattcagaaatacaaagcaaagattgtttttgcagctgggaacttctggggtaggacgttgtctgctatctccagttccacagacccaaccagttacgatggttttggaccatttatgccgggattcgacatcattccctataatgatctgcccgcactggagcgtgctcttcaggatccaaatgtggctgcgttcatggtagaaccaattcagggtgaagcaggcgttgttgttccggatccaggttacctaatgggagtgcgagagctctgcaccaggcaccaggttctctttattgctgatgaaatacagacaggattggccagaactggtagatggctggctgttgattatgaaaatgtcagacctgatatagtcctccttggaaaggccctttctgggggcttataccctgtgtctgcagtgctgtgtgatgatgacatcatgctgaccattaagccaggggagcatgggtccacatacggtggcaatccactaggctgccgagtggccatcgcagcccttgaggttttagaagaagaaaaccttgctgaaaatgcagacaaattgggcattatcttgagaaatgaactcatgaagctaccttctgatgttgtaactgccgtaagaggaaaaggattattaaacgctattgtcattaaagaaaccaaagattgggatgcttggaaggtgtgtctacgacttcgagataatggacttctggccaagccaacccatggcgacattatcaggtttgcgcctccgctggtgatcaaggaggatgagcttcgagagtccattgaaattattaacaagaccatcttgtctttctgagggtagccagctgttttcagtggtccctgggagccagctggagacaggtggtcctgtaaaagctttattcctaatgtgggcacattccactcccatgagtcttcaaaaactttttttttgaatatatttttttcagttgatacataatagaacaacgtttatgaacctgccgtttgctttgtaacgtaactaaataatgtaatggcatctatattcagttgaagtgttttgatgtgcatgtgtacttcctaaggtgaaatgcatctatatacagacagcctctaaatcaagtccttcagtataattgatatatgtttttataatttcctcactggtataagtgtttcatatttgaaaaagttatctctgggtattgcataaaaggcttcatcttataaagtgaaatcattgttattgaattttaggaaggattaatggttaagtgtatataaaatactaatattaagtaaacttcatattggccaacaccagggttgtattctatggatgtcattattttgaattaagaattagtgtttaacattcctaaattgttttgagtgcttgattataatttgtaaaaaatgtttattttcaatacttctttaaatttaaaataaagcttatatttcaaatgtc

SEQ ID NO: 312540 - DNA, 2298 bp, Homo sapiens
gtgattgagcccaagaaaccagggacttacgcatttggccaatgtcaaaagaacagaactttgcccactgcacacttgctgtgtacaatgactgagccctttcttgtagtttgtttccttgtttgagaggtgtgcatgcgaccgtggcttttcccaaagtttctgactttgtggtttacccccttcaccttccagggacgcagttgttacgaggttagacgtggcagctctgtgcagtgtttgagcctacagtgggatacatagggtcaaattgagaataataaactgagtcattctcctggaaaaaaaaaaaaaaaaaactcgaggacgccgcgtgtacccggttgtcctcaggcgctgtcagatctgtggtttttctacttgaaggacacaatgttttccaaactagcacatttgcagaggtttgctgtacttagtcgcggagttcattcttcagtggcttctgctacatctgttgcaactaaaaaaacagtccaaggccctccaacctctgatgacatttttgaaagggaatataagtatggtgcacacaactaccatcctttacctgtagccctggagagaggaaaaggtatttacttatgggatgtagaaggcagacccaagattgtgaatgctctgaagagtcaagtggacaaattgaccttaacatctagagctttctataataacgtacttggtgaatatgaggagtatattactaaacttttcaactaccacaaagttcttcctatgaatacaggagtggaggctggagagactgcctgtaaactagctcgtaagtggggctataccgtgaagggcattcagaaatacaaagcaaagattgtttttgcagctgggaacttctggggtaggacgttgtctgctatctccagttccacagacccaaccagttacgatggttttggaccatttatgccgggattcgacatcattccctataatgatctgcccgcactggagcgtgctcttcaggatccaaatgtggctgcgttcatggtagaaccaattcagggtgaagcaggcgttgttgttccggatccaggttacctaatgggagtgcgagagctctgcaccaggcaccaggttctctttattgctgatgaaatacagacaggattggccagaactggtagatggctggctgttgattatgaaaatgtcagacctgatatagtcctccttggaaaggccctttctgggggcttataccctgtgtctgcagtgctgtgtgatgatgacatcatgctgaccattaagccaggggagcatgggtccacatacggtggcaatccactaggctgccgagtggccatcgcagcccttgaggttttagaagaagaaaaccttgctgaaaatgcagacaaattgggcattatcttgagaaatgaactcatgaagctaccttctgatgttgtaactgccgtaagaggaaaaggattattaaacgctattgtcattaaagaaaccaaagattgggatgcttggaaggtgtgtctacgacttcgagataatggacttctggccaagccaacccatggcgacattatcaggtttgcgcctccgctggtgatcaaggaggatgagcttcgagagtccattgaaattattaacaagaccatcttgtctttctgagggtagccagctgttttcagtggtccctgggagccagctggagacaggtggtcctgtaaaagctttattcctaatgtgggcacattccactcccatgagtcttcaaaaactttttttttgaatatatttttttcagttgatacataatagaacaacgtttatgaacctgccgtttgctttgtaacgtaactaaataatgtaatggcatctatattcagttgaagtgttttgatgtgcatgtgtacttcctaaggtgaaatgcatctatatacagacagcctctaaatcaagtccttcagtataattgatatatgtttttataatttcctcactggtataagtgtttcatatttgaaaaagttatctctgggtattgcataaaaggcttcatcttataaagtgaaatcattgttattgaattttaggaaggattaatggttaagtgtatataaaatactaatattaagtaaacttcatattggccaacaccagggttgtattctatggatgtcattattttgaattaagaattagtgtttaacattcctaaattgttttgagtgcttgattataatttgtaaaaaatgtttattttcaatacttctttaaatttaaaataaagcttatatttcaaatgtc

SEQ ID NO: 312541 - DNA, 1953 bp, Homo sapiens
taaggcccgtcccggcggccccgcggccccggcgtcccagccgggccgcgcgcggtcgcgcgctcatcttcgcgggtctgctcatcgtggcgctcaaaacgtccaggccctccacctcgacgacattcgaccgggctctcgtatggtgcacacaactaccatcctttacctgtagccctggagagaggaaaaggtatttacttatgggatgtagaaggcagaaaatattttgacttcctgagttcttacagtgctgtcaaccaagggcattgtcaccccaagattgtgaatgctctgaagagtcaagtggacaaattgaccttaacatctagagctttctataataacgtacttggtgaatatgaggagtatattactaaacttttcaactaccacaaagttcttcctatgaatacaggagtggaggctggagagactgcctgtaaactagctcgtaagtggggctataccgtgaagggcattcagaaatacaaagcaaagattgtttttgcagctgggaacttctggggtaggacgttgtctgctatctccagttccacagacccaaccagttacgatggttttggaccatttatgccgggattcgacatcattccctataatgatctgcccgcactggagcgtgctcttcaggatccaaatgtggctgcgttcatggtagaaccaattcagggtgaagcaggcgttgttgttccggatccaggttacctaatgggagtgcgagagctctgcaccaggcaccaggttctctttattgctgatgaaatacagacaggattggccagaactggtagatggctggctgttgattatgaaaatgtcagacctgatatagtcctccttggaaaggccctttctgggggcttataccctgtgtctgcagtgctgtgtgatgatgacatcatgctgaccattaagccaggggagcatgggtccacatacggtggcaatccactaggctgccgagtggccatcgcagcccttgaggttttagaagaagaaaaccttgctgaaaatgcagacaaattgggcattatcttgagaaatgaactcatgaagctaccttctgatgttgtaactgccgtaagaggaaaaggattattaaacgctattgtcattaaagaaaccaaagattgggatgcttggaaggtgtgtctacgacttcgagataatggacttctggccaagccaacccatggcgacattatcaggtttgcgcctccgctggtgatcaaggaggatgagcttcgagagtccattgaaattattaacaagaccatcttgtctttctgagggtagccagctgttttcagtggtccctgggagccagctggagacaggtggtcctgtaaaagctttattcctaatgtgggcacattccactcccatgagtcttcaaaaactttttttttgaatatatttttttcagttgatacataatagaacaacgtttatgaacctgccgtttgctttgtaacgtaactaaataatgtaatggcatctatattcagttgaagtgttttgatgtgcatgtgtacttcctaaggtgaaatgcatctatatacagacagcctctaaatcaagtccttcagtataattgatatatgtttttataatttcctcactggtataagtgtttcatatttgaaaaagttatctctgggtattgcataaaaggcttcatcttataaagtgaaatcattgttattgaattttaggaaggattaatggttaagtgtatataaaatactaatattaagtaaacttcatattggccaacaccagggttgtattctatggatgtcattattttgaattaagaattagtgtttaacattcctaaattgttttgagtgcttgattataatttgtaaaaaatgtttattttcaatacttctttaaatttaaaataaagcttatatttcaaatgtc

SEQ ID NO: 312542 - DNA, 2201 bp, Homo sapiens
cgattcttgtgtcttagcctgctgagtagctggtcttgaactcctgacctcaggcgatctgcccaccttggcctcccaaagtgcagggattacataagtgagccactgtgcctggtctattccccaacatctaaaacaatgcctgacatagtagatcctcagtcacctttattaatggataaaaaatattccagcagaaagggagacgtctgtcatttagcatcataaaggattataatatcaaggaaggtaaaatggaaacgtgtttggattgcttgaggatcttttctccaaatgaaattggaaatgcattctgttgttagcctgcagtattggagttttgaaaggaaaaccgctaattgtctatgaaggatattctttctcatatcactatcataaatgcaccttctctagaaaacatgcattcaagacctcaattgttagggcttggttttgggttggggattattgaaagaaaagtaagttatctatcttcaggggctatatattccagtcaagaggctcagtagagagaaatgcctaaaataggaattacaaggccagacttagtggccttgtgtcataggagccatggtgtttaatatcagactttgttttaacaattgaaagcccaccgaaggtgcactaaagcaagcccttgatttattttttgagtcaaacttcttgtggtgttttgcggggatagtgcttattgaattttgggtttctttgaaataatcactgtttgtttcccctttgtagctgggaacttctggggtaggacgttgtctgctatctccagttccacagacccaaccagttacgatggttttggaccatttatgccgggattcgacatcattccctataatgatctgcccgcactggagcgtgctcttcaggatccaaatgtggctgcgttcatggtagaaccaattcagggtgaagcaggcgttgttgttccggatccaggttacctaatgggagtgcgagagctctgcaccaggcaccaggttctctttattgctgatgaaatacagacaggattggccagaactggtagatggctggctgttgattatgaaaatgtcagacctgatatagtcctccttggaaaggccctttctgggggcttataccctgtgtctgcagtgctgtgtgatgatgacatcatgctgaccattaagccaggggagcatgggtccacatacggtggcaatccactaggctgccgagtggccatcgcagcccttgaggttttagaagaagaaaaccttgctgaaaatgcagacaaattgggcattatcttgagaaatgaactcatgaagctaccttctgatgttgtaactgccgtaagaggaaaaggattattaaacgctattgtcattaaagaaaccaaagattgggatgcttggaaggtgtgtctacgacttcgagataatggacttctggccaagccaacccatggcgacattatcaggtttgcgcctccgctggtgatcaaggaggatgagcttcgagagtccattgaaattattaacaagaccatcttgtctttctgagggtagccagctgttttcagtggtccctgggagccagctggagacaggtggtcctgtaaaagctttattcctaatgtgggcacattccactcccatgagtcttcaaaaactttttttttgaatatatttttttcagttgatacataatagaacaacgtttatgaacctgccgtttgctttgtaacgtaactaaataatgtaatggcatctatattcagttgaagtgttttgatgtgcatgtgtacttcctaaggtgaaatgcatctatatacagacagcctctaaatcaagtccttcagtataattgatatatgtttttataatttcctcactggtataagtgtttcatatttgaaaaagttatctctgggtattgcataaaaggcttcatcttataaagtgaaatcattgttattgaattttaggaaggattaatggttaagtgtatataaaatactaatattaagtaaacttcatattggccaacaccagggttgtattctatggatgtcattattttgaattaagaattagtgtttaacattcctaaattgttttgagtgcttgattataatttgtaaaaaatgtttattttcaatacttctttaaatttaaaataaagcttatatttcaaatgtc

SEQ ID NO: 312543 - DNA, 678 bp, Homo sapiens
  misc_feature (1)..(1): n is a, c, g, or t
  misc_feature (18)..(19): n is a, c, g, or t
  misc_feature (23)..(23): n is a, c, g, or t
  misc_feature (29)..(30): n is a, c, g, or t
  misc_feature (37)..(37): n is a, c, g, or t
ntacaattcactcggatnnagtngaatcnntccaccngagggtagccagctgttttcagtggtccctgggagccagctggagacaggtggtcctgtaaaagctttattcctaatgtgggcacattccactcccatgagtcttcaaaaactttttttttgaatatatttttttcagttgatacataatagaacaacgtttatgaacctgccgtttgctttgtaacgtaactaaataatgtaatggcatctatattcagttgaagtgttttgatgtgcatgtgtacttcctaaggtgaaatgcatctatatacagacagcctctaaatcaagtccttcagtataattgatatatgtttttataatttcctcactggtataagtgtttcatatttgaaaaagttatctctgggtattgcataaaaggcttcatcttataaagtgaaatcattgttattgaattttaggaaggattaatggttaagtgtatataaaatactaatattaagtaaacttcatattggccaacaccagggttgtattctatggatgtcattattttgaattaagaattagtgtttaacattcctaaattgttttgagtgcttgattataatttgtaaaaaatgtttattttcaatacttctttaaatttaaaataaagcttatatttcaaatgtc

SEQ ID NO: 312544 - DNA, 1741 bp, Homo sapiens
gtgattgagcccaagaaaccagggacttacgcatttggccaatgtcaaaagaacagaactttgcccactgcacacttgctgtgtacaatgactgagccctttcttgtagtttgtttccttgtttgagaggtgtgcatgcgaccgtggcttttcccaaagtttctgactttgtggtttacccccttcaccttccagggacgcagttgttacgaggttagacgtggcagctctgtgcagtgtttgagcctacagtgggatacatagggtcaaattgagaataataaactgagtcattctcctggaaaaaaaaaaaaaaaaaactcgaggacgccgcgtgtacccggttgtcctcaggcgctgtcagtaccgtctgggcgccgctgtcctggggctctggttcgggccctggccggggttccctgacagcggcgggggaggcgggcgggcgcggggtggccgcggcccgggttcgggggatgctggctgagggggcgcgctgggcctcggccggggaacgagccccgcttcagcggcccgtttactctgcgggcggctcggacccgggcgccctggagtctccggccggcgcgcagcttcagggggcaggggcgtggcgacccacggcttgcaggccggagtcctggttccagcccagagcggccgacgggcgggcggcagggagaggctgaggatgtggcagccccgcctgccagaccgggcggagccgccgccccctgcgctcgcggcctgtggaggccaggactcggcccacccggcccagagaccccgaggcgccccggggttccgggtaggaggcctttgggcacccttggttcctggggttggcggggaggctgcgttctggggacgggggagctgtgcagtaaaccggtggccctggtcacgcggcgggggcgctgatgcagccttggagggctgggtcctcccggcctgctcctgcgccctgcagatcggcctgcccatcgctcccctcttccagcctatgattttttttctccagcctctgtcgaaataaagaaaattacggaagcagaaccttccttacagtaacgtgcagatctgtggtttttctacttgaaggacacaatgttttccaaactagcacatttgcagaggtttgctgtacttagtcgcggagttcattcttcagtggcttctgctacatctgttgcaactaaaaaaacagtccaaggccctccaacctctgatgacatttttgaaagggaatataagtatggtgcacacaactaccatcctttacctgtagccctggagagaggaaaaggtatttacttatgggatgtagaaggcagaaaatattttgacttcctgagttcttacagtgctgtcaaccaagggcattgtcaccccaagattgtgaatgctctgaagagtcaagtggacaaattgaccttaacatctagagctttctataataacgtacttggtgaatatgaggagtatattactaaacttttcaactaccacaaagttcttcctatgaatacaggagtggaggctggagagactgcctgtaaactagctcgtaagtggggctataccgtgaagggcattcagaaatacaaagcaaagattgtttttgcagactgtgtccagtctctttcttaatagcaaagggtgcaaagatgttttcacctgagtattgaaagaagctggtgagtcagtggggtggagagacagaggaagactgtccctaact

SEQ ID NO: 312545 - DNA, 585 bp, Homo sapiens
gagacagtcttgctctgtcacccaggccggaatgcagtggtgcgatctcagctcacagcaacctctgcttcctgggttcaagcgattcttgtgtcttagcctgctgagtagctgggactacaggtgtgcactaccatgcctggctaatttttgtatttttagtagagatggggtttcaccatgttggccaggctggtcttgaactcctgacctcaggcgatctgcccaccttggcctcccaaagtgcagggattacataagtgagccactgtgcctggtctattccccaacatctaaaacaatgcctgacatagtagatcctcagtcacctttattaatggataaaaaatattccagcagaaagggagacgtctgtcatttagcatcataaaggattataatatcaaggaaggtaaaatggaaacgtgtttggattgcttgaggatcttttctccaaatgaaattggaaatgcattctgttgttagcctgcagtattggagttttgaaaggaaaaccgctaattgtctatgaaggatattctttctcatatcactatcataaatgcaccttctctagaaaacatg

SEQ ID NO: 312546 - DNA, 2066 bp, Homo sapiens
aagttgcattgacgctccggcgtcactgttgcgcttcatagacgccgcgtgtacccggttgtcctcaggcgctgtcagatctgtggtttttctacttgaaggacacaatgttttccaaactagcacatttgcagaggtttgctgtacttagtcgcggagttcattcttcagtggcttctgctacatctgttgcaactaaaaaaacagtccaaggccctccaacctctgatgacatttttgaaagggaatataagtatggtgcacacaactaccatcctttacctgtagccctggagagaggaaaaggtatttacttatgggatgtagaaggcagaaaatattttgacttcctgagttcttacagtgctgtcaaccaagggcattgtcaccccaagattgtgaatgctctgaagagtcaagtggacaaattgaccttaacatctagagctttctataataacgtacttggtgaatatgaggagtatattactaaacttttcaactaccacaaagttcttcctatgaatacaggagtggaggctggagagactgcctgtaaactagctcgtaagtggggctataccgtgaagggcattcagaaatacaaagcaaagattgtttttgcagctgggaacttctggggtaggacgttgtctgctatctccagttccacagacccaaccagttacgatggttttggaccatttatgccgggattcgacatcattccctataatgatctgcccgcactggagcgtgctcttcaggatccaaatgtggctgcgttcatggtagaaccaattcagggtgaagcaggcgttgttgttccggatccaggttacctaatgggagtgcgagagctctgcaccaggcaccaggttctctttattgctgatgaaatacagacaggattggccagaactggtagatggctggctgttgattatgaaaatgtcagacctgatatagtcctccttggaaaggccctttctgggggcttataccctgtgtctgcagtgctgtgtgatgatgacatcatgctgaccattaagccaggggagcatgggtccacatacggtggcaatccactaggctgccgagtggccatcgcagcccttgaggttttagaagaagaaaaccttgctgaaaatgcagacaaattgggcattatcttgagaaatgaactcatgaagctaccttctgatgttgtaactgccgtaagaggaaaaggattattaaacgctattgtcattaaagaaaccaaagattgggatgcttggaaggtgtgtctacgacttcgagataatggacttctggccaagccaacccatggcgacattatcaggtttgcgcctccgctggtgatcaaggaggatgagcttcgagagtccattgaaattattaacaagaccatcttgtctttctgagggtagccagctgttttcagtggtccctgggagccagctggagacaggtggtcctgtaaaagctttattcctaatgtgggcacattccactcccatgagtcttcaaaaactttttttttgaatatatttttttcagttgatacataatagaacaacgtttatgaacctgccgtttgctttgtaacgtaactaaataatgtaatggcatctatattcagttgaagtgttttgatgtgcatgtgtacttcctaaggtgaaatgcatctatatacagacagcctctaaatcaagtccttcagtataattgatatatgtttttataatttcctcactggtataagtgtttcatatttgaaaaagttatctctgggtattgcataaaaggcttcatcttataaagtgaaatcattgttattgaattttaggaaggattaatggttaagtgtatataaaatactaatattaagtaaacttcatattggccaacaccagggttgtattctatggatgtcattattttgaattaagaattagtgtttaacattcctaaattgttttgagtgcttgattataatttgtaaaaaatgtttattttcaatacttctttaaatttaaaataaagcttatatttcaaatgtc

SEQ ID NO: 312547 - DNA, 2517 bp, Homo sapiens
aagttgcattgacgctccggcgtcactgttgcgcttcatagacgccgcgtgtacccggttgtcctcaggcgctgtcagatctgtggtttttctacttgaaggacacaatgttttccaaactagcacatttgcagaggtttgctgtacttagtcgcggagttcattcttcagtggcttctgctacatctgttgcaactaaaaaaacagtccaaggccctccaacctctgatgacatttttgaaagggaatataagtatggtgcacacaactaccatcctttacctgtagccctggagagaggaaaaggtatttacttatgggatgtagaaggcagaaaatattttgacttcctgagttcttacagtgctgtcaaccaagggcattgtcaccccaagattgtgaatgctctgaagagtcaagtggacaaattgaccttaacatctagagctttctataataacgtacttggtgaatatgaggagtatattactaaacttttcaactaccacaaagttcttcctatgaatacaggagtggaggctggagagactgcctgtaaactagctcgtaagtggggctataccgtgaagggcattcagaaatacaaagcaaagattgtttttgcagctgggaacttctggggtaggacgttgtctgctatctccagttccacagacccaaccagttacgatggttttggaccatttatgccgggattcgacatcattccctataatgatctgcccgcactggagcgtgctcttcaggatccaaatgtggctgcgttcatggtagaaccaattcagggtgaagcaggcgttgttgttccggatccaggttacctaatgggagtgcgagagctctgcaccaggcaccaggttctctttattgctgatgaaatacagacaggattggccagaactggtagatggctggctgttgattatgaaaatgtcagacctgatatagtcctccttggaaaggccctttctgggggcttataccctgtgtctgcagtgctgtgtgatgatgacatcatgctgaccattaagccaggggagcatgggtccacatacggtggcaatccactaggctgccgagtggccatcgcagcccttgaggttttagaagaagaaaaccttgctgaaaatgcagacaaattgggcattatcttgagaaatgaactcatgaagctaccttctgatgttgtaactgccgtaagaggaaaaggattattaaacgctattgtcattaaagaaaccaaagattgggatgcttggaaggtgtgtctacgacttcgagataatggacttctggccaagccaacccatggcgacattatcaggtttgcgcctccgctggtgatcaaggaggatgagcttcgagagtccattgaaattattaacaagaccatcttgtctttctgagggtagccagctgttttcagtggtccctgggagccagctggagacaggtggtcctgtaaaagctttattcctaatgtgggcacattccactcccatgagtcttcaaaaactttttttttgaatatatttttttcagttgatacataatagaacaacgtttatgaacctgccgtttgctttgtaacgtaactaaataatgtaatggcatctatattcagttgaagtgttttgatgtgcatgtgtacttcctaaggtgaaatgcatctatatacagacagcctctaaatcaagtccttcagtataattgatatatgtttttataatttcctcactggtataagtgtttcatatttgaaaaagttatctctgggtattgcataaaaggcttcatcttataaagtgaaatcattgttattgaattttaggaaggattaatggttaagtgtatataaaatactaatattaagtaaacttcatattggccaacaccagggttgtattctatggatgtcattattttgaattaagaattagtgtttaacattcctaaattgttttgagtgcttgattataatttgtaaaaaatgtttattttcaatacttctttaaatttaaaataaagcttatatttcaaatgtcaaaaaaaaaaaaaaaaaaacaaaaaacaaaaacaacaaaaaaaaaaaacaaaaagacaaaacaacgaaacaaccagcacaagagacacaaaacacacaacagaaggggggggcgtcgcccaaaacaccacccccccgcgcaggacgcagagcgcggcgccccccgccccagacacgagccgcgcccccacactgacagagccataaacaacacaccgagccgacgcccgcccgacacaaccaacacgaccgacgagaaacggagcaaccacccccccagctgccctgagacaacaaccacaccccccacgcggcgcggacacacatacacacacacaaccaagagataccacccgcgcccaagcaaacaaacacgacacaagccgccacacacaccgacacacggtgccaagaaagcagaccagcgagctcacaacccacacgcggcagca

SEQ ID NO: 312548 - DNA, 2009 bp, Homo sapiens
aagttgcattgacgctccggcgtcactgttgcgcttcatagacgccgcgtgtacccggttgtcctcaggcgctgtcagatctgtggtttttctacttgaaggacacaatgttttccaaactagcacatttgcagaggtttgctgtacttagtcgcggagttcattcttcagtggcttctgctacatctgttgcaactaaaaaaacagtccaaggccctccaacctctgatgacatttttgaaagggaatataagtatggtgcacacaactaccatcctttacctgtagccctggagagaggaaaaggtatttacttatgggatgtagaaggcagaaaatattttgacttcctgagttcttacagtgctgtcaaccaagggcattgtcaccccaagattgtgaatgctctgaagagtcaagtggacaaattgaccttaacatctagagctttctataataacgtacttggtgaatatgaggagtatattactaaacttttcaactaccacaaagttcttcctatgaatacaggagtggaggctggagagactgcctgtaaactagctcgtaagtggggctataccgtgaagggcattcagaaatacaaagcaaagattgtttttgcagctgggaacttctggggtaggacgttgtctgctatctccagttccacagacccaaccagttacgatggttttggaccatttatgccgggattcgacatcattccctataatgatctgcccgcactggagcgtgctcttcaggatccaaatgtggctgcgttcatggtagaaccaattcagggtgaagcaggcgttgttgttccggatccaggttacctaatgggagtgcgagagctctgcaccaggcaccaggttctctttattgctgatgaaatacagacaggattggccagaactggtagatggctggctgttgattatgaaaatgtcagacctgatatagtcctccttggaaaggccctttctgggggcttataccctgtgtctgcagtgctgtgtgatgatgacatcatgctgaccattaagccaggggagcatgggtccacatacggtggcaatccactaggctgccgagtggccatcgcagcccttgaggttttagaagaagaaaaccttgctgaaaatgcagacaaattgggcattatcttgagaaatgaactcatgaagctaccttctgatgttgtaactgccgtaagaggaaaaggattattaaacgctattgtcattaaagaaaccaaagattgggatgcttggaaggtgtgtctacgacttcgagataatggacttctggccaagccaacccatggcgacattatcaggtttgcgcctccgctggtgatcaaggaggatgagcttcgagagtccattgaaattattaacaagaccatcttgtctttctgagggtagccagctgttttcagtggtccctgggagccagctggagacaggtggtcctgtaaaagctttattcctaatgtgggcacattccactcccatgagtcttcaaaaactttttttttgaatatatttttttcagttgatacataatagaacaacgtttatgaacctgccgtttgctttgtaacgtaactaaataatgtaatggcatctatattcagttgaagtgttttgatgtgcatgtgtacttcctaaggtgaaatgcatctatatacagacagcctctaaatcaagtccttcagtataattgatatatgtttttataatttcctcactggtataagtgtttcatatttgaaaaagttatctctgggtattgcataaaaggcttcatataaaatactaatattaagtaaacttcatattggccaacaccagggttgtattctatggatgtcattattttgaattaagaattagtgtttaacattcctaaattgttttgagtgcttgattataatttgtaaaaaatgtttattttcaatacttctttaaatttaaaataaagcttatatttcaaatgtc

SEQ ID NO: 312549 - DNA, 2004 bp, Homo sapiens
aagttgcattgacgctccggcgtcactgttgcgcttcatagacgccgcgtgtacccggttgtcctcaggcgctgtcagatctgtggtttttctacttgaaggacacaatgttttccaaactagcacatttgcagaggtttgctgtacttagtcgcggagttcattcttcagtggcttctgctacatctgttgcaactaaaaaaacagtccaaggccctccaacctctgatgacatttttgaaagggaatataagtatggtgcacacaactaccatcctttacctgtagccctggagagaggaaaaggtatttacttatgggatgtagaaggcagaaaatattttgacttcctgagttcttacagtgctgtcaaccaagggcattgtcaccccaagattgtgaatgctctgaagagtcaagtggacaaattgaccttaacatctagagctttctataataacgtacttggtgaatatgaggagtatattactaaacttttcaactaccacaaagttcttcctatgaatacaggagtggaggctggagagactgcctgtaaactagctcgtaagtggggctataccgtgaagggcattcagaaatacaaagcaaagattgtttttgcagctgggaacttctggggtaggacgttgtctgctatctccagttccacagacccaaccagttacgatggttttggaccatttatgccgggattcgacatcattccctataatgatctgcccgcactggagcgtgctcttcaggatccaaatgtggctgcgttcatggtagaaccaattcagggtgaagcaggcgttgttgttccggatccaggttacctaatgggagtgcgagagctctgcaccaggcaccaggttctctttattgctgatgaaatacagacaggattggccagaactggtagatggctggctgttgattatgaaaatgtcagacctgatatagtcctccttggaaaggccctttctgggggcttataccctgtgtctgcagtgctgtgtgatgatgacatcatgctgaccattaagccaggggagcatgggtccacatacggtggcaatccactaggctgccgagtggccatcgcagcccttgaggttttagaagaagaaaaccttgctgaaaatgcagacaaattgggcattatcttgagaaatgaactcatgaagctaccttctgatgttgtaactgccgtaagaggaaaaggattattaaacgctattgtcattaaagaaaccaaagattgggatgcttggaaggtgtgtctacgacttcgagataatggacttctggccaagccaacccatggcgacattatcaggtttgcgcctccgctggtgatcaaggaggatgagcttcgagagtccattgaaaccagctggagacaggtggtcctgtaaaagctttattcctaatgtgggcacattccactcccatgagtcttcaaaaactttttttttgaatatatttttttcagttgatacataatagaacaacgtttatgaacctgccgtttgctttgtaacgtaactaaataatgtaatggcatctatattcagttgaagtgttttgatgtgcatgtgtacttcctaaggtgaaatgcatctatatacagacagcctctaaatcaagtccttcagtataattgatatatgtttttataatttcctcactggtataagtgtttcatatttgaaaaagttatctctgggtattgcataaaaggcttcatcttataaagtgaaatcattgttattgaattttaggaaggattaatggttaagtgtatataaaatactaatattaagtaaacttcatattggccaacaccagggttgtattctatggatgtcattattttgaattaagaattagtgtttaacattcctaaattgttttgagtgcttgattataatttgtaaaaaatgtttattttcaatacttctttaaatttaaaataaagcttatatttcaaatgtc

SEQ ID NO: 312550 - DNA, 3066 bp, Homo sapiens
gtgattgagcccaagaaaccagggacttacgcatttggccaatgtcaaaagaacagaactttgcccactgcacacttgctgtgtacaatgactgagccctttcttgtagtttgtttccttgtttgagaggtgtgcatgcgaccgtggcttttcccaaagtttctgactttgtggtttacccccttcaccttccagggacgcagttgttacgaggttagacgtggcagctctgtgcagtgtttgagcctacagtgggatacatagggtcaaattgagaataataaactgagtcattctcctggaaaaaaaaaaaaaaaaaactcgaggacgccgcgtgtacccggttgtcctcaggcgctgtcagtaccgtctgggcgccgctgtcctggggctctggttcgggccctggccggggttccctgacagcggcgggggaggcgggcgggcgcggggtggccgcggcccgggttcgggggatgctggctgagggggcgcgctgggcctcggccggggaacgagccccgcttcagcggcccgtttactctgcgggcggctcggacccgggcgccctggagtctccggccggcgcgcagcttcagggggcaggggcgtggcgacccacggcttgcaggccggagtcctggttccagcccagagcggccgacgggcgggcggcagggagaggctgaggatgtggcagccccgcctgccagaccgggcggagccgccgccccctgcgctcgcggcctgtggaggccaggactcggcccacccggcccagagaccccgaggcgccccggggttccgggtaggaggcctttgggcacccttggttcctggggttggcggggaggctgcgttctggggacgggggagctgtgcagtaaaccggtggccctggtcacgcggcgggggcgctgatgcagccttggagggctgggtcctcccggcctgctcctgcgccctgcagatcggcctgcccatcgctcccctcttccagcctatgattttttttctccagcctctgtcgaaataaagaaaattacggaagcagaaccttccttacagtaacgtgcagatctgtggtttttctacttgaaggacacaatgttttccaaactagcacatttgcagaggtttgctgtacttagtcgcggagttcattcttcagtggcttctgctacatctgttgcaactaaaaaaacagtccaaggccctccaacctctgatgacatttttgaaagggaatataagtatggtgcacacaactaccatcctttacctgtagccctggagagaggaaaaggtatttacttatgggatgtagaaggcagaaaatattttgacttcctgagttcttacagtgctgtcaaccaagggcattgtcaccccaagattgtgaatgctctgaagagtcaagtggacaaattgaccttaacatctagagctttctataataacgtacttggtgaatatgaggagtatattactaaacttttcaactaccacaaagttcttcctatgaatacaggagtggaggctggagagactgcctgtaaactagctcgtaagtggggctataccgtgaagggcattcagaaatacaaagcaaagattgtttttgcagctgggaacttctggggtaggacgttgtctgctatctccagttccacagacccaaccagttacgatggttttggaccatttatgccgggattcgacatcattccctataatgatctgcccgcactggagcgtgctcttcaggatccaaatgtggctgcgttcatggtagaaccaattcagggtgaagcaggcgttgttgttccggatccaggttacctaatgggagtgcgagagctctgcaccaggcaccaggttctctttattgctgatgaaatacagacaggattggccagaactggtagatggctggctgttgattatgaaaatgtcagacctgatatagtcctccttggaaaggccctttctgggggcttataccctgtgtctgcagtgctgtgtgatgatgacatcatgctgaccattaagccaggggagcatgggtccacatacggtggcaatccactaggctgccgagtggccatcgcagcccttgaggttttagaagaagaaaaccttgctgaaaatgcagacaaattgggcattatcttgagaaatgaactcatgaagctaccttctgatgttgtaactgccgtaagaggaaaaggattattaaacgctattgtcattaaagaaaccaaagattgggatgcttggaaggtgtgtctacgacttcgagataatggacttctggccaagccaacccatggcgacattatcaggtttgcgcctccgctggtgatcaaggaggatgagcttcgagagtccattgaaattattaacaagaccatcttgtctttctgagggtagccagctgttttcagtggtccctgggagccagctggagacaggtggtcctgtaaaagctttattcctaatgtgggcacattccactcccatgagtcttcaaaaactttttttttgaatatatttttttcagttgatacataatagaacaacgtttatgaacctgccgtttgctttgtaacgtaactaaataatgtaatggcatctatattcagttgaagtgttttgatgtgcatgtgtacttcctaaggtgaaatgcatctatatacagacagcctctaaatcaagtccttcagtataattgatatatgtttttataatttcctcactggtataagtgtttcatatttgaaaaagttatctctgggtattgcataaaaggcttcatcttataaagtgaaatcattgttattgaattttaggaaggattaatggttaagtgtatataaaatactaatattaagtaaacttcatattggccaacaccagggttgtattctatggatgtcattattttgaattaagaattagtgtttaacattcctaaattgttttgagtgcttgattataatttgtaaaaaatgtttattttcaatacttctttaaatttaaaataaagcttatatttcaaatgtc

SEQ ID NO: 312551 - DNA, 2559 bp, Homo sapiens
gtgattgagcccaagaaaccagggacttacgcatttggccaatgtcaaaagaacagaactttgcccactgcacacttgctgtgtacaatgactgagccctttcttgtagtttgtttccttgtttgagaggtgtgcatgcgaccgtggcttttcccaaagtttctgactttgtggtttacccccttcaccttccagggacgcagttgttacgaggttagacgtggcagctctgtgcagtgtttgagcctacagtgggatacatagggtcaaattgagaataataaactgagtcattctcctggaaaaaaaaaaaaaaaaaactcgaggacgccgcgtgtacccggttgtcctcaggcgctgtcagcgctttgtagcccaggctggagtgctggtggcacagatcgtggctcactgcagcccagaactcagggctcaagagatctttccaccttagtcttagtctcctaagtaccagatactacaggagattttggactctctgcagactgtccctggatcttgggttaaaaatctgtattctagactgaaccgtgggaagaaaaaatagtcaatctgtggtttttctacttgaaggacacaatgttttccaaactagcacatttgcagaggtttgctgtacttagtcgcggagttcattcttcagtggcttctgctacatctgttgcaactaaaaaaacagtccaaggccctccaacctctgatgacatttttgaaagggaatataagtatggtgcacacaactaccatcctttacctgtagccctggagagaggaaaaggtatttacttatgggatgtagaaggcagaaaatattttgacttcctgagttcttacagtgctgtcaaccaagggcattgtcaccccaagattgtgaatgctctgaagagtcaagtggacaaattgaccttaacatctagagctttctataataacgtacttggtgaatatgaggagtatattactaaacttttcaactaccacaaagttcttcctatgaatacaggagtggaggctggagagactgcctgtaaactagctcgtaagtggggctataccgtgaagggcattcagaaatacaaagcaaagattgtttttgcagctgggaacttctggggtaggacgttgtctgctatctccagttccacagacccaaccagttacgatggttttggaccatttatgccgggattcgacatcattccctataatgatctgcccgcactggagcgtgctcttcaggatccaaatgtggctgcgttcatggtagaaccaattcagggtgaagcaggcgttgttgttccggatccaggttacctaatgggagtgcgagagctctgcaccaggcaccaggttctctttattgctgatgaaatacagacaggattggccagaactggtagatggctggctgttgattatgaaaatgtcagacctgatatagtcctccttggaaaggccctttctgggggcttataccctgtgtctgcagtgctgtgtgatgatgacatcatgctgaccattaagccaggggagcatgggtccacatacggtggcaatccactaggctgccgagtggccatcgcagcccttgaggttttagaagaagaaaaccttgctgaaaatgcagacaaattgggcattatcttgagaaatgaactcatgaagctaccttctgatgttgtaactgccgtaagaggaaaaggattattaaacgctattgtcattaaagaaaccaaagattgggatgcttggaaggtgtgtctacgacttcgagataatggacttctggccaagccaacccatggcgacattatcaggtttgcgcctccgctggtgatcaaggaggatgagcttcgagagtccattgaaattattaacaagaccatcttgtctttctgagggtagccagctgttttcagtggtccctgggagccagctggagacaggtggtcctgtaaaagctttattcctaatgtgggcacattccactcccatgagtcttcaaaaactttttttttgaatatatttttttcagttgatacataatagaacaacgtttatgaacctgccgtttgctttgtaacgtaactaaataatgtaatggcatctatattcagttgaagtgttttgatgtgcatgtgtacttcctaaggtgaaatgcatctatatacagacagcctctaaatcaagtccttcagtataattgatatatgtttttataatttcctcactggtataagtgtttcatatttgaaaaagttatctctgggtattgcataaaaggcttcatcttataaagtgaaatcattgttattgaattttaggaaggattaatggttaagtgtatataaaatactaatattaagtaaacttcatattggccaacaccagggttgtattctatggatgtcattattttgaattaagaattagtgtttaacattcctaaattgttttgagtgcttgattataatttgtaaaaaatgtttattttcaatacttctttaaatttaaaataaagcttatatttcaaatgtc

SEQ ID NO: 312552 - DNA, 2124 bp, Homo sapiens
gtgattgagcccaagaaaccagggacttacgcatttggccaatgtcaaaagaacagaactttgcccactgcacacttgctgtgtacaatgactgagccctttcttgtagtttgtttccttgtttgagaggtgtgcatgcgaccgtggcttttcccaaagtttctgactttgtggtttacccccttcaccttccagggacgcagttgttacgaggttagacgtggcagctctgtgcagtgtttgagcctacagtgggatacatagggtcaaattgagaataataaactgagtcattctcctggaaaaaaaaaaaaaaaaaactcgaggacgccgcgtgtacccggttgtcctcaggcgctgtcaggtatttacttatgggatgtagaaggcagaaaatattttgacttcctgagttcttacagtgctgtcaaccaagggcattgtcaccccaagattgtgaatgctctgaagagtcaagtggacaaattgaccttaacatctagagctttctataataacgtacttggtgaatatgaggagtatattactaaacttttcaactaccacaaagttcttcctatgaatacaggagtggaggctggagagactgcctgtaaactagctcgtaagtggggctataccgtgaagggcattcagaaatacaaagcaaagattgtttttgcagctgggaacttctggggtaggacgttgtctgctatctccagttccacagacccaaccagttacgatggttttggaccatttatgccgggattcgacatcattccctataatgatctgcccgcactggagcgtgctcttcaggatccaaatgtggctgcgttcatggtagaaccaattcagggtgaagcaggcgttgttgttccggatccaggttacctaatgggagtgcgagagctctgcaccaggcaccaggttctctttattgctgatgaaatacagacaggattggccagaactggtagatggctggctgttgattatgaaaatgtcagacctgatatagtcctccttggaaaggccctttctgggggcttataccctgtgtctgcagtgctgtgtgatgatgacatcatgctgaccattaagccaggggagcatgggtccacatacggtggcaatccactaggctgccgagtggccatcgcagcccttgaggttttagaagaagaaaaccttgctgaaaatgcagacaaattgggcattatcttgagaaatgaactcatgaagctaccttctgatgttgtaactgccgtaagaggaaaaggattattaaacgctattgtcattaaagaaaccaaagattgggatgcttggaaggtgtgtctacgacttcgagataatggacttctggccaagccaacccatggcgacattatcaggtttgcgcctccgctggtgatcaaggaggatgagcttcgagagtccattgaaattattaacaagaccatcttgtctttctgagggtagccagctgttttcagtggtccctgggagccagctggagacaggtggtcctgtaaaagctttattcctaatgtgggcacattccactcccatgagtcttcaaaaactttttttttgaatatatttttttcagttgatacataatagaacaacgtttatgaacctgccgtttgctttgtaacgtaactaaataatgtaatggcatctatattcagttgaagtgttttgatgtgcatgtgtacttcctaaggtgaaatgcatctatatacagacagcctctaaatcaagtccttcagtataattgatatatgtttttataatttcctcactggtataagtgtttcatatttgaaaaagttatctctgggtattgcataaaaggcttcatcttataaagtgaaatcattgttattgaattttaggaaggattaatggttaagtgtatataaaatactaatattaagtaaacttcatattggccaacaccagggttgtattctatggatgtcattattttgaattaagaattagtgtttaacattcctaaattgttttgagtgcttgattataatttgtaaaaaatgtttattttcaatacttctttaaatttaaaataaagcttatatttcaaatgtc

SEQ ID NO: 312553 - DNA, 1469 bp, Homo sapiens
tacaaaaccctcacctttgcatcagcaccttttcactatgtagagcagggcagaatgggcctctagggagatagtggcctgacaaaggaaatagttggtgagtctacaagattcttataggatactcttgaaattgtgtgcagttaaaacatttttacaaatttgagggcacatcagaattacacatttattgttggtggggggacagtgaaataaggatggctattttccctgtggaaacgaaagtgatcactaataggggtattttttttccccaataggttctctttattgctgatgaaatacagacaggattggccagaactggtagatggctggctgttgattatgaaaatgtcagacctgatatagtcctccttggaaaggccctttctgggggcttataccctgtgtctgcagtgctgtgtgatgatgacatcatgctgaccattaagccaggggagcatgggtccacatacggtggcaatccactaggctgccgagtggccatcgcagcccttgaggttttagaagaagaaaaccttgctgaaaatgcagacaaattgggcattatcttgagaaatgaactcatgaagctaccttctgatgttgtaactgccgtaagaggaaaaggattattaaacgctattgtcattaaagaaaccaaagattgggatgcttggaaggtgtgtctacgacttcgagataatggacttctggccaagccaacccatggcgacattatcaggtttgcgcctccgctggtgatcaaggaggatgagcttcgagagtccattgaaattattaacaagaccatcttgtctttctgagggtagccagctgttttcagtggtccctgggagccagctggagacaggtggtcctgtaaaagctttattcctaatgtgggcacattccactcccatgagtcttcaaaaactttttttttgaatatatttttttcagttgatacataatagaacaacgtttatgaacctgccgtttgctttgtaacgtaactaaataatgtaatggcatctatattcagttgaagtgttttgatgtgcatgtgtacttcctaaggtgaaatgcatctatatacagacagcctctaaatcaagtccttcagtataattgatatatgtttttataatttcctcactggtataagtgtttcatatttgaaaaagttatctctgggtattgcataaaaggcttcatcttataaagtgaaatcattgttattgaattttaggaaggattaatggttaagtgtatataaaatactaatattaagtaaacttcatattggccaacaccagggttgtattctatggatgtcattattttgaattaagaattagtgtttaacattcctaaattgttttgagtgcttgattataatttgtaaaaaatgtttattttcaatacttctttaaatttaaaataaagcttatatttcaaatgtc

SEQ ID NO: 312554 - DNA, 997 bp, Homo sapiens
ttagtgccccccaccccccccgaagagcgacccctagtggtgcaccggtgcggaccagaaaattgcacgctttcttgaaacaggtattgactgagcgcccaatgtatgcctggcactgggctgggtgctgccacctaagcgagcacgaccaatgcaagtctatcagggacgccctgaccgccaagcagctggcccctgcagtccgccatgccactcccgacgcctagcgcgccgctcagcacaccgtgagcgcccactaactgttgggctccaatgacgccgaggaggcggccccgtccccgcgctcccgccgctcccgccagggcagcccgggaggccagacgctggcgctgcagggagagggcggtgggcgcatccgctagggggcgcggcggggcggggcgcacctttcggcgggcctcgcggatggcggcgcagggcgtagggcctgggccggggtcggcggcgcccccggggctggaggcggcccggcagaagctggcgctgcggcgcaagaaggtgctgagcaccgaggagatggagctgtacgagctggctcaggcggcgggcggcggtatcgaccccgacgtgttcaagatcctggtggacctgctgaagctgaacgtggcccccctcgccgtcttccagatgctcaagtccatgtgtgccgggcagaggctagcgagcgagccccaggaccctgcggccgtgtctctgcccacgtcgagcgtgcccgagacccgagggagagacaaaggcagcgctgccctcgggggagtattggccctggcggaacgcagcaaccacgagggatccagccagaggatgccacgccagcccagcgctaccaggctgcccaaggggggcgggcctgggaagagccctacgcagggcagcacctaggatggggcagagacttgtcacatctttgtccccagcaaaggctacatgttacctccttcagttgataataaacctttctgagatgcagagggtc

SEQ ID NO: 312555 - DNA, 224 bp, Homo sapiens
cagaggaggtggacagcacagaggaggggagctcctgggctctccctggctgccctggggtggggctgagcctcagttggagtcagagtctgaggagtcccctcctctgtgctgtcctggacagcaaagagatggggcagagacttgtcacatctttgtccccagcaaaggctacatgttacctccttcagttgataataaacctttctgagatgcagagggtc

SEQ ID NO: 312556 - DNA, 1063 bp, Homo sapiens
ttagtgccccccaccccccccgaagagcgacccctagtggtgcaccggtgcggaccagaaaattgcacgctttcttgaaacaggtattgactgagcgcccaatgtatgcctggcactgggctgggtgctgccacctaagcgagcacgaccaatgcaagtctatcagggacgccctgaccgccaagcagctggcccctgcagtccgccatgccactcccgacgcctagcgcgccgctcagcacaccgtgagcgcccactaactgttgggctccaatgacgccgaggaggcgggcctcgcggatggcggcgcagggcgtagggcctgggccggggtcggcggcgcccccggggctggaggcggcccggcagaagctggcgctgcggcgcaagaaggtgctgagcaccgaggagatggagctgtacgagctggctcaggcggcgggcggcggtatcgaccccgacgtgttcaagatcctggtggacctgctgaagctgaacgtggcccccctcgccgtcttccagatgctcaagtccatgtgtgccgggcagaggctagcgagcgagccccaggaccctgcggccgtgtctctgcccacgtcgagcgtgcccgagacccgagggagagacaaaggcagcgctgccctcgggggagtattggccctggcggaacgcagcaaccacgagggatccagccagaggatgccacgccagcccagcgctaccaggctgcccaaggggggcgggcctgggaagagccctacgcagggcagcacctaggatggggcagagacttgtcacatctttgtccccagcaaaggctacatgttacctccttcagttgataataaacctttctgagatgcagagggtccaggtcagatgctctctactgttttttttttttttttatattaaggcccccttagaatgaagtttctgggccggtcctggttgtgccacagtgaactaaccaggtcccttcaccatgggtcaacttcctgaacctgatttgggttctgaggaaaggtgtctggattgccaggtcttttataaatagacatca

SEQ ID NO: 312557 - DNA, 1017 bp, Homo sapiens
ttagtgccccccaccccccccgaagagcgacccctagtggtgcaccggtgcggaccagaaaattgcacgctttcttgaaacaggtattgactgagcgcccaatgtatgcctggcactgggctgggtgctgccacctaagcgagcacgaccaatgcaagtctatcagggacgccctgaccgccaagcagctggcccctgcagtccgccatgccactcccgacgcctagcgcgccgctcagcacaccgtgagcgcccactaactgttgggctccaatgacgccgaggaggcgggcctcgcggatggcggcgcagggcgtagggcctgggccggggtcggcggcgcccccggggctggaggcggcccggcagaagctggcgctgcggcgcaagaaggtgctgagcaccgaggagatggagctgtacgagctggctcaggcggcgggcggcggtatcgaccccgacgtgttcaagatcctggtggacctgctgaagctgaacgtggcccccctcgccgtcttccagatgctcaagtccatgtgtgccgggcagaggctagcgagcgagccccaggaccctgcggccgtgtctctgcccacgtcgagcgtgcccgagacccgagggagagacaaaggcagcgctgccctcgggggagtattggccctggcggaacgcagcaaccacgagggatccagccagaggatgccacgccagcccagcgctaccaggctgcccaaggggggcgggcctgggaagagccctacgcagggcagcacctaggatggggcagagacttgtcacatctttgtccccagcaaaggctacatgttacctccttcagttgataataaacctttctgagatgcagagggtcaacaacacacacacacccccaaacacaaacccgggggacaacggcggcgcgcgcacacaacggtcacacaggccacggcaaaggcccccaacccttcttggcaagcgggaaaaccggcccccaaagggcgacaccaacaccggacg

SEQ ID NO: 312558 - DNA, 1473 bp, Homo sapiens
ttagtgccccccaccccccccgaagagcgacccctagtggtgcaccggtgcggaccagaaaattgcacgctttcttgaaacaggtattgactgagcgcccaatgtatgcctggcactgggctgggtgctgccacctaagcgagcacgaccaatgcaagtctatcagggacgccctgaccgccaagcagctggcccctgcagtccgccatgccactcccgacgcctagcgcgccgctcagcacaccgtgagcgcccactaactgttgggctccaatgacgccgaggaggcggccccgtccccgcgctcccgccgctcccgccagggcagcccgggaggccagacgctggcgctgcagggagagggcggtgggcgcatccgctagggggcgcggcggggcggggcgcacctttcggcgggcctcgcggatggcggcgcagggcgtagggcctgggccggggtcggcggcgcccccggggctggaggcggcccggcagaagctggcgctgcggcgcaagaaggtgctgagcaccgaggagatggagctgtacgagctggctcaggcggcgggcggcggtatcgaccccgacgtgttcaagatcctggtggacctgctgaagctgaacgtggcccccctcgccgtcttccagatgctcaagtccatgtgtgccgggcagaggctagcgagcgagccccaggaccctgcggccgtgtctctgcccacgtcgagcgtgcccgagacccgaggcttgagtgacaacttgaggacaaggcggcgcctcaacaagatttcacacagcagctacgggggccagagaagcagcaccgcatggtgtggcaggagaaggaggacatgcacaagcaattggttgaagcttcagagacattgaaatcccaagccaaagaactgaaagatgcccatcagcagcaaaagctggccctgcaggagttcttggagctcaatgagctcatggcagagctctactcccagaagcagaaggtgtgggacaaggaggaggagatggaagtagccatgcagaaagctgacatgatgtggcaggagatctgaagatccaagaagctcagaaagaggatgctgtttagccagatgcggtggctcacgcctgtaatcccagcactttgggaggtcgaggcgggtggatggcctgaggtcaggagtttgagaccagcctggccaacatggtgaaaccctgtctctattaaaaatgcaaaaactaaccaggcatggtattgggtgcctgtaatcctagctacttgggaggctgaagcaggagaattgcttgaacctgggaggcggaggttgcagtgagccaagatcatgccactgcactccagcctgggcaacaagagcaaaactctgtctcaaaaaaaaaaaagggggggaggaagctatttagatatttcagcgatggtattgactggactttggtatgaccttaataaaacatctttga

SEQ ID NO: 312559 - DNA, 1132 bp, Homo sapiens
ttagtgccccccaccccccccgaagagcgacccctagtggtgcaccggtgcggaccagaaaattgcacgctttcttgaaacaggtattgactgagcgcccaatgtatgcctggcactgggctgggtgctgccacctaagcgagcacgaccaatgcaagtctatcagggacgccctgaccgccaagcagctggcccctgcagtccgccatgccactcccgacgcctagcgcgccgctcagcacaccgtgagcgcccactaactgttgggctccaatgacgccgaggaggcgggcctcgcggatggcggcgcagggcgtagggcctgggccggggtcggcggcgcccccggggctggaggcggcccggcagaagctggcgctgcggcgcaagaaggtgctgagcaccgaggagatggagctgtacgagctggctcaggcggcgggcggcggtatcgaccccgacgtgttcaagatcctggtggacctgctgaagctgaacgtggcccccctcgccgtcttccagatgctcaagtccatgtgtgccgggcagaggctagcgagcgagccccaggaccctgcggccgtgtctctgcccacgtcgagcgtgcccgagacccgagggagagacaaaggcagcgctgccctcgggggagtattggccctggcggaacgcagcaaccacgagggatccagccagaggatgccacgccagcccagcgctaccaggctgcccaaggggggcgggcctgggaagagccctacgcagggcagcacctaggatggggcagagacttgtcacatctttgtccccagcaaaggctacatgttacctccttcagttgataataaacctttctgagatgcagagggtcaaaaaaaaaaaaaaaaaaaaaaaaaaaaacttggggggcttcttatttcggggtgtggggaaaaaggggttagtgaagtgggccatgggccaaaaggggttttctggaccaagtttccttggtacccggggcgcacaattgcgcggggccccccatattaggaggcggattaaattgcaaaaacgcgaggttaccctgggttatgaacggccagcacggcaccagagaaaaccacacgcaggacaacagcagaggcccacc

SEQ ID NO: 312560 - DNA, 871 bp, Homo sapiens
ttagtgccccccaccccccccgaagagcgacccctagtggtgcaccggtgcggaccagaaaattgcacgctttcttgaaacaggtattgactgagcgcccaatgtatgcctggcactgggctgggtgctgccacctaagcgagcacgaccaatgcaagtctatcagggacgccctgaccgccaagcagctggcccctgcagtccgccatgccactcccgacgcctagcgcgccgctcagcacaccgtgagcgcccactaactgttgggctccaatgacgccgaggaggcgggcctcgcggatggcggcgcagggcgtagggcctgggccggggtcggcggcgcccccggggctggaggcggcccggcagaagctggcgctgcggcgcaagaaggtgctgagcaccgaggagatggagctgtacgagctggctcaggcggcgggcggcggtatcgaccccgacgtgttcaagatcctggtggacctgctgaagctgaacgtggcccccctcgccgtcttccagatgctcaagtccatgtgtgccgggcagaggctagcgagcgagccccaggaccctgcggccgtgtctctgcccacgtcgagcgtgcccgagacccgagggagagacaaaggcagcgctgccctcgggggagtattggccctggcggaacgcagcaaccacgagggatccagccagaggatgccacgccagcccagcgctaccaggctgcccaaggggggcgggcctgggaagagccctacgcagggcagcacctaggatggggcagagacttgtcacatctttgtccccagcaaaggctacatgttacctccttcagttgataataaacctttctgagatgcagagggtc

SEQ ID NO: 312561 - DNA, 1529 bp, Homo sapiens
ttagtgccccccaccccccccgaagagcgacccctagtggtgcaccggtgcggaccagaaaattgcacgctttcttgaaacaggtattgactgagcgcccaatgtatgcctggcactgggctgggtgctgccacctaagcgagcacgaccaatgcaagtctatcagggacgccctgaccgccaagcagctggcccctgcagtccgccatgccactcccgacgcctagcgcgccgctcagcacaccgtgagcgcccactaactgttgggctccaatgacgccgaggaggcgggcctcgcggatggcggcgcagggcgtagggcctgggccggggtcggcggcgcccccggggctggaggcggcccggcagaagctggcgctgcggcgcaagaaggtgctgagcaccgaggagatggagctgtacgagctggctcaggcggcgggcggcggtatcgaccccgacgtgttcaagtgagcggggcgggtgggggccgcatgctcgccagacacccccgacctctgctctccgggtacgcccggcccgctggtcgggaggagcccccgctgcccccgcccccgtccttgtccggtcttcagggaggtggccgcgccgggcggagagggctcaccggccccgcgtctgtccccgccaggatcctggtggacctgctgaagctgaacgtggcccccctcgccgtcttccagatgctcaagtccatgtgtgccgggcagaggctagcgagcgagccccaggaccctgcggccgtgtctctgcccacgtcgagcgtgcccgagacccgaggcttgagtgacaacttgaggacaaggcggcgcctcaacaagatttcacacagcagctacgggggccagagaagcagcaccgcatggtgtggcaggagaaggaggacatgcacaagcaattggttgaagcttcagagacattgaaatcccaagccaaagaactgaaagatgcccatcagcagcaaaagctggccctgcaggagttcttggagctcaatgagctcatggcagagctctactcccagaagcagaaggtgtgggacaaggaggaggagatggaagtagccatgcagaaagctgacatgatgtggcaggagatctgaagatccaagaagctcagaaagaggatgctgtttagccagatgcggtggctcacgcctgtaatcccagcactttgggaggtcgaggcgggtggatggcctgaggtcaggagtttgagaccagcctggccaacatggtgaaaccctgtctctattaaaaatgcaaaaactaaccaggcatggtattgggtgcctgtaatcctagctacttgggaggctgaagcaggagaattgcttgaacctgggaggcggaggttgcagtgagccaagatcatgccactgcactccagcctgggcaacaagagcaaaactctgtctcaaaaaaaaaaaagggggggaggaagctatttagatatttcagcgatggtattgactggactttggtatgaccttaataaaacatctttga

SEQ ID NO: 312562 - DNA, 302 bp, Homo sapiens
tggtttatttttttttaatagaaatataatgctgattatgaactctcagcaaaacaaggggcagatacattggcttatattgctctcctcgaagagaagcttctccctgcagtgcttcacacattctgggttgagagtgacaattactttactgtgacaaagccatggtttgcttcacaaattccttttcctttgagtttgatcctgcctggaagaatgtctaagggagcactgaataggattctcctgaccagaggacagcctcccctctaccacctccgagaagtggaagcacaggtata

SEQ ID NO: 312563 - DNA, 663 bp, Homo sapiens
cccatttaataccagctgccccaccattaaaatagtgattactggagaattagaagatgcaccatcattcatagacacttgggaactgacttcactttctcctatgaggacgtggcttgactggtgttaattggcctaaattctgttaaaacctgacaaatcttgccatcttcctaaaggtctgtacagtaagtgagtgtgtaagtttttcctgaatgtggtataagtcctgaatgtcagtggagaatattctagtgagaattatgcttatcctgatatggcaagatcctatctggtgaggacatagtcaccagcagctacatacccaatcagggactcttctattcctgcatctagtagctttctctttggcttccattcagtttcaagtatcaactaaataaaatggggacttgatctagcctctggtgtatgttttcattggtgtgtgttctccaataagccacgtataacctacttgaacactttagtggtacctgcctttttgtgtgctggggtgtactgaaatgttcctcatttccacatttccttttctgaaagataacttgagagtggatgaacaccatgactgctgatcttaatatcctcatcccttctccctgtcctgatgcataagggcaacctcaaatatttaactgtgtg

SEQ ID NO: 312564 - DNA, 1432 bp, Homo sapiens
tctccgcccctgcctcatccctagacctttccgactgggatggctaacctgttgtaagcccgcagctttgggcctggtctctgctgctcccaggcggcccctttgggtactgcctgagcaagaagtgctggagaggaggaccagtcatcaataggaggatgagattgggagagacactcggtgcaggaggctgagtgagcaggggagcactaagacccaggggtagtggaggactgcagcaacgagctggaggaggagaaggaaggcccggcgactgaagcaggcaaaggaggaggcacagatggaggtggagcaataccgcagagagcgagagcacgaattccagagcaagcagcaggcggccatgggctcccaggggaacctgtctgctgaggtggagcaggctacaaggcgccaggtgcagggcatgcagagctcccagcagagaaaccgagagcgtgtcctggcccagcttcttggcatggtctgcgacgtcaggccccaggtccaccccaactaccggatttctgcctagggccaccgtagggcctgactccttctgccagttccctccctcaaagaaatcctccaatcaaaatcacctcccaccataatccctgtcttctttccatcccctagaaatcctgggaggcaggatccaataattttcctgtgacacttataaatatcctgctcacatctgaatctccttgttgttctttaaccctcactgggactttgtaaacttccaagtcattctcacctaaaccctctgtgaaatttgtaatatggggaagtaggaatgtggaaaacatcctgacttcagtgtctggccgatgtgggtccctctcttgaccctgtcacttgctggctgtgaaaccaggacaagctacttaacttggtagcctcgatgtcctcctctgtgaaactgggatgataataatgcctaccttgtgagggttgcttcaatgattaggaatcattctgtaaagtctagcacagttccttgcatgttgtagcagtgattcagtaagtagcaaccctgtgatactattaccaccacctgctcactggtcaaaacctacacagctgtttcctcacgtccatcactggctctctaattccacttgttcattctgtgaccctagttattttctgaaaaattggttcttctcttttcccagagaccttctgatctccaaaaagaggagatgactacatttagcccctctcttataattccaggtagataactgcattttgtagcctctctttgtttttcttttgctgatctttgtctttattagattttcctcctttcctatttccccaaagacttatcagatgctcattgctttctaagatctaaaatgatactgtgttccctcatatgcatgcccttcctttctatatccttgacaccttactttcc

SEQ ID NO: 312565 - DNA, 419 bp, Homo sapiens
ggacagcccccaccccatggctgtcaggcgtgggggcagtagtgtctccttcacccctgacagcccccaccccatggcttccatcttttgcatcaccaccactcctgaacccccatttctgatttgtcagaatttttttttaacaaaactaaaaatgaaacacatgtgtctgtggtatctataaaaaaaaaaaaaaaaaaaaacttggagggccttttttgtgggggtgggggaaaaagggggtaactgcacaagtgtggccccagtggctccctacgcccgttttccccgtgaacccaaagctttccttggtcaccactgactgggtaaaaatctggccgggtcctctcccttattaggaactcggatttaactttcgaataaggccagggttacccctggcattatggaatcggcaa

SEQ ID NO: 312566 - DNA, 3692 bp, Homo sapiens
catcggccataacaacagaaatggccagtcagtcccaaggtatccagcagcttctgcaagctgagaagcgggcagctgagaaggtggcagatgccagaaagaggaaggcccggcgactgaagcaggcaaaggaggaggcacagatggaggtggagcaataccgcagagagcgagagcacgaattccagagcaagcagcaggcgacaggcattttccaaaggcaagcctggagcgcacggatctgtataaccgcggaaggccctgtttccggtcccttgcgcctgcgctcttgcagccaagaaggcgggaggctggagtagagggaagcctgcaaccggaagtgaaggcagatttccctccttcgtcgctgttgctgccgccatacgcgctctccctgtttaggtaagctttggccttcgctacaatccgtttccatctgcgcttctccgcacccatcccgtcacatgggttcctgatacccttttcacaggcgatggtctggtcgctggggcctagttggttcgctatttccttagcttgcatccctttcgagagcaaagagctcctgggggaaggaagggaagctaaggggggacccaatccaagatggtgtcctcggcgccattgtgttcgttttgctcccttcttccaatgggttcttctcatattggaggcctcagcatcaatgagaggcggtgctcggcgtcccttggtcttggtatttgcggagggcggggctcttctcaccttccttgttctttcttgagctctttttcggccctcggtgggactgggaggaggagctggtttctgggcccagttggatttttctcaccttgacttgcccaacttaatttggagtgccttccaagtgtttacgatacgattggtgtcattgtatgtttctccaaaaggagtctcaccttcgtagcgtaacagtgatgtgagaccacttggtaaagatcctgttaaagcctgggcggggattgcctttctctgtcacctattagctttcttattgtagggtggagacatgaattttgtttttttgtggccgagccatttgtcttgcaccgcccctcccccccatgctaattacacaaggcttgcttaaacagcggaagggaggatactgagaagtgggaggctgagagctatgggaggtggacggcggccatatgatgttttcttttcgaaaggtgagcgctttgcgcagtgatgaccctcatctatcacccttgactgatggctgctgagttaggcatccataacggtgggattataatagggaaagcggagtcttcctttgaggacttttcaggactctacttgtcatctccattttccactttactaagttattagtcatattttaccttttattatctattctatttcctcactgttactttcagatcaagaatttataagttggtcttccccttccaacttttctggtttccgctactgtgattgctaatcttgttgggaacctctgtcctaaccactttccctggtactgctttttctgttctgttatatttgcttttcgtttttatgttttgtatctgtttttctttccaggtaaaagtttcctggtttagggaaagtgggaactggggatggctcttctgttagaaatagtatctttgttttcctttgctgttcctcaatcccctactcttcaccccttgttttcacctattttgcgagaacccatccagatcccccttcccttcttcccctgccggcccagttatggcagagaacgatgtggacaatgagctcttggactatgaagatgatgaggtggagacagcagctgggggagatggggctgaggcccctgccaagaaggatgtcaagggctcctatgtctccatccacagctctggctttcgtgacttcctgctcaagccagagttgctccgggccattgtcgactgtggctttgagcatccgtcagaagtccagcatgagtgcatccctcaggccattctgggaatggatgtcctgtgccaggccaagtcgggcatgggaaagacagcagtgtttgtcttggccacactgcaacagctggagccagttactgggcaggtgtctgtgctggtgatgtgtcacactcgggagttggcttttcagatcagcaaggaatatgagcgcttctctaaatacatgcccaatgtcaaggttgctgttttttttggtggtctgtctatcaagaaggatgaagaggtgctgaagaagaactgcccgcatatcgtcgtggggactccaggccgtatcctagccctggctcgaaataagagcctcaacctcaaacacattaaacactttattttggatgaatgtgataagatgcttgaacagctcgacatgcgtcgggatgtccaggaaatttttcgcatgaccccccacgagaagcaggtcatgatgttcagtgctaccttgagcaaagagatccgtccagtctgccgcaagttcatgcaagatccaatggagatcttcgtggatgatgagacgaagttgacgctgcatgggttgcagcagtactacgtgaaactgaaggacaacgagaagaaccggaagctctttgaccttctggatgtccttgagttcaaccaggtggtgatctttgtgaagtctgtgcagcggtgcattgccttggcccagctactagtggagcagaacttcccagccattgccatccaccgtgggatgccccaggaggagaggctttctcggtatcagcagtttaaagattttcaacgacgaattcttgtggctaccaacctatttggccgaggcatggacatcgagcgggtgaacattgcttttaattatgacatgcctgaggattctgacacctacctgcatcgggtggccagagcaggccggtttggcaccaagggcttggctatcacatttgtgtccgatgagaatgatgccaagatcctcaatgatgtgcaggatcgctttgaggtcaatattagtgagctgcctgatgagatagacatctcctcctacattgaacagacacggtagaagactcgcccattttggaatgtgaccgtctgtccttcaggagaggacaccagggtgggggtgaaggagacactactgcccccacccctgacagcccccaccccatggcttccatcttttgcatcaccaccactcctgaacccccatttctgatttgtcagaatttttttttaacaaaactaaaaatgaaacacatgtgtctgtggtatctataagtgcttcgtccctttattgtatttggggtgaggttattttagggcatggtccagggtgaattcctataaggcctgggtgccctgcctgctgtgagatcaaaggggaatgggactaagactgcagagccctggctcccccactgcctgccaattgcctgcggtttgtggtctcttccactttctctggcctgggaagacgctggggtgtttatgatcccaaggctcctggtgggtggtgcgtgtattttcagtgccggagggtgctgtgggcactgggggaaacttaggcacctcctccaaggctctcttggtgcctcctcatctgttccttcagcttctggatcttgagcaccagggcttgggcctcccaggctccctcctgcccttcaaggagggcctggtacagctccagctgctgctccaacaactctt

SEQ ID NO: 312567 - DNA, 3265 bp, Homo sapiens
catcggccataacaacagaaatggccagtcagtcccaaggtatccagcagcttctgcaagctgagaagcgggcagctgagaaggtggcagatgccagaaagaggaaggcccggcgactgaagcaggcaaaggaggaggcacagatggaggtggagcaataccgcagagagcgagagcacgaattccagagcaagcagcaggcgacaggcattttccaaaggcaagcctggagcgcacggatctgtataaccgcggaaggccctgtttccggtcccttgcgcctgcgctcttgcagccaagaaggcgggaggctggagtagagggaagcctgcaaccggaagtgaaggcagatttccctccttcgtcgctgttgctgccgccatacgcgctctccctgtttaggtaagctttggccttcgctacaatccgtttccatctgcgcttctccgcacccatcccgtcacatgggttcctgatacccttttcacaggcgatggtctggtcgctggggcctagttggttcgctatttccttagcttgcatccctttcgagagcaaagagctcctgggggaaggaagggaagctaaggggggacccaatccaagatggtgtcctcggcgccattgtgttcgttttgctcccttcttccaatgggttcttctcatattggaggcctcagcatcaatgagaggcggtgctcggcgtcccttggtcttggtatttgcggagggcggggctcttctcaccttccttgttctttcttgagctctttttcggccctcggtgggactgggaggaggagctggtttctgggcccagttggatttttctcaccttgacttgcccaacttaatttggagtgccttccaagtgtttacgatacgattggtgtcattgtatgtttctccaaaaggagtctcaccttcgtagcgtaacagtgatgtgagaccacttggtaaagatcctgttaaagcctgggcggggattgcctttctctgtcacctattagctttcttattgtagggtggagacatgaattttgtttttttgtggccgagccatttgtcttgcaccgcccctcccccccatgctaattacacaaggcttgcttaaacagcggaagggaggatactgagaagtgggaggctgagagctatgggaggtggacggcggccatatgatgttttcttttcgaaagctcttctgttagaaatagtatctttgttttcctttgctgttcctcaatcccctactcttcaccccttgttttcacctattttgcgagaacccatccagatcccccttcccttcttcccctgccggcccagttatggcagagaacgatgtggacaatgagctcttggactatgaagatgatgaggtggagacagcagctgggggagatggggctgaggcccctgccaagaaggatgtcaagggctcctatgtctccatccacagctctggctttcgtgacttcctgctcaagccagagttgctccgggccattgtcgactgtggctttgagcatccgtcagaagtccagcatgagtgcatccctcaggccattctgggaatggatgtcctgtgccaggccaagtcgggcatgggaaagacagcagtgtttgtcttggccacactgcaacagctggagccagttactgggcaggtgtctgtgctggtgatgtgtcacactcgggagttggcttttcagatcagcaaggaatatgagcgcttctctaaatacatgcccaatgtcaaggttgctgttttttttggtggtctgtctatcaagaaggatgaagaggtgctgaagaagaactgcccgcatatcgtcgtggggactccaggccgtatcctagccctggctcgaaataagagcctcaacctcaaacacattaaacactttattttggatgaatgtgataagatgcttgaacagctcgacatgcgtcgggatgtccaggaaatttttcgcatgaccccccacgagaagcaggtcatgatgttcagtgctaccttgagcaaagagatccgtccagtctgccgcaagttcatgcaagatccaatggagatcttcgtggatgatgagacgaagttgacgctgcatgggttgcagcagtactacgtgaaactgaaggacaacgagaagaaccggaagctctttgaccttctggatgtccttgagttcaaccaggtggtgatctttgtgaagtctgtgcagcggtgcattgccttggcccagctactagtggagcagaacttcccagccattgccatccaccgtgggatgccccaggaggagaggctttctcggtatcagcagtttaaagattttcaacgacgaattcttgtggctaccaacctatttggccgaggcatggacatcgagcgggtgaacattgcttttaattatgacatgcctgaggattctgacacctacctgcatcgggtggccagagcaggccggtttggcaccaagggcttggctatcacatttgtgtccgatgagaatgatgccaagatcctcaatgatgtgcaggatcgctttgaggtcaatattagtgagctgcctgatgagatagacatctcctcctacattgaacagacacggtagaagactcgcccattttggaatgtgaccgtctgtccttcaggagaggacaccagggtgggggtgaaggagacactactgcccccacccctgacagcccccaccccatggcttccatcttttgcatcaccaccactcctgaacccccatttctgatttgtcagaatttttttttaacaaaactaaaaatgaaacacatgtgtctgtggtatctataagtgcttcgtccctttattgtatttggggtgaggttattttagggcatggtccagggtgaattcctataaggcctgggtgccctgcctgctgtgagatcaaaggggaatgggactaagactgcagagccctggctcccccactgcctgccaattgcctgcggtttgtggtctcttccactttctctggcctgggaagacgctggggtgtttatgatcccaaggctcctggtgggtggtgcgtgtattttcagtgccggagggtgctgtgggcactgggggaaacttaggcacctcctccaaggctctcttggtgcctcctcatctgttccttcagcttctggatcttgagcaccagggcttgggcctcccaggctccctcctgcccttcaaggagggcctggtacagctccagctgctgctccaacaactctt

SEQ ID NO: 312568 - DNA, 3022 bp, Homo sapiens
catcggccataacaacagaaatggccagtcagtcccaaggtatccagcagcttctgcaagctgagaagcgggcagctgagaaggtggcagatgccagaaagaggaaggcccggcgactgaagcaggcaaaggaggaggcacagatggaggtggagcaataccgcagagagcgagagcacgaattccagagcaagcagcaggcgacaggcattttccaaaggcaagcctggagcgcacggatctgtataaccgcggaaggccctgtttccggtcccttgcgcctgcgctcttgcagccaagaaggcgggaggctggagtagagggaagcctgcaaccggaagtgaaggcagatttccctccttcgtcgctgttgctgccgccatacgcgctctccctgtttaggtaagctttggccttcgctacaatccgtttccatctgcgcttctccgcacccatcccgtcacatgggttcctgatacccttttcacaggcgatggtctggtcgctggggcctagttggttcgctatttccttagcttgcatccctttcgagagcaaagagctcctgggggaaggaagggaagctaaggggggacccaatccaagatggtgtcctcggcgccattgtgttcgttttgctcccttcttccaatgggttcttctcatattggaggcctcagcatcaatgagaggcggtgctcggcgtcccttggtcttggtatttgcggagggcggggctcttctcaccttccttgttctttcttgagctctttttcggccctcggtgggactgggaggaggagctggtttctgggcccagttggatttttctcaccttgacttgcccaacttaatttggagtgccttccaagtgtttacgatacgattggtgtcattgtatgtttctccaaaaggagtctcaccttcgtagcgtaacagtgatgtgagaccacttgctcttctgttagaaatagtatctttgttttcctttgctgttcctcaatcccctactcttcaccccttgttttcacctattttgcgagaacccatccagatcccccttcccttcttcccctgccggcccagttatggcagagaacgatgtggacaatgagctcttggactatgaagatgatgaggtggagacagcagctgggggagatggggctgaggcccctgccaagaaggatgtcaagggctcctatgtctccatccacagctctggctttcgtgacttcctgctcaagccagagttgctccgggccattgtcgactgtggctttgagcatccgtcagaagtccagcatgagtgcatccctcaggccattctgggaatggatgtcctgtgccaggccaagtcgggcatgggaaagacagcagtgtttgtcttggccacactgcaacagctggagccagttactgggcaggtgtctgtgctggtgatgtgtcacactcgggagttggcttttcagatcagcaaggaatatgagcgcttctctaaatacatgcccaatgtcaaggttgctgttttttttggtggtctgtctatcaagaaggatgaagaggtgctgaagaagaactgcccgcatatcgtcgtggggactccaggccgtatcctagccctggctcgaaataagagcctcaacctcaaacacattaaacactttattttggatgaatgtgataagatgcttgaacagctcgacatgcgtcgggatgtccaggaaatttttcgcatgaccccccacgagaagcaggtcatgatgttcagtgctaccttgagcaaagagatccgtccagtctgccgcaagttcatgcaagatccaatggagatcttcgtggatgatgagacgaagttgacgctgcatgggttgcagcagtactacgtgaaactgaaggacaacgagaagaaccggaagctctttgaccttctggatgtccttgagttcaaccaggtggtgatctttgtgaagtctgtgcagcggtgcattgccttggcccagctactagtggagcagaacttcccagccattgccatccaccgtgggatgccccaggaggagaggctttctcggtatcagcagtttaaagattttcaacgacgaattcttgtggctaccaacctatttggccgaggcatggacatcgagcgggtgaacattgcttttaattatgacatgcctgaggattctgacacctacctgcatcgggtggccagagcaggccggtttggcaccaagggcttggctatcacatttgtgtccgatgagaatgatgccaagatcctcaatgatgtgcaggatcgctttgaggtcaatattagtgagctgcctgatgagatagacatctcctcctacattgaacagacacggtagaagactcgcccattttggaatgtgaccgtctgtccttcaggagaggacaccagggtgggggtgaaggagacactactgcccccacccctgacagcccccaccccatggcttccatcttttgcatcaccaccactcctgaacccccatttctgatttgtcagaatttttttttaacaaaactaaaaatgaaacacatgtgtctgtggtatctataagtgcttcgtccctttattgtatttggggtgaggttattttagggcatggtccagggtgaattcctataaggcctgggtgccctgcctgctgtgagatcaaaggggaatgggactaagactgcagagccctggctcccccactgcctgccaattgcctgcggtttgtggtctcttccactttctctggcctgggaagacgctggggtgtttatgatcccaaggctcctggtgggtggtgcgtgtattttcagtgccggagggtgctgtgggcactgggggaaacttaggcacctcctccaaggctctcttggtgcctcctcatctgttccttcagcttctggatcttgagcaccagggcttgggcctcccaggctccctcctgcccttcaaggagggcctggtacagctccagctgctgctccaacaactctt

SEQ ID NO: 312569 - DNA, 5066 bp, Homo sapiens
catcggccataacaacagaaatggccagtcagtcccaaggtatccagcagcttctgcaagctgagaagcgggcagctgagaaggtggcagatgccagaaagaggaaggcccggcgactgaagcaggcaaaggaggaggcacagatggaggtggagcaataccgcagagagcgagagcacgaattccagagcaagcagcaggcgacaggcattttccaaaggcaagcctggagcgcacggatctgtataaccgcggaaggccctgtttccggtcccttgcgcctgcgctcttgcagccaagaaggcgggaggctggagtagagggaagcctgcaaccggaagtgaaggcagatttccctccttcgtcgctgttgctgccgccatacgcgctctccctgtttaggtaagctttggccttcgctacaatccgtttccatctgcgcttctccgcacccatcccgtcacatgggttcctgatacccttttcacaggcgatggtctggtcgctggggcctagttggttcgctatttccttagcttgcatccctttcgagagcaaagagctcctgggggaaggaagggaagctaaggggggacccaatccaagatggtgtcctcggcgccattgtgttcgttttgctcccttcttccaatgggttcttctcatattggaggcctcagcatcaatgagaggcggtgctcggcgtcccttggtcttggtatttgcggagggcggggctcttctcaccttccttgttctttcttgagctctttttcggccctcggtgggactgggaggaggagctggtttctgggcccagttggatttttctcaccttgacttgcccaacttaatttggagtgccttccaagtgtttacgatacgattggtgtcattgtatgtttctccaaaaggagtctcaccttcgtagcgtaacagtgatgtgagaccacttggtaaagatcctgttaaagcctgggcggggattgcctttctctgtcacctattagctttcttattgtagggtggagacatgaattttgtttttttgtggccgagccatttgtcttgcaccgcccctcccccccatgctaattacacaaggcttgcttaaacagcggaagggaggatactgagaagtgggaggctgagagctatgggaggtggacggcggccatatgatgttttcttttcgaaaggtgagcgctttgcgcagtgatgaccctcatctatcacccttgactgatggctgctgagttaggcatccataacggtgggattataatagggaaagcggagtcttcctttgaggacttttcaggactctacttgtcatctccattttccactttactaagttattagtcatattttaccttttattatctattctatttcctcactgttactttcagatcaagaatttataagttggtcttccccttccaacttttctggtttccgctactgtgattgctaatcttgttgggaacctctgtcctaaccactttccctggtactgctttttctgttctgttatatttgcttttcgtttttatgttttgtatctgtttttctttccaggtaaaagtttcctggtttagggaaagtgggaactggggatggctcttctgttagaaatagtatctttgttttcctttgctgttcctcaatcccctactcttcaccccttgttttcacctattttgcgagaacccatccagatcccccttcccttcttcccctgccggcccagttatggcagagaacgatgtggacaatgagctcttggactatgaagatgatgaggtggagacagcagctgggggagatggggctgaggcccctgccaagaaggatgtcaagggctcctatgtctccatccacagctctggctttcgtgacttcctgctcaagccagagttgctccgggccattgtcgactgtggctttgagcatccgtcagaagtccagcatgagtgcatccctcaggccattctgggaatggatgtcctgtgccaggccaagtcgggcatgggaaagacagcagtgtttgtcttggccacactgcaacagctggagccagttactgggcaggtgtctgtgctggtgatgtgtcacactcgggagttggcttttcagatcagcaaggaatatgagcgcttctctaaatacatgcccaatgtcaaggttgctgttttttttggtggtctgtctatcaagaaggatgaagaggtgctgaagaagaactgcccgcatatcgtcgtggggactccaggccgtatcctagccctggctcgaaataagagcctcaacctcaaacacattaaacactttattttggatgaatgtgataagatgcttgaacagctcgacatgcgtcgggatgtccaggaaatttttcgcatgaccccccacgagaagcaggtcatgatgttcagtgctaccttgagcaaagagatccgtccagtctgccgcaagttcatgcaagatccaatggagatcttcgtggatgatgagacgaagttgacgctgcatgggttgcagcagtactacgtgaaactgaaggacaacgagaagaaccggaagctctttgaccttctggatgtccttgagttcaaccaggtcagttagacgtccagtagggggatgagcattggagcactccagctgtagcagaaacctggatattaagtacacttttattgaggaaatcacatgtgtgatgtgggagagaataatgagggtataaatatcttaggggctgagcatgagtaaggtgggagctgcttttctattctatggctggcacgggtatgtcctcaataacctcaaggaaaataaacttcaaaaattaagatccttggccaggcacggtggcttatgtgtgtaatcccagcacttggggaggctgagggaggtggatcacttgagtccaggagtttgagaccagtctgggcaacatggcgaaacttcatcactaccaaagaagaaaaaaattagccaggtgtggtggtgtatgcctgtagtcccagatactctggtggctgaggtgagaggatagcttgagcccaggaaattgaggctgcagtgaactatgattgcactactgtgctccagcttgggcaacagagtgagatcttgtctccaaaagtccttgaaggattttaggaagttgttaaaagtcttgaaacgatgtttgggggcatgttagggttcttgaatgtttaattcctctaataactgcttattcaagagaagcatttctgactgggtgcagggcagtggctcatgcccataatcccagtactttgggaggctgaggcaggagcattgcttgagcccaggacttcaagaccagcctgggtaacatagggagacgcccgtctctacaaatagtaaaaataaaaaataaaaaaagtagctgggcgtggtggtgtgcacctgtggtcccagctgcttgggatgctgaggtggaaggatctcttaaacccaggagggtggaggctgcagtgacttgcgattgcaccactgcactccagtctgggggacagagtgagaccccatctcaaaaaagtgtttaattaatatacttgtgagtggtctatttgcatttaaaactgctttctagaattaggatagctcccttaggtttaatgttttggtgagcaggaatatcagttacccctccagatcttaattctagttttttatcactttttcatgaggtgatctcatcctcatctcctagcatgtctggcaattttgatttctgaactctgtgctacctcagaggccagcttccttagggaaaaatcagtgctgaaataaagttatatttccttttctgctctaaatatatagtgggggaataagagaaatgaagaggaattcctgagaacgtaattactagaaactcccctctcccacgtaatgtctctcacacaccatggacccctattcccccaatttgcgaccccccaccccaccccacaacaggtggtgatctttgtgaagtctgtgcagcggtgcattgccttggcccagctactagtggagcagaacttcccagccattgccatccaccgtgggatgccccaggaggagaggctttctcggtatcagcagtttaaagattttcaacgacgaattcttgtggctaccaacctatttggccgaggcatggacatcgagcgggtgaacattgcttttaattatgacatgcctgaggattctgacacctacctgcatcgggtggccagagcaggccggtttggcaccaagggcttggctatcacatttgtgtccgatgagaatgatgccaagatcctcaatgatgtgcaggatcgctttgaggtcaatattagtgagctgcctgatgagatagacatctcctcctacattgaacagacacggtagaagactcgcccattttggaatgtgaccgtctgtccttcaggagaggacaccagggtgggggtgaaggagacactactgcccccacccctgacagcccccaccccatggcttccatcttttgcatcaccaccactcctgaacccccatttctgatttgtcagaatttttttttaacaaaactaaaaatgaaacacatgtgtctgtggtatctataagtgcttcgtccctttattgtatttggggtgaggttattttagggcatggtccagggtgaattcctataaggcctgggtgccctgcctgctgtgagatcaaaggggaatgggactaagactgcagagccctggctcccccactgcctgccaattgcctgcggtttgtggtctcttccactttctctggcctgggaagacgctggggtgtttatgatcccaaggctcctggtgggtggtgcgtgtattttcagtgccggagggtgctgtgggcactgggggaaacttaggcacctcctccaaggctctcttggtgcctcctcatctgttccttcagcttctggatcttgagcaccagggcttgggcctcccaggctccctcctgcccttcaaggagggcctggtacagctccagctgctgctccaacaactctt

SEQ ID NO: 312570 - DNA, 5946 bp, Homo sapiens
catcggccataacaacagaaatggccagtcagtcccaaggtatccagcagcttctgcaagctgagaagcgggcagctgagaaggtggcagatgccagaaagaggaaggcccggcgactgaagcaggcaaaggaggaggcacagatggaggtggagcaataccgcagagagcgagagcacgaattccagagcaagcagcaggcgacaggcattttccaaaggcaagcctggagcgcacggatctgtataaccgcggaaggccctgtttccggtcccttgcgcctgcgctcttgcagccaagaaggcgggaggctggagtagagggaagcctgcaaccggaagtgaaggcagatttccctccttcgtcgctgttgctgccgccatacgcgctctccctgtttaggtaagctttggccttcgctacaatccgtttccatctgcgcttctccgcacccatcccgtcacatgggttcctgatacccttttcacaggcgatggtctggtcgctggggcctagttggttcgctatttccttagcttgcatccctttcgagagcaaagagctcctgggggaaggaagggaagctaaggggggacccaatccaagatggtgtcctcggcgccattgtgttcgttttgctcccttcttccaatgggttcttctcatattggaggcctcagcatcaatgagaggcggtgctcggcgtcccttggtcttggtatttgcggagggcggggctcttctcaccttccttgttctttcttgagctctttttcggccctcggtgggactgggaggaggagctggtttctgggcccagttggatttttctcaccttgacttgcccaacttaatttggagtgccttccaagtgtttacgatacgattggtgtcattgtatgtttctccaaaaggagtctcaccttcgtagcgtaacagtgatgtgagaccacttggtaaagatcctgttaaagcctgggcggggattgcctttctctgtcacctattagctttcttattgtagggtggagacatgaattttgtttttttgtggccgagccatttgtcttgcaccgcccctcccccccatgctaattacacaaggcttgcttaaacagcggaagggaggatactgagaagtgggaggctgagagctatgggaggtggacggcggccatatgatgttttcttttcgaaaggtgagcgctttgcgcagtgatgaccctcatctatcacccttgactgatggctgctgagttaggcatccataacggtgggattataatagggaaagcggagtcttcctttgaggacttttcaggactctacttgtcatctccattttccactttactaagttattagtcatattttaccttttattatctattctatttcctcactgttactttcagatcaagaatttataagttggtcttccccttccaacttttctggtttccgctactgtgattgctaatcttgttgggaacctctgtcctaaccactttccctggtactgctttttctgttctgttatatttgcttttcgtttttatgttttgtatctgtttttctttccaggtaaaagtttcctggtttagggaaagtgggaactggggatggctcttctgttagaaatagtatctttgttttcctttgctgttcctcaatcccctactcttcaccccttgttttcacctattttgcgagaacccatccagatcccccttcccttcttcccctgccggcccagttatggcagagaacgatgtggacaatgagctcttggactatgaagatgatgaggtggagacagcagctgggggagatggggctgaggcccctgccaagaaggatgtcaagggctcctatgtctccatccacagctctggctttcgtgacttcctgctcaagccagagttgctccgggccattgtcgactgtggctttgagcatccgtcagaagtccagcatgagtgcatccctcaggccattctgggaatggatgtcctgtgccaggccaagtcgggcatgggaaagacagcagtgtttgtcttggccacactgcaacagctggagccagttactgggcaggtgtctgtgctggtgatgtgtcacactcgggagttggcttttcagatcagcaaggaatatgagcgcttctctaaatacatgcccaatgtcaaggttgctgttttttttggtggtctgtctatcaagaaggatgaagaggtgctgaagaagaactgcccgcatatcgtcgtggggactccaggccgtatcctagccctggctcgaaataagagcctcaacctcaaacacattaaacactttattttggatgaatgtgataagatgcttgaacagctcgacatgcgtcgggatgtccaggaaatttttcgcatgaccccccacgagaagcaggtcatgatgttcagtgctaccttgagcaaagagatccgtccagtctgccgcaagttcatgcaagattaaatacccttctaccttctctccctccactccccgcccgctgcctcctccccttcctcgccctcttcctcagactcccttgtcattcaagtgccaagaaggcggcttgtgcccaactgggagtaatgactccttgaagagacatacagaagcagagacagctagtgttagggcctgcgcgggtgccagggaaactccggaagacttggtcgggttaatgtgagagcgggtagtgttcgactttttcataaatcacaacatttttgaacctcttctcccttcgggggagggcaggatttttctgccctaccacccacccatccatcgtctcttacatgcaccctacagccacgcaccctcaaggtggcatcgagcatacagctggagccttctgctcaccaaaactcctacttcccggtggcaggagagcaagagagggacagacagatggcagggcatgtccaaaagaagagcatcagcacaaatgaatcctccccttccccacctccaggggtgggggcctttggcacctcaatccccgataccctactccttcccacccacatctccttgcacccatctggaacctcggttgatgtgagccggcaacagagaagcaccgtggcgcggcgagggaatgcagacggcacccagcggtggatggcggcagcggaggccgcggggaaacctgaccaggaagctgaggaccaaaccagcctctttttccgttcccggtttttttcctgaacccaacgcgtgccgtgccccgtttcccccaatatgtgttggggaggggtgtcctgaatggggtggtagattttttttcttaaaaaaatttttttgttttttttaatactcagaggagagggacataggaaagccaatggagatcttcgtggatgatgagacgaagttgacgctgcatgggttgcagcagtactacgtgaaactgaaggacaacgagaagaaccggaagctctttgaccttctggatgtccttgagttcaaccaggtcagttagacgtccagtagggggatgagcattggagcactccagctgtagcagaaacctggatattaagtacacttttattgaggaaatcacatgtgtgatgtgggagagaataatgagggtataaatatcttaggggctgagcatgagtaaggtgggagctgcttttctattctatggctggcacgggtatgtcctcaataacctcaaggaaaataaacttcaaaaattaagatccttggccaggcacggtggcttatgtgtgtaatcccagcacttggggaggctgagggaggtggatcacttgagtccaggagtttgagaccagtctgggcaacatggcgaaacttcatcactaccaaagaagaaaaaaattagccaggtgtggtggtgtatgcctgtagtcccagatactctggtggctgaggtgagaggatagcttgagcccaggaaattgaggctgcagtgaactatgattgcactactgtgctccagcttgggcaacagagtgagatcttgtctccaaaagtccttgaaggattttaggaagttgttaaaagtcttgaaacgatgtttgggggcatgttagggttcttgaatgtttaattcctctaataactgcttattcaagagaagcatttctgactgggtgcagggcagtggctcatgcccataatcccagtactttgggaggctgaggcaggagcattgcttgagcccaggacttcaagaccagcctgggtaacatagggagacgcccgtctctacaaatagtaaaaataaaaaataaaaaaagtagctgggcgtggtggtgtgcacctgtggtcccagctgcttgggatgctgaggtggaaggatctcttaaacccaggagggtggaggctgcagtgacttgcgattgcaccactgcactccagtctgggggacagagtgagaccccatctcaaaaaagtgtttaattaatatacttgtgagtggtctatttgcatttaaaactgctttctagaattaggatagctcccttaggtttaatgttttggtgagcaggaatatcagttacccctccagatcttaattctagttttttatcactttttcatgaggtgatctcatcctcatctcctagcatgtctggcaattttgatttctgaactctgtgctacctcagaggccagcttccttagggaaaaatcagtgctgaaataaagttatatttccttttctgctctaaatatatagtgggggaataagagaaatgaagaggaattcctgagaacgtaattactagaaactcccctctcccacgtaatgtctctcacacaccatggacccctattcccccaatttgcgaccccccaccccaccccacaacaggtggtgatctttgtgaagtctgtgcagcggtgcattgccttggcccagctactagtggagcagaacttcccagccattgccatccaccgtgggatgccccaggaggagaggctttctcggtatcagcagtttaaagattttcaacgacgaattcttgtggctaccaacctatttggccgaggcatggacatcgagcgggtgaacattgcttttaattatgacatgcctgaggattctgacacctacctgcatcgggtggccagagcaggccggtttggcaccaagggcttggctatcacatttgtgtccgatgagaatgatgccaagatcctcaatgatgtgcaggatcgctttgaggtcaatattagtgagctgcctgatgagatagacatctcctcctacattgaacagacacggtagaagactcgcccattttggaatgtgaccgtctgtccttcaggagaggacaccagggtgggggtgaaggagacactactgcccccacccctgacagcccccaccccatggcttccatcttttgcatcaccaccactcctgaacccccatttctgatttgtcagaatttttttttaacaaaactaaaaatgaaacacatgtgtctgtggtatctataagtgcttcgtccctttattgtatttggggtgaggttattttagggcatggtccagggtgaattcctataaggcctgggtgccctgcctgctgtgagatcaaaggggaatgggactaagactgcagagccctggctcccccactgcctgccaattgcctgcggtttgtggtctcttccactttctctggcctgggaagacgctggggtgtttatgatcccaaggctcctggtgggtggtgcgtgtattttcagtgccggagggtgctgtgggcactgggggaaacttaggcacctcctccaaggctctcttggtgcctcctcatctgttccttcagcttctggatcttgagcaccagggcttgggcctcccaggctccctcctgcccttcaaggagggcctggtacagctccagctgctgctccaacaactctt

SEQ ID NO: 312571 - DNA, 4786 bp, Homo sapiens
catcggccataacaacagaaatggccagtcagtcccaaggtatccagcagcttctgcaagctgagaagcgggcagctgagaaggtggcagatgccagaaagaggaaggcccggcgactgaagcaggcaaaggaggaggcacagatggaggtggagcaataccgcagagagcgagagcacgaattccagagcaagcagcaggcgacaggcattttccaaaggcaagcctggagcgcacggatctgtataaccgcggaaggccctgtttccggtcccttgcgcctgcgctcttgcagccaagaaggcgggaggctggagtagagggaagcctgcaaccggaagtgaaggcagatttccctccttcgtcgctgttgctgccgccatacgcgctctccctgtttaggtaagctttggccttcgctacaatccgtttccatctgcgcttctccgcacccatcccgtcacatgggttcctgatacccttttcacaggcgatggtctggtcgctggggcctagttggttcgctatttccttagcttgcatccctttcgagagcaaagagctcctgggggaaggaagggaagctaaggggggacccaatccaagatggtgtcctcggcgccattgtgttcgttttgctcccttcttccaatgggttcttctcatattggaggcctcagcatcaatgagaggcggtgctcggcgtcccttggtcttggtatttgcggagggcggggctcttctcaccttccttgttctttcttgagctctttttcggccctcggtgggactgggaggaggagctggtttctgggcccagttggatttttctcaccttgacttgcccaacttaatttggagtgccttccaagtgtttacgatacgattggtgtcattgtatgtttctccaaaaggagtctcaccttcgtagcgtaacagtgatgtgagaccacttggtaaagatcctgttaaagcctgggcggggattgcctttctctgtcacctattagctttcttattgtagggtggagacatgaattttgtttttttgtggccgagccatttgtcttgcaccgcccctcccccccatgctaattacacaaggcttgcttaaacagcggaagggaggatactgagaagtgggaggctgagagctatgggaggtggacggcggccatatgatgttttcttttcgaaaggtgagcgctttgcgcagtgatgaccctcatctatcacccttgactgatggctgctgagttaggcatccataacggtgggattataatagggaaagcggagtcttcctttgaggacttttcaggactctacttgtcatctccattttccactttactaagttattagtcatattttaccttttattatctattctatttcctcactgttactttcagatcaagaatttataagttggtcttccccttccaacttttctggtttccgctactgtgattgctaatcttgttgggaacctctgtcctaaccactttccctggtactgctttttctgttctgttatatttgcttttcgtttttatgttttgtatctgtttttctttccaggtaaaagtttcctggtttagggaaagtgggaactggggatggctcttctgttagaaatagtatctttgttttcctttgctgttcctcaatcccctactcttcaccccttgttttcacctattttgcgagaacccatccagatcccccttcccttcttcccctgccggcccagttatggcagagaacgatgtggacaatgagctcttggactatgaagatgatgaggtggagacagcagctgggggagatggggctgaggcccctgccaagaaggatgtcaagggctcctatgtctccatccacagctctggctttcgtgacttcctgctcaagccagagttgctccgggccattgtcgactgtggctttgagcatccgtcagaagtccagcatgagtgcatccctcaggccattctgggaatggatgtcctgtgccaggccaagtcgggcatgggaaagacagcagtgtttgtcttggccacactgcaacagctggagccagttactgggcaggtgtctgtgctggtgatgtgtcacactcgggagttggcttttcagatcagcaaggaatatgagcgcttctctaaatacatgcccaatgtcaaggttgctgttttttttggtggtctgtctatcaagaaggatgaagaggtgctgaagaagaactgcccgcatatcgtcgtggggactccaggccgtatcctagccctggctcgaaataagagcctcaacctcaaacacattaaacactttattttggatgaatgtgataagatgcttgaacagctcgacatgcgtcgggatgtccaggaaatttttcgcatgaccccccacgagaagcaggtcatgatgttcagtgctaccttgagcaaagagatccgtccagtctgccgcaagttcatgcaagatccaatggagatcttcgtggatgatgagacgaagttgacgctgcatgggttgcagcagtactacgtgaaactgaaggacaacgagaagaaccggaagctctttgaccttctggatgtccttgagttcaaccaggtcagttagacgtccagtagggggatgagcattggagcactccagctgtagcagaaacctggatattaagtacacttttattgaggaaatcacatgtgtgatgtgggagagaataatgagggtataaatatcttaggggctgagcatgagtaaggtgggagctgcttttctattctatggctgcagtgaactatgattgcactactgtgctccagcttgggcaacagagtgagatcttgtctccaaaagtccttgaaggattttaggaagttgttaaaagtcttgaaacgatgtttgggggcatgttagggttcttgaatgtttaattcctctaataactgcttattcaagagaagcatttctgactgggtgcagggcagtggctcatgcccataatcccagtactttgggaggctgaggcaggagcattgcttgagcccaggacttcaagaccagcctgggtaacatagggagacgcccgtctctacaaatagtaaaaataaaaaataaaaaaagtagctgggcgtggtggtgtgcacctgtggtcccagctgcttgggatgctgaggtggaaggatctcttaaacccaggagggtggaggctgcagtgacttgcgattgcaccactgcactccagtctgggggacagagtgagaccccatctcaaaaaagtgtttaattaatatacttgtgagtggtctatttgcatttaaaactgctttctagaattaggatagctcccttaggtttaatgttttggtgagcaggaatatcagttacccctccagatcttaattctagttttttatcactttttcatgaggtgatctcatcctcatctcctagcatgtctggcaattttgatttctgaactctgtgctacctcagaggccagcttccttagggaaaaatcagtgctgaaataaagttatatttccttttctgctctaaatatatagtgggggaataagagaaatgaagaggaattcctgagaacgtaattactagaaactcccctctcccacgtaatgtctctcacacaccatggacccctattcccccaatttgcgaccccccaccccaccccacaacaggtggtgatctttgtgaagtctgtgcagcggtgcattgccttggcccagctactagtggagcagaacttcccagccattgccatccaccgtgggatgccccaggaggagaggctttctcggtatcagcagtttaaagattttcaacgacgaattcttgtggctaccaacctatttggccgaggcatggacatcgagcgggtgaacattgcttttaattatgacatgcctgaggattctgacacctacctgcatcgggtggccagagcaggccggtttggcaccaagggcttggctatcacatttgtgtccgatgagaatgatgccaagatcctcaatgatgtgcaggatcgctttgaggtcaatattagtgagctgcctgatgagatagacatctcctcctacattgaacagacacggtagaagactcgcccattttggaatgtgaccgtctgtccttcaggagaggacaccagggtgggggtgaaggagacactactgcccccacccctgacagcccccaccccatggcttccatcttttgcatcaccaccactcctgaacccccatttctgatttgtcagaatttttttttaacaaaactaaaaatgaaacacatgtgtctgtggtatctataagtgcttcgtccctttattgtatttggggtgaggttattttagggcatggtccagggtgaattcctataaggcctgggtgccctgcctgctgtgagatcaaaggggaatgggactaagactgcagagccctggctcccccactgcctgccaattgcctgcggtttgtggtctcttccactttctctggcctgggaagacgctggggtgtttatgatcccaaggctcctggtgggtggtgcgtgtattttcagtgccggagggtgctgtgggcactgggggaaacttaggcacctcctccaaggctctcttggtgcctcctcatctgttccttcagcttctggatcttgagcaccagggcttgggcctcccaggctccctcctgcccttcaaggagggcctggtacagctccagctgctgctccaacaactctt

SEQ ID NO: 312572 - DNA, 5892 bp, Homo sapiens
catcggccataacaacagaaatggccagtcagtcccaaggtatccagcagcttctgcaagctgagaagcgggcagctgagaaggtggcagatgccagaaagaggaaggcccggcgactgaagcaggcaaaggaggaggcacagatggaggtggagcaataccgcagagagcgagagcacgaattccagagcaagcagcaggcgacaggcattttccaaaggcaagcctggagcgcacggatctgtataaccgcggaaggccctgtttccggtcccttgcgcctgcgctcttgcagccaagaaggcgggaggctggagtagagggaagcctgcaaccggaagtgaaggcagatttccctccttcgtcgctgttgctgccgccatacgcgctctccctgtttaggtaagctttggccttcgctacaatccgtttccatctgcgcttctccgcacccatcccgtcacatgggttcctgatacccttttcacaggcgatggtctggtcgctggggcctagttggttcgctatttccttagcttgcatccctttcgagagcaaagagctcctgggggaaggaagggaagctaaggggggacccaatccaagatggtgtcctcggcgccattgtgttcgttttgctcccttcttccaatgggttcttctcatattggaggcctcagcatcaatgagaggcggtgctcggcgtcccttggtcttggtatttgcggagggcggggctcttctcaccttccttgttctttcttgagctctttttcggccctcggtgggactgggaggaggagctggtttctgggcccagttggatttttctcaccttgacttgcccaacttaatttggagtgccttccaagtgtttacgatacgattggtgtcattgtatgtttctccaaaaggagtctcaccttcgtagcgtaacagtgatgtgagaccacttggtaaagatcctgttaaagcctgggcggggattgcctttctctgtcacctattagctttcttattgtagggtggagacatgaattttgtttttttgtggccgagccatttgtcttgcaccgcccctcccccccatgctaattacacaaggcttgcttaaacagcggaagggaggatactgagaagtgggaggctgagagctatgggaggtggacggcggccatatgatgttttcttttcgaaaggtgagcgctttgcgcagtgatgaccctcatctatcacccttgactgatggctgctgagttaggcatccataacggtgggattataatagggaaagcggagtcttcctttgaggacttttcaggactctacttgtcatctccattttccactttactaagttattagtcatattttaccttttattatctattctatttcctcactgttactttcagatcaagaatttataagttggtcttccccttccaacttttctggtttccgctactgtgattgctaatcttgttgggaacctctgtcctaaccactttccctggtactgctttttctgttctgttatatttgcttttcgtttttatgttttgtatctgtttttctttccaggtaaaagtttcctggtttagggaaagtgggaactggggatggctcttctgttagaaatagtatctttgttttcctttgctgttcctcaatcccctactcttcaccccttgttttcacctattttgcgagaacccatccagatcccccttcccttcttcccctgccggcccagttatggcagagaacgatgtggacaatgagctcttggactatgaagatgatgaggtggagacagcagctgggggagatggggctgaggcccctgccaagaaggatgtcaagggctcctatgtctccatccacagctctggctttcgtgacttcctgctcaagccagagttgctccgggccattgtcgactgtggctttgagcatccgtcagaagtccagcatgagtgcatccctcaggccattctgggaatggatgtcctgtgccaggccaagtcgggcatgggaaagacagcagtgtttgtcttggccacactgcaacagctggagccagttactgggcaggtgtctgtgctggtgatgtgtcacactcgggagttggcttttcagatcagcaaggaatatgagcgcttctctaaatacatgcccaatgtcaaggttgctgttttttttggtggtctgtctatcaagaaggatgaagaggtgctgaagaagaactgcccgcatatcgtcgtggggactccaggccgtatcctagccctggctcgaaataagagcctcaacctcaaacacattaaacactttattttggatgaatgtgataagatgcttgaacagctcgacatgcgtcgggatgtccaggaaatttttcgcatgaccccccacgagaagcaggtcatgatgttcagtgctaccttgagcaaagagatccgtccagtctgccgcaagttcatgcaagattaaatacccttctaccttctctccctccactccccgcccgctgcctcctccccttcctcgccctcttcctcagactcccttgtcattcaagtgccaagaaggcggcttgtgcccaactgggagtaatgactccttgaagagacatacagaagcagagacagctagtgttagggcctgcgcgggtgccagggaaactccggaagacttggtcgggttaatgtgagagcgggtagtgttcgactttttcataaatcacaacatttttgaacctcttctcccttcgggggagggcaggatttttctgccctaccacccacccatccatcgtctcttacatgcaccctacagccacgcaccctcaaggtggcatcgagcatacagctggagccttctgctcaccaaaactcctacttcccggtggcaggagagcaagagagggacagacagatggcagggcatgtccgggcctttggcacctcaatccccgataccctactccttcccacccacatctccttgcacccatctggaacctcggttgatgtgagccggcaacagagaagcaccgtggcgcggcgagggaatgcagacggcacccagcggtggatggcggcagcggaggccgcggggaaacctgaccaggaagctgaggaccaaaccagcctctttttccgttcccggtttttttcctgaacccaacgcgtgccgtgccccgtttcccccaatatgtgttggggaggggtgtcctgaatggggtggtagattttttttcttaaaaaaatttttttgttttttttaatactcagaggagagggacataggaaagccaatggagatcttcgtggatgatgagacgaagttgacgctgcatgggttgcagcagtactacgtgaaactgaaggacaacgagaagaaccggaagctctttgaccttctggatgtccttgagttcaaccaggtcagttagacgtccagtagggggatgagcattggagcactccagctgtagcagaaacctggatattaagtacacttttattgaggaaatcacatgtgtgatgtgggagagaataatgagggtataaatatcttaggggctgagcatgagtaaggtgggagctgcttttctattctatggctggcacgggtatgtcctcaataacctcaaggaaaataaacttcaaaaattaagatccttggccaggcacggtggcttatgtgtgtaatcccagcacttggggaggctgagggaggtggatcacttgagtccaggagtttgagaccagtctgggcaacatggcgaaacttcatcactaccaaagaagaaaaaaattagccaggtgtggtggtgtatgcctgtagtcccagatactctggtggctgaggtgagaggatagcttgagcccaggaaattgaggctgcagtgaactatgattgcactactgtgctccagcttgggcaacagagtgagatcttgtctccaaaagtccttgaaggattttaggaagttgttaaaagtcttgaaacgatgtttgggggcatgttagggttcttgaatgtttaattcctctaataactgcttattcaagagaagcatttctgactgggtgcagggcagtggctcatgcccataatcccagtactttgggaggctgaggcaggagcattgcttgagcccaggacttcaagaccagcctgggtaacatagggagacgcccgtctctacaaatagtaaaaataaaaaataaaaaaagtagctgggcgtggtggtgtgcacctgtggtcccagctgcttgggatgctgaggtggaaggatctcttaaacccaggagggtggaggctgcagtgacttgcgattgcaccactgcactccagtctgggggacagagtgagaccccatctcaaaaaagtgtttaattaatatacttgtgagtggtctatttgcatttaaaactgctttctagaattaggatagctcccttaggtttaatgttttggtgagcaggaatatcagttacccctccagatcttaattctagttttttatcactttttcatgaggtgatctcatcctcatctcctagcatgtctggcaattttgatttctgaactctgtgctacctcagaggccagcttccttagggaaaaatcagtgctgaaataaagttatatttccttttctgctctaaatatatagtgggggaataagagaaatgaagaggaattcctgagaacgtaattactagaaactcccctctcccacgtaatgtctctcacacaccatggacccctattcccccaatttgcgaccccccaccccaccccacaacaggtggtgatctttgtgaagtctgtgcagcggtgcattgccttggcccagctactagtggagcagaacttcccagccattgccatccaccgtgggatgccccaggaggagaggctttctcggtatcagcagtttaaagattttcaacgacgaattcttgtggctaccaacctatttggccgaggcatggacatcgagcgggtgaacattgcttttaattatgacatgcctgaggattctgacacctacctgcatcgggtggccagagcaggccggtttggcaccaagggcttggctatcacatttgtgtccgatgagaatgatgccaagatcctcaatgatgtgcaggatcgctttgaggtcaatattagtgagctgcctgatgagatagacatctcctcctacattgaacagacacggtagaagactcgcccattttggaatgtgaccgtctgtccttcaggagaggacaccagggtgggggtgaaggagacactactgcccccacccctgacagcccccaccccatggcttccatcttttgcatcaccaccactcctgaacccccatttctgatttgtcagaatttttttttaacaaaactaaaaatgaaacacatgtgtctgtggtatctataagtgcttcgtccctttattgtatttggggtgaggttattttagggcatggtccagggtgaattcctataaggcctgggtgccctgcctgctgtgagatcaaaggggaatgggactaagactgcagagccctggctcccccactgcctgccaattgcctgcggtttgtggtctcttccactttctctggcctgggaagacgctggggtgtttatgatcccaaggctcctggtgggtggtgcgtgtattttcagtgccggagggtgctgtgggcactgggggaaacttaggcacctcctccaaggctctcttggtgcctcctcatctgttccttcagcttctggatcttgagcaccagggcttgggcctcccaggctccctcctgcccttcaaggagggcctggtacagctccagctgctgctccaacaactctt

SEQ ID NO: 312573 - DNA, 3471 bp, Homo sapiens
catcggccataacaacagaaatggccagtcagtcccaaggtatccagcagcttctgcaagctgagaagcgggcagctgagaaggtggcagatgccagaaagaggaaggcccggcgactgaagcaggcaaaggaggaggcacagatggaggtggagcaataccgcagagagcgagagcacgaattccagagcaagcagcaggcgacaggcattttccaaaggcaagcctggagcgcacggatctgtataaccgcggaaggccctgtttccggtcccttgcgcctgcgctcttgcagccaagaaggcgggaggctggagtagagggaagcctgcaaccggaagtgaaggcagatttccctccttcgtcgctgttgctgccgccatacgcgctctccctgtttaggtaagctttggccttcgctacaatccgtttccatctgcgcttctccgcacccatcccgtcacatgggttcctgatacccttttcacaggcgatggtctggtcgctggggcctagttggttcgctatttccttagcttgcatccctttcgagagcaaagagctcctgggggaaggaagggaagctaaggggggacccaatccaagatggtgtcctcggcgccattgtgttcgttttgctcccttcttccaatgggttcttctcatattggaggcctcagcatcaatgagaggcggtgctcggcgtcccttggtcttggtatttgcggagggcggggctcttctcaccttccttgttctttcttgagctctttttcggccctcggtgggactgggaggaggagctggtttctgggcccagttggatttttctcaccttgacttgcccaacttaatttggagtgccttccaagtgtttacgatacgattggtgtcattgtatgtttctccaaaaggagtctcaccttcgtagcgtaacagtgatgtgagaccacttggtaaagatcctgttaaagcctgggcggggattgcctttctctgtcacctattagctttcttattgtagggtggagacatgaattttgtttttttgtggccgagccatttgtcttgcaccgcccctcccccccatgctaattacacaaggcttgcttaaacagcggaagggaggatactgagaagtgggaggctgagagctatgggaggtggacggcggccatatgatgttttcttttcgaaaggtgagcgctttgcgcagtgatgaccctcatctatcacccttgactgatggctgctgagttaggcatccataacggtgggattataatagggaaagcggagtcttcctttgaggacttttcaggactctacttgtcatctccattttccactttactaagttattagtcatattttaccttttattatctattctatttcctcactgttactttcagatcaagaatttataagttggtcttccccttccaacttttctggtttccgctactgtgattgctaatcttgttgggaacctctgtcctaaccactttccctggtactgctttttctgttctgttatatttgcttttcgtttttatgttttgtatctgtttttctttccaggtaaaagtttcctggtttagggaaagtgggaactggggatggctcttctgttagaaatagtatctttgttttcctttgctgttcctcaatcccctactcttcaccccttgttttcacctattttgcgagaacccatccagatcccccttcccttcttcccctgccggcccagttatggcagagaacgatgtggacaatgagctcttggactatgaagatgatgaggtggagacagcagctgggggagatggggctgaggcccctgccaagaaggatgtcaagggctcctatgtctccatccacagctctggctttcgtgacttcctgctcaagccagagttgctccgggccattgtcgactgtggctttgagcatccgtcagaaggttgctgttttttttggtggtctgtctatcaagaaggatgaagaggtgctgaagaagaactgcccgcatatcgtcgtggggactccaggccgtatcctagccctggctcgaaataagagcctcaacctcaaacacattaaacactttattttggatgaatgtgataagatgcttgaacagctcgacatgcgtcgggatgtccaggaaatttttcgcatgaccccccacgagaagcaggtcatgatgttcagtgctaccttgagcaaagagatccgtccagtctgccgcaagttcatgcaagatccaatggagatcttcgtggatgatgagacgaagttgacgctgcatgggttgcagcagtactacgtgaaactgaaggacaacgagaagaaccggaagctctttgaccttctggatgtccttgagttcaaccaggtggtgatctttgtgaagtctgtgcagcggtgcattgccttggcccagctactagtggagcagaacttcccagccattgccatccaccgtgggatgccccaggaggagaggctttctcggtatcagcagtttaaagattttcaacgacgaattcttgtggctaccaacctatttggccgaggcatggacatcgagcgggtgaacattgcttttaattatgacatgcctgaggattctgacacctacctgcatcgggtggccagagcaggccggtttggcaccaagggcttggctatcacatttgtgtccgatgagaatgatgccaagatcctcaatgatgtgcaggatcgctttgaggtcaatattagtgagctgcctgatgagatagacatctcctcctacattgaacagacacggtagaagactcgcccattttggaatgtgaccgtctgtccttcaggagaggacaccagggtgggggtgaaggagacactactgcccccacccctgacagcccccaccccatggcttccatcttttgcatcaccaccactcctgaacccccatttctgatttgtcagaatttttttttaacaaaactaaaaatgaaacacatgtgtctgtggtatctataagtgcttcgtccctttattgtatttggggtgaggttattttagggcatggtccagggtgaattcctataaggcctgggtgccctgcctgctgtgagatcaaaggggaatgggactaagactgcagagccctggctcccccactgcctgccaattgcctgcggtttgtggtctcttccactttctctggcctgggaagacgctggggtgtttatgatcccaaggctcctggtgggtggtgcgtgtattttcagtgccggagggtgctgtgggcactgggggaaacttaggcacctcctccaaggctctcttggtgcctcctcatctgttccttcagcttctggatcttgagcaccagggcttgggcctcccaggctccctcctgcccttcaaggagggcctggtacagctccagctgctgctccaacaactctt

SEQ ID NO: 312574 - DNA, 3715 bp, Homo sapiens
catcggccataacaacagaaatggccagtcagtcccaaggtatccagcagcttctgcaagctgagaagcgggcagctgagaaggtggcagatgccagaaagaggaaggcccggcgactgaagcaggcaaaggaggaggcacagatggaggtggagcaataccgcagagagcgagagcacgaattccagagcaagcagcaggcgacaggcattttccaaaggcaagcctggagcgcacggatctgtataaccgcggaaggccctgtttccggtcccttgcgcctgcgctcttgcagccaagaaggcgggaggctggagtagagggaagcctgcaaccggaagtgaaggcagatttccctccttcgtcgctgttgctgccgccatacgcgctctccctgtttaggtaagctttggccttcgctacaatccgtttccatctgcgcttctccgcacccatcccgtcacatgggttcctgatacccttttcacaggcgatggtctggtcgctggggcctagttggttcgctatttccttagcttgcatccctttcgagagcaaagagctcctgggggaaggaagggaagctaaggggggacccaatccaagatggtgtcctcggcgccattgtgttcgttttgctcccttcttccaatgggttcttctcatattggaggcctcagcatcaatgagaggcggtgctcggcgtcccttggtcttggtatttgcggagggcggggctcttctcaccttccttgttctttcttgagctctttttcggccctcggtgggactgggaggaggagctggtttctgggcccagttggatttttctcaccttgacttgcccaacttaatttggagtgccttccaagtgtttacgatacgattggtgtcattgtatgtttctccaaaaggagtctcaccttcgtagcgtaacagtgatgtgagaccacttggtaaagatcctgttaaagcctgggcggggattgcctttctctgtcacctattagctttcttattgtagggtggagacatgaattttgtttttttgtggccgagccatttgtcttgcaccgcccctcccccccatgctaattacacaaggcttgcttaaacagcggaagggaggatactgagaagtgggaggctgagagctatgggaggtggacggcggccatatgatgttttcttttcgaaaggtgagcgctttgcgcagtgatgaccctcatctatcacccttgactgatggctgctgagttaggcatccataacggtgggattataatagggaaagcggagtcttcctttgaggacttttcaggactctacttgtcatctccattttccactttactaagttattagtcatattttaccttttattatctattctatttcctcactgttactttcagatcaagaatttataagttggtcttccccttccaacttttctggtttccgctactgtgattgctaatcttgttgggaacctctgtcctaaccactttccctggtactgctttttctgttctgttatatttgcttttcgtttttatgttttgtatctgtttttctttccaggtaaaagtttcctggtttagggaaagtgggaactggggatggctcttctgttagaaatagtatctttgttttcctttgctgttcctcaatcccctactcttcaccccttgttttcacctattttgcgagaacccatccagatcccccttcccttcttcccctgccggcccagttatggcagagaacgatgtggacaatgagctcttggactatgaagatgatgaggtggagacagcagctgggggagatggggctgaggcccctgccaagaaggatgtcaagggctcctatgtctccatccacagctctggctttcgtgacttcctgctcaagccagagttgctccgggccattgtcgactgtggctttgagcatccgtcagaagtccagcatgagtgcatccctcaggccattctgggaatggatgtcctgtgccaggccaagtcgggcatgggaaagacagcagtgtttgtcttggccacactgcaacagctggagccagttactgggcaggtgtctgtgctggtgatgtgtcacactcgggagttggcttttcagatcagcaaggaatatgagcgcttctctaaatacatgcccaatgtcaaggttgctgttttttttggtggtctgtctatcaagaaggatgaagaggtgctgaagaagaactgcccgcatatcgtcgtggggactccaggccgtatcctagccctggctcgaaataagagcctcaacctcaaacacattaaacactttattttggatgaatgtgataagatgcttgaacagctcgacatgcgtcgggatgtccaggaaatttttcgcatgaccccccacgagaagcaggtcatgatgttcagtgctaccttgagcaaagagatccgtccagtctgccgcaagttcatgcaagatccaatggagatcttcgtggatgatgagacgaagttgacgctgcatgggttgcagcagtactacgtgaaactgaaggacaacgagaagaaccggaagctctttgaccttctggatgtccttgagttcaaccaggtggtgatctttgtgaagtctgtgcagcggtgcattgccttggcccagctactagtggagcagaacttcccagccattgccatccaccgtgggatgccccaggaggagaggctttctcggtatcagcagtttaaagattttcaacgacgaattcttgtggctaccaacctatttggccgaggcatggacatcgagcgggtgaacattgcttttaattatgacatgcctgaggattctgacacctacctgcatcggtgctaccctctgtctccctccaggtggccagagcaggccggtttggcaccaagggcttggctatcacatttgtgtccgatgagaatgatgccaagatcctcaatgatgtgcaggatcgctttgaggtcaatattagtgagctgcctgatgagatagacatctcctcctacattgaacagacacggtagaagactcgcccattttggaatgtgaccgtctgtccttcaggagaggacaccagggtgggggtgaaggagacactactgcccccacccctgacagcccccaccccatggcttccatcttttgcatcaccaccactcctgaacccccatttctgatttgtcagaatttttttttaacaaaactaaaaatgaaacacatgtgtctgtggtatctataagtgcttcgtccctttattgtatttggggtgaggttattttagggcatggtccagggtgaattcctataaggcctgggtgccctgcctgctgtgagatcaaaggggaatgggactaagactgcagagccctggctcccccactgcctgccaattgcctgcggtttgtggtctcttccactttctctggcctgggaagacgctggggtgtttatgatcccaaggctcctggtgggtggtgcgtgtattttcagtgccggagggtgctgtgggcactgggggaaacttaggcacctcctccaaggctctcttggtgcctcctcatctgttccttcagcttctggatcttgagcaccagggcttgggcctcccaggctccctcctgcccttcaaggagggcctggtacagctccagctgctgctccaacaactctt

SEQ ID NO: 312575 - DNA, 3122 bp, Homo sapiens
catcggccataacaacagaaatggccagtcagtcccaaggtatccagcagcttctgcaagctgagaagcgggcagctgagaaggtggcagatgccagaaagaggaaggcccggcgactgaagcaggcaaaggaggaggcacagatggaggtggagcaataccgcagagagcgagagcacgaattccagagcaagcagcaggcgacaggcattttccaaaggcaagcctggagcgcacggatctgtataaccgcggaaggccctgtttccggtcccttgcgcctgcgctcttgcagccaagaaggcgggaggctggagtagagggaagcctgcaaccggaagtgaaggcagatttccctccttcgtcgctgttgctgccgccatacgcgctctccctgtttaggtaagctttggccttcgctacaatccgtttccatctgcgcttctccgcacccatcccgtcacatgggttcctgatacccttttcacaggcgatggtctggtcgctggggcctagttggttcgctatttccttagcttgcatccctttcgagagcaaagagctcctgggggaaggaagggaagctaaggggggacccaatccaagatggtgtcctcggcgccattgtgttcgttttgctcccttcttccaatgggttcttctcatattggaggcctcagcatcaatgagaggcggtgctcggcgtcccttggtcttggtatttgcggagggcggggctcttctcaccttccttgttctttcttgagctctttttcggccctcggtgggactgggaggaggagctggtttctgggcccagttggatttttctcaccttgacttgcccaacttaatttggagtgccttccaagtgtttacgatacgattggtgtcattgtatgtttctccaaaaggagtctcaccttcgtagcgtaacagtgatgtgagaccacttggtaaagatcctgttaaagcctgggcggggattgcctttctctgtcacctattagctttcttattgtagggtggagacatgaattttgtttttttgtggccgagccatttgtcttgcaccgcccctcccccccatgctaattacacaaggcttgcttaaacagcggaagggaggatactgagaagtgggaggctgagagctatgggaggtggacggcggccatatgatgttttcttttcgaaaggtgagcgctttgcgcagtgatgaccctcatctatcacccttgactgatggctgctgagttaggcatccataacggtgggattataatagggaaagcggagtcttcctttgaggacttttcaggactctacttgtcatctccattttccactttactaagttattagtcatattttaccttttattatctattctatttcctcactgttactttcagatcaagaatttataagttggtcttccccttccaacttttctggtttccgctactgtgattgctaatcttgttgggaacctctgtcctaaccactttccctggtactgctttttctgttctgttatatttgcttttcgtttttatgttttgtatctgtttttctttccaggtaaaagtttcctggtttagggaaagtgggaactggggatggctcttctgttagaaatagtatctttgttttcctttgctgttcctcaatcccctactcttcaccccttgttttcacctattttgcgagaacccatccagatcccccttcccttcttcccctgccggcccagttatggcagagaacgatgtggacaatgagctcttggactatgaagatgatgaggtggagacagcagctgggggagatggggctgaggcccctgccaagaaggatgtcaagggctcctatgtctccatccacagctctggctttcgtgacttcctgctcaagccagagttgctccgggccattgtcgactgtggctttgagcatccgtcagaagtccagcatgagtgcatccctcaggccattctgggaatggatgtcctgtgccaggccaagtcgggcatgggaaagacagcagtgtttgtcttggccacactgcaacagctggagccagttactgggcaggtgtctgtgctggtgatgtgtcacactcgggagttggcttttcagatcagcaaggaatatgagcgcttctctaaatacatgcccaatgtcaaggttgctgttttttttggtggtctgtctatcaagaaggatgaagaggtgctgaagaagaactgcccgcatatcgtcgtggggactccaggccgtatcctagccctggctcgaaataagagcctcaacctcaaacacattaaacactttattttggatgaatgtgataagatgcttgaacagctcgacatgcgtcgggatgtccaggaaatttttcgcatgaccccccacgagaagcaggtcatgatgttcagtgctaccttgagcaaagagatccgtccagtctgccgcaagttcatgcaagatccaatggagatcttcgtggatgatgagacgaagttgacgctgcatgggttgcagcagtactacgtgaaactgaaggacaacgagaagaaccggaagctctttgaccttctggatgtccttgagttcaaccaggtggtgatctttgtgaagtctgtgcagcggtgcattgccttggcccagctactagtggagcagaacttcccagccattgccatccaccgtgggatgccccaggaggagaggctttctcggtatcagcagtttaaagattttcaacgacgaattcttgtggctaccaacctatttggccgaggcatggacatcgagcgggtgaacattgcttttaattatgacatgcctgaggattctgacacctacctgcatcgggtggccagagcaggccggtttggcaccaagggcttggctatcacatttgtgtccgatgagaatgatgccaagatcctcaatgatgtgcaggatcgctttgaggtcaatattagtgagctgcctgatgagatagacatctcctcctacattgtacagacacggtagttagactccccatgaatgtgtttcctcatgtgttaaatgggaatagcaggacacgggacacgttgtgcagggatcct

SEQ ID NO: 312576 - DNA, 2936 bp, Homo sapiens
catcggccataacaacagaaatggccagtcagtcccaaggtatccagcagcttctgcaagctgagaagcgggcagctgagaaggtggcagatgccagaaagaggaaggcccggcgactgaagcaggcaaaggaggaggcacagatggaggtggagcaataccgcagagagcgagagcacgaattccagagcaagcagcaggcgacaggcattttccaaaggcaagcctggagcgcacggatctgtataaccgcggaaggccctgtttccggtcccttgcgcctgcgctcttgcagccaagaaggcgggaggctggagtagagggaagcctgcaaccggaagtgaaggcagatttccctccttcgtcgctgttgctgccgccatacgcgctctccctgtttaggtaagctttggccttcgctacaatccgtttccatctgcgcttctccgcacccatcccgtcacatgggttcctgatacccttttcacaggcgatggtctggtcgctggggcctagttggttcgctatttccttagcttgcatccctttcgagagcaaagagctcctgggggaaggaagggaagctaaggggggacccaatccaagatggtgtcctcggcgccattgtgttcgttttgctcccttcttccaatgggttcttctcatattggaggcctcagcatcaatgagaggcggtgctcggcgtcccttggtcttggtatttgcggagggcggggctcttctcaccttccttgttctttcttgagctctttttcggccctcggtgggactgggaggaggagctggtttctgggcccagttggatttttctcaccttgacttgcccaacttaatttggagtgccttccaagtgtttacgatacgattggtgtcattgtatgtttctccaaaaggagtctcaccttcgtagcgtaacagtgatgtgagaccacttggtaaagatcctgttaaagcctgggcggggattgcctttctctgtcacctattagctttcttattgtagggtggagacatgaattttgtttttttgtggccgagccatttgtcttgcaccgcccctcccccccatgctaattacacaaggcttgcttaaacagcggaagggaggatactgagaagtgggaggctgagagctatgggaggtggacggcggccatatgatgttttcttttcgaaaggtgagcgctttgcgcagtgatgaccctcatctatcacccttgactgatggctgctgagttaggcatccataacggtgggattataatagggaaagcggagtcttcctttgaggacttttcaggactctacttgtcatctccattttccactttactaagttattagtcatattttaccttttattatctattctatttcctcactgttactttcagatcaagaatttataagttggtcttccccttccaacttttctggtttccgctactgtgattgctaatcttgttgggaacctctgtcctaaccactttccctggtactgctttttctgttctgttatatttgcttttcgtttttatgttttgtatctgtttttctttccaggtaaaagtttcctggtttagggaaagtgggaactggggatggctcttctgttagaaatagtatctttgttttcctttgctgttcctcaatcccctactcttcaccccttgttttcacctattttgcgagaacccatccagatcccccttcccttcttcccctgccggcccagttatggcagagaacgatgtggacaatgagctcttggactatgaagatgatgaggtggagacagcagctgggggagatggggctgaggcccctgccaagaaggatgtcaagggctcctatgtctccatccacagctctggctttcgtgacttcctgctcaagccagagttgctccgggccattgtcgactgtggctttgagcatccgtcagaagtccagcatgagtgcatccctcaggccattctgggaatggatgtcctgtgccaggccaagtcgggcatgggaaagacagcagtgtttgtcttggccacactgcaacagctggagccagttactgggcaggtgtctgtgctggtgatgtgtcacactcgggagttggcttttcagatcagcaaggaatatgagcgcttctctaaatacatgcccaatgtcaaggttgctgttttttttggtggtctgtctatcaagaaggatgaagaggtgctgaagaagaactgcccgcatatcgtcgtggggactccaggccgtatcctagccctggctcgaaataagagcctcaacctcaaacacattaaacactttattttggatgaatgtgataagatgcttgaacagctcgacatgcgtcgggatgtccaggaaatttttcgcatgaccccccacgagaagcaggtcatgatgttcagtgctaccttgagcaaagagatccgtccagtctgccgcaagttcatgcaagatccaatggagatcttcgtggatgatgagacgaagttgacgctgcatgggttgcagcagtactacgtgaaactgaaggacaacgagaagaaccggaagctctttgaccttctggatgtccttgagttcaaccaggtggtgatctttgtgaagtctgtgcagcggtgcattgccttggcccagctactagtggagcagaacttcccagccattgccatccaccgtgggatgccccaggaggagaggctttctcggtatcagcagtttaaagattttcaacgacgaattcttgtggctaccaacctatttggccgaggcatggacatcgagcgggtgaacattgcttttaattatgacatgcctgaggattctgacacctacctgcatcgggtaaacctcacaggctgaaaaaatcccactctcccattcccttgttttctgtttgt

SEQ ID NO: 312577 - DNA, 2594 bp, Homo sapiens
  misc_feature (2551)..(2553): n is a, c, g, or t
  misc_feature (2561)..(2561): n is a, c, g, or t
  misc_feature (2580)..(2580): n is a, c, g, or t
catcggccataacaacagaaatggccagtcagtcccaaggtatccagcagcttctgcaagctgagaagcgggcagctgagaaggtggcagatgccagaaagaggaaggcccggcgactgaagcaggcaaaggaggaggcacagatggaggtggagcaataccgcagagagcgagagcacgaattccagagcaagcagcaggcgacaggcattttccaaaggcaagcctggagcgcacggatctgtataaccgcggaaggccctgtttccggtcccttgcgcctgcgctcttgcagccaagaaggcgggaggctggagtagagggaagcctgcaaccggaagtgaaggcagatttccctccttcgtcgctgttgctgccgccatacgcgctctccctgtttaggtaagctttggccttcgctacaatccgtttccatctgcgcttctccgcacccatcccgtcacatgggttcctgatacccttttcacaggcgatggtctggtcgctggggcctagttggttcgctatttccttagcttgcatccctttcgagagcaaagagctcctgggggaaggaagggaagctaaggggggacccaatccaagatggtgtcctcggcgccattgtgttcgttttgctcccttcttccaatgggttcttctcatattggaggcctcagcatcaatgagaggcggtgctcggcgtcccttggtcttggtatttgcggagggcggggctcttctcaccttccttgttctttcttgagctctttttcggccctcggtgggactgggaggaggagctggtttctgggcccagttggatttttctcaccttgacttgcccaacttaatttggagtgccttccaagtgtttacgatacgattggtgtcattgtatgtttctccaaaaggagtctcaccttcgtagcgtaacagtgatgtgagaccacttggtaaagatcctgttaaagcctgggcggggattgcctttctctgtcacctattagctttcttattgtagggtggagacatgaattttgtttttttgtggccgagccatttgtcttgcaccgcccctcccccccatgctaattacacaaggcttgcttaaacagcggaagggaggatactgagaagtgggaggctgagagctatgggaggtggacggcggccatatgatgttttcttttcgaaaggtgagcgctttgcgcagtgatgaccctcatctatcacccttgactgatggctgctgagttaggcatccataacggtgggattataatagggaaagcggagtcttcctttgaggacttttcaggactctacttgtcatctccattttccactttactaagttattagtcatattttaccttttattatctattctatttcctcactgttactttcagatcaagaatttataagttggtcttccccttccaacttttctggtttccgctactgtgattgctaatcttgttgggaacctctgtcctaaccactttccctggtactgctttttctgttctgttatatttgcttttcgtttttatgttttgtatctgtttttctttccaggtaaaagtttcctggtttagggaaagtgggaactggggatggctcttctgttagaaatagtatctttgttttcctttgctgttcctcaatcccctactcttcaccccttgttttcacctattttgcgagaacccatccagatcccccttcccttcttcccctgccggcccagttatggcagagaacgatgtggacaatgagctcttggactatgaagatgatgaggtggagacagcagctgggggagatggggctgaggcccctgccaagaaggatgtcaagggctcctatgtctccatccacagctctggctttcgtgacttcctgctcaagccagagttgctccgggccattgtcgactgtggctttgagcatccgtcagaagtccagcatgagtgcatccctcaggccattctgggaatggatgtcctgtgccaggccaagtcgggcatgggaaagacagcagtgtttgtcttggccacactgcaacagctggagccagttactgggcaggtgtctgtgctggtgatgtgtcacactcgggagttggcttttcagatcagcaaggaatatgagcgcttctctaaatacatgcccaatgtcaaggttgctgttttttttggtggtctgtctatcaagaaggatgaagaggtgctgaagaagaactgcccgcatatcgtcgtggggactccaggccgtatcctagccctggctcgaaataagagcctcaacctcaaacacattaaacactttattttggatgaatgtgataagatgcttgaacagctcgacatgcgtcgggatgtccaggaaatttttcgcatgaccccccacgagaagcaggtcatgatgttcagtgctaccttgagcaaagagatccgtccagtctgccgcaagttcatgcaagatcgctctcacattaacccgaccagtcttccggagtttcctgcacccgcgcagccctacnnnagctgtcnctgcttctgtatgtctctnataagatcctgtat

SEQ ID NO: 312578 - DNA, 2869 bp, Homo sapiens
catcggccataacaacagaaatggccagtcagtcccaaggtatccagcagcttctgcaagctgagaagcgggcagctgagaaggtggcagatgccagaaagaggaaggcccggcgactgaagcaggcaaaggaggaggcacagatggaggtggagcaataccgcagagagcgagagcacgaattccagagcaagcagcaggcgacaggcattttccaaaggcaagcctggagcgcacggatctgtataaccgcggaaggccctgtttccggtcccttgcgcctgcgctcttgcagccaagaaggcgggaggctggagtagagggaagcctgcaaccggaagtgaaggcagatttccctccttcgtcgctgttgctgccgccatacgcgctctccctgtttaggtaagctttggccttcgctacaatccgtttccatctgcgcttctccgcacccatcccgtcacatgggttcctgatacccttttcacaggcgatggtctggtcgctggggcctagttggttcgctatttccttagcttgcatccctttcgagagcaaagagctcctgggggaaggaagggaagctaaggggggacccaatccaagatggtgtcctcggcgccattgtgttcgttttgctcccttcttccaatgggttcttctcatattggaggcctcagcatcaatgagaggcggtgctcggcgtcccttggtcttggtatttgcggagggcggggctcttctcaccttccttgttctttcttgagctctttttcggccctcggtgggactgggaggaggagctggtttctgggcccagttggatttttctcaccttgacttgcccaacttaatttggagtgccttccaagtgtttacgatacgattggtgtcattgtatgtttctccaaaaggagtctcaccttcgtagcgtaacagtgatgtgagaccacttggtaaagatcctgttaaagcctgggcggggattgcctttctctgtcacctattagctttcttattgtagggtggagacatgaattttgtttttttgtggccgagccatttgtcttgcaccgcccctcccccccatgctaattacacaaggcttgcttaaacagcggaagggaggatactgagaagtgggaggctgagagctatgggaggtggacggcggccatatgatgttttcttttcgaaaggtgagcgctttgcgcagtgatgaccctcatctatcacccttgactgatggctgctgagttaggcatccataacggtgggattataatagggaaagcggagtcttcctttgaggacttttcaggactctacttgtcatctccattttccactttactaagttattagtcatattttaccttttattatctattctatttcctcactgttactttcagatcaagaatttataagttggtcttccccttccaacttttctggtttccgctactgtgattgctaatcttgttgggaacctctgtcctaaccactttccctggtactgctttttctgttctgttatatttgcttttcgtttttatgttttgtatctgtttttctttccaggtaaaagtttcctggtttagggaaagtgggaactggggatggctcttctgttagaaatagtatctttgttttcctttgctgttcctcaatcccctactcttcaccccttgttttcacctattttgcgagaacccatccagatcccccttcccttcttcccctgccggcccagttatggcagagaacgatgtggacaatgagctcttggactatgaagatgatgaggtggagacagcagctgggggagatggggctgaggcccctgccaagaaggatgtcaagggctcctatgtctccatccacagctctggctttcgtgacttcctgctcaagccagagttgctccgggccattgtcgactgtggctttgagcatccgtcagaagtccagcatgagtgcatccctcaggccattctgggaatggatgtcctgtgccaggccaagtcgggcatgggaaagacagcagtgtttgtcttggccacactgcaacagctggagccagttactgggcaggtgtctgtgctggtgatgtgtcacactcgggagttggcttttcagatcagcaaggaatatgagcgcttctctaaatacatgcccaatgtcaaggtaagccaaggtaaagagacctgagagtgagggtgtggcaagttggagggataagaaacttgtaggccaatagtctctttaattttggagaagctttagtttgctgtggtgtaacagagtgttgagttcctatgtaacaggaggattcgtaattgggctatggatgatgcttaacacaagaccacccttttcttactactttatactgactttgaatcatatcagtttaataattttggggtatgtggcagagaaagccggaaactttaaaacagctccagtggtgtgtgaatattgaggattctggccaagtgcacaatggcttacacctgtaatctcagcagtttgggaggccaaggcgtgtggattatttgaggtcaggagtttaagaccaatgtggccaacaggatgaaaccctctctctactaaaaatgcaaaaattagccgtgcatggtggcacacacctatagtcccacctgcttgggaggctgaggcaggggaatcgcttgaacccaggaagcagaggttgtagtgagctgagattgtgccattacactccagcctgggtggcagagtgagactcccatctcatccctttttcctctttcctttcctttcgtccgctttgtcccatccccctttagatctcagcttgtttatcctgcttcctcatctcccc

SEQ ID NO: 312579 - DNA, 323 bp, Homo sapiens
taagagcctcaacctcaaacacattaaacactttattttggatgaatgtgataagatgcttgaacagctcggtgagtggcagtgctggggcttggctaatgctggggagttgttctttggagccaaatgatgtttatttgaaacaggagcacctcagtgcaaggacgactcttatctatcacccatgactgatggctctgggttccctggttggtctttattatgcttttaagcacagtaaagggtgtcatctatcatctttctatgatttttgtttttaacctttgagaataggggactttgataattttaggcataagtca

SEQ ID NO: 312580 - DNA, 800 bp, Homo sapiens
tagtgttagggcctgcgcgggtgccagggaaactccggaagacttggtcgggttaatgtgagagcgggtagtgttcgactttttcataaatcacaacatttttgaacctcttctcccttcgggggagggcaggatttttctgccctaccacccacccatccatcgtctcttacatgcaccctacagccacgcaccctcaaggtggcatcgagcatacagctggagccttctgctcaccaaaactcctacttcccggtggcaggagagcaagagagggacagacagatggcagggcatgtccaaaagaagagcatcagcacaaatgaatcctccccttccccacctccaggggtgggggcctttggcacctcaatccccgataccctactccttcccacccacatctccttgcacccatctggaacctcggttgatgtgagccggcaacagagaagcaccgtggcgcggcgagggaatgcagacggcacccagcggtggatggcggcagcggaggccgcggggaaacctgaccaggaagctgaggaccaaaccagcctctttttccgttcccggtttttttcctgaacccaacgcgtgccgtgccccgtttcccccaatatgtgttggggaggggtgtcctgaatggggtggtagattttttttcttaaaaaaatttttttgttttttttaatactcagaggagagggacataggaaaggtaaagtggatgtaatcgggtggttgttagggtttggggctaggtggggccaattgcataagcagtggagtgtgttcttccc

SEQ ID NO: 312581 - DNA, 1274 bp, Homo sapiens
catcggccataacaacagaaatggccagtcagtcccaaggtatccagcagcttctgcaagctgagaagcgggcagctgagaaggtggcagatgccagaaagaggaaggcccggcgactgaagcaggcaaaggaggaggcacagatggaggtggagcaataccgcagagagcgagagcacgaattccagagcaagcagcaggcggccatgggctcccaggggaacctgtctgctgaggtggagcaggctacaaggcgccaggtgcagggcatgcagagctcccagcagagaaaccgagagcgtgtcctggcccagcttcttggcatggtctgcgacgtcaggccccaggtccaccccaactaccggatttctgcctagggccaccgtagggcctgactccttctgccagttccctccctcaaagaaatcctccaatcaaaatcacctcccaccataatccctgtcttctttccatcccctagaaatcctgggaggcaggatccaataattttcctgtgacacttataaatatcctgctcacatctgaatctccttgttgttctttaaccctcactgggactttgtaaacttccaagtcattctcacctaaaccctctgtgaaatttgtaatatggggaagtaggaatgtggaaaacatcctgacttcagtgtctggccgatgtgggtccctctcttgaccctgtcacttgctggctgtgaaaccaggacaagctacttaacttggtagcctcgatgtcctcctctgtgaaactgggatgataataatgcctaccttgtgagggttgcttcaatgattaggaatcattctgtaaagtctagcacagttccttgcatgttgtagcagtgattcagtaagtagcaaccctgtgatactattaccaccacctgctcactggtcaaaacctacacagctgtttcctcacgtccatcactggctctctaattccacttgttcattctgtgaccctagttattttctgaaaaattggttcttctcttttcccagagaccttctgatctccaaaaagaggagatgactacatttagcccctctcttataattccaggtagataactgcattttgtagcctctctttgtttttcttttgctgatctttgtctttattagattttcctcctttcctatttccccaaagacttatcagatgctcattgctttctaagatctaaaatgatactgtgttccctcatatgcatgcccttcctttctatatccttgacaccttactttcc

SEQ ID NO: 312582 - DNA, 2654 bp, Homo sapiens
catcggccataacaacagaaatggccagtcagtcccaaggtatccagcagcttctgcaagctgagaagcgggcagctgagaaggtggcagatgccagaaagaggaaggcccggcgactgaagcaggcaaaggaggaggcacagatggaggtggagcaataccgcagagagcgagagcacgaattccagagcaagcagcaggcgacaggcattttccaaaggcaagcctggagcgcacggatctgtataaccgcggaaggccctgtttccggtcccttgcgcctgcgctcttgcagccaagaaggcgggaggctggagtagagggaagcctgcaaccggaagtgaaggcagatttccctccttcgtcgctgttgctgccgccatacgcgctctccctgtttaggtaagctttggccttcgctacaatccgtttccatctgcgcttctccgcacccatcccgtcacatgggttcctgatacccttttcacaggcgatggtctggtcgctggggcctagttggttcgctatttccttagcttgcatccctttcgagagcaaagagctcctgggggaaggaagggaagctaaggggggacccaatccaagatggtgtcctcggcgccattgtgttcgttttgctcccttcttccaatgggttcttctcatattggaggcctcagcatcaatgagaggcggtgctcggcgtcccttggtcttgttatggcagagaacgatgtggacaatgagctcttggactatgaagatgatgaggtggagacagcagctgggggagatggggctgaggcccctgccaagaaggatgtcaagggctcctatgtctccatccacagctctggctttcgtgacttcctgctcaagccagagttgctccgggccattgtcgactgtggctttgagcatccgtcagaagtccagcatgagtgcatccctcaggccattctgggaatggatgtcctgtgccaggccaagtcgggcatgggaaagacagcagtgtttgtcttggccacactgcaacagctggagccagttactgggcaggtgtctgtgctggtgatgtgtcacactcgggagttggcttttcagatcagcaaggaatatgagcgcttctctaaatacatgcccaatgtcaaggttgctgttttttttggtggtctgtctatcaagaaggatgaagaggtgctgaagaagaactgcccgcatatcgtcgtggggactccaggccgtatcctagccctggctcgaaataagagcctcaacctcaaacacattaaacactttattttggatgaatgtgataagatgcttgaacagctcgacatgcgtcgggatgtccaggaaatttttcgcatgaccccccacgagaagcaggtcatgatgttcagtgctaccttgagcaaagagatccgtccagtctgccgcaagttcatgcaagatccaatggagatcttcgtggatgatgagacgaagttgacgctgcatgggttgcagcagtactacgtgaaactgaaggacaacgagaagaaccggaagctctttgaccttctggatgtccttgagttcaaccaggtggtgatctttgtgaagtctgtgcagcggtgcattgccttggcccagctactagtggagcagaacttcccagccattgccatccaccgtgggatgccccaggaggagaggctttctcggtatcagcagtttaaagattttcaacgacgaattcttgtggctaccaacctatttggccgaggcatggacatcgagcgggtgaacattgcttttaattatgacatgcctgaggattctgacacctacctgcatcgggtggccagagcaggccggtttggcaccaagggcttggctatcacatttgtgtccgatgagaatgatgccaagatcctcaatgatgtgcaggatcgctttgaggtcaatattagtgagctgcctgatgagatagacatctcctcctacattgaacagacacggtagaagactcgcccattttggaatgtgaccgtctgtccttcaggagaggacaccagggtgggggtgaaggagacactactgcccccacccctgacagcccccaccccatggcttccatcttttgcatcaccaccactcctgaacccccatttctgatttgtcagaatttttttttaacaaaactaaaaatgaaacacatgtgtctgtggtatctataagtgcttcgtccctttattgtatttggggtgaggttattttagggcatggtccagggtgaattcctataaggcctgggtgccctgcctgctgtgagatcaaaggggaatgggactaagactgcagagccctggctcccccactgcctgccaattgcctgcggtttgtggtctcttccactttctctggcctgggaagacgctggggtgtttatgatcccaaggctcctggtgggtggtgcgtgtattttcagtgccggagggtgctgtgggcactgggggaaacttaggcacctcctccaaggctctcttggtgcctcctcatctgttccttcagcttctggatcttgagcaccagggcttgggcctcccaggctccctcctgcccttcaaggagggcctggtacagctccagctgctgctccaacaactctt

SEQ ID NO: 312583 - DNA, 5009 bp, Homo sapiens
catcggccataacaacagaaatggccagtcagtcccaaggtatccagcagcttctgcaagctgagaagcgggcagctgagaaggtggcagatgccagaaagaggaaggcccggcgactgaagcaggcaaaggaggaggcacagatggaggtggagcaataccgcagagagcgagagcacgaattccagagcaagcagcaggcgacaggcattttccaaaggcaagcctggagcgcacggatctgtataaccgcggaaggccctgtttccggtcccttgcgcctgcgctcttgcagccaagaaggcgggaggctggagtagagggaagcctgcaaccggaagtgaaggcagatttccctccttcgtcgctgttgctgccgccatacgcgctctccctgtttaggtaagctttggccttcgctacaatccgtttccatctgcgcttctccgcacccatcccgtcacatgggttcctgatacccttttcacaggcgatggtctggtcgctggggcctagttggttcgctatttccttagcttgcatccctttcgagagcaaagagctcctgggggaaggaagggaagctaaggggggacccaatccaagatggtgtcctcggcgccattgtgttcgttttgctcccttcttccaatgggttcttctcatattggaggcctcagcatcaatgagaggcggtgctcggcgtcccttggtcttggtatttgcggagggcggggctcttctcaccttccttgttctttcttgagctctttttcggccctcggtgggactgggaggaggagctggtttctgggcccagttggatttttctcaccttgacttgcccaacttaatttggagtgccttccaagtgtttacgatacgattggtgtcattgtatgtttctccaaaaggagtctcaccttcgtagcgtaacagtgatgtgagaccacttggtaaagatcctgttaaagcctgggcggggattgcctttctctgtcacctattagctttcttattgtagggtggagacatgaattttgtttttttgtggccgagccatttgtcttgcaccgcccctcccccccatgctaattacacaaggcttgcttaaacagcggaagggaggatactgagaagtgggaggctgagagctatgggaggtggacggcggccatatgatgttttcttttcgaaaggtgagcgctttgcgcagtgatgaccctcatctatcacccttgactgatggctgctgagttaggcatccataacggtgggattataatagggaaagcggagtcttcctttgaggacttttcaggactctacttgtcatctccattttccactttactaagttattagtcatattttaccttttattatctattctatttcctcactgttactttcagatcaagaatttataagttggtcttccccttccaacttttctggtttccgctactgtgattgctaatcttgttgggaacctctgtcctaaccactttccctggtactgctttttctgttctgttatatttgcttttcgtttttatgttttgtatctgtttttctttccaggtaaaagtttcctggtttagggaaagtgggaactggggatggctcttctgttagaaatagtatctttgttttcctttgctgttcctcaatcccctactcttcaccccttgttttcacctattttgcgagaacccatccagatcccccttcccttcttcccctgccggcccagttatggcagagaacgatgtggacaatgagctcttggactatgaagatgatgaggtggagacagcagctgggggagatggggctgaggcccctgccaagaaggatgtcaagggctcctatgtctccatccacagctctggctttcgtgacttcctgctcaagccagagttgctccgggccattgtcgactgtggctttgagcatccgtcagaagtccagcatgagtgcatccctcaggccattctgggaatggatgtcctgtgccaggccaagtcgggcatgggaaagacagcagtgtttgtcttggccacactgcaacagctggagccagttactgggcaggtgtctgtgctggtgatgtgtcacactcgggagttggcttttcagatcagcaaggaatatgagcgcttctctaaatacatgcccaatgtcaaggttgctgttttttttggtggtctgtctatcaagaaggatgaagaggtgctgaagaagaactgcccgcatatcgtcgtggggactccaggccgtatcctagccctggctcgaaataagagcctcaacctcaaacacattaaacactttattttggatgaatgtgataagatgcttgaacagctcgacatgcgtcgggatgtccaggaaatttttcgcatgaccccccacgagaagcaggtcatgatgttcagtgctaccttgagcaaagagatccgtccagtctgccgcaagttcatgcaagatccaatggagatcttcgtggatgatgagacgaagttgacgctgcatgggttgcagcagtactacgtgaaactgaaggacaacgagaagaaccggaagctctttgaccttctggatgtccttgagttcaaccaggtcagttagacgtccagtagggggatgagcattggagcactccagctgtagcagaaacctggatattaagtacacttttattgaggaaatcacatgtgtgatgtgggagagaataatgagggtataaatatcttaggggctgagcatgagtaaggtgggagctgcttttctattctatggctggcacgggtatgtcctcaataacctcaaggaaaataaacttcaaaaattaagatccttggccaggcacggtggcttatgtgtgtaatcccagcacttggggaggctgagggaggtggatcacttgagtccaggagtttgagaccagtctgggcaacatggcgaaacttcatcactaccaaagaagaaaaaaattagccaggtgtggtggtgtatgcctgtagtcccagatactctggtggctgaggtgagaggatagcttgagcccaggaaattgaggctgcagtgaactatgattgcactactgtgctccagcttgggcaacagagtgagatcttgtctcccatgttagggttcttgaatgtttaattcctctaataactgcttattcaagagaagcatttctgactgggtgcagggcagtggctcatgcccataatcccagtactttgggaggctgaggcaggagcattgcttgagcccaggacttcaagaccagcctgggtaacatagggagacgcccgtctctacaaatagtaaaaataaaaaataaaaaaagtagctgggcgtggtggtgtgcacctgtggtcccagctgcttgggatgctgaggtggaaggatctcttaaacccaggagggtggaggctgcagtgacttgcgattgcaccactgcactccagtctgggggacagagtgagaccccatctcaaaaaagtgtttaattaatatacttgtgagtggtctatttgcatttaaaactgctttctagaattaggatagctcccttaggtttaatgttttggtgagcaggaatatcagttacccctccagatcttaattctagttttttatcactttttcatgaggtgatctcatcctcatctcctagcatgtctggcaattttgatttctgaactctgtgctacctcagaggccagcttccttagggaaaaatcagtgctgaaataaagttatatttccttttctgctctaaatatatagtgggggaataagagaaatgaagaggaattcctgagaacgtaattactagaaactcccctctcccacgtaatgtctctcacacaccatggacccctattcccccaatttgcgaccccccaccccaccccacaacaggtggtgatctttgtgaagtctgtgcagcggtgcattgccttggcccagctactagtggagcagaacttcccagccattgccatccaccgtgggatgccccaggaggagaggctttctcggtatcagcagtttaaagattttcaacgacgaattcttgtggctaccaacctatttggccgaggcatggacatcgagcgggtgaacattgcttttaattatgacatgcctgaggattctgacacctacctgcatcgggtggccagagcaggccggtttggcaccaagggcttggctatcacatttgtgtccgatgagaatgatgccaagatcctcaatgatgtgcaggatcgctttgaggtcaatattagtgagctgcctgatgagatagacatctcctcctacattgaacagacacggtagaagactcgcccattttggaatgtgaccgtctgtccttcaggagaggacaccagggtgggggtgaaggagacactactgcccccacccctgacagcccccaccccatggcttccatcttttgcatcaccaccactcctgaacccccatttctgatttgtcagaatttttttttaacaaaactaaaaatgaaacacatgtgtctgtggtatctataagtgcttcgtccctttattgtatttggggtgaggttattttagggcatggtccagggtgaattcctataaggcctgggtgccctgcctgctgtgagatcaaaggggaatgggactaagactgcagagccctggctcccccactgcctgccaattgcctgcggtttgtggtctcttccactttctctggcctgggaagacgctggggtgtttatgatcccaaggctcctggtgggtggtgcgtgtattttcagtgccggagggtgctgtgggcactgggggaaacttaggcacctcctccaaggctctcttggtgcctcctcatctgttccttcagcttctggatcttgagcaccagggcttgggcctcccaggctccctcctgcccttcaaggagggcctggtacagctccagctgctgctccaacaactctt

SEQ ID NO: 312584 - DNA, 5276 bp, Homo sapiens
catcggccataacaacagaaatggccagtcagtcccaaggtatccagcagcttctgcaagctgagaagcgggcagctgagaaggtggcagatgccagaaagaggaaggcccggcgactgaagcaggcaaaggaggaggcacagatggaggtggagcaataccgcagagagcgagagcacgaattccagagcaagcagcaggcgacaggcattttccaaaggcaagcctggagcgcacggatctgtataaccgcggaaggccctgtttccggtcccttgcgcctgcgctcttgcagccaagaaggcgggaggctggagtagagggaagcctgcaaccggaagtgaaggcagatttccctccttcgtcgctgttgctgccgccatacgcgctctccctgtttaggtaagctttggccttcgctacaatccgtttccatctgcgcttctccgcacccatcccgtcacatgggttcctgatacccttttcacaggcgatggtctggtcgctggggcctagttggttcgctatttccttagcttgcatccctttcgagagcaaagagctcctgggggaaggaagggaagctaaggggggacccaatccaagatggtgtcctcggcgccattgtgttcgttttgctcccttcttccaatgggttcttctcatattggaggcctcagcatcaatgagaggcggtgctcggcgtcccttggtcttggtatttgcggagggcggggctcttctcaccttccttgttctttcttgagctctttttcggccctcggtgggactgggaggaggagctggtttctgggcccagttggatttttctcaccttgacttgcccaacttaatttggagtgccttccaagtgtttacgatacgattggtgtcattgtatgtttctccaaaaggagtctcaccttcgtagcgtaacagtgatgtgagaccacttgctcttctgttagaaatagtatctttgttttcctttgctgttcctcaatcccctactcttcaccccttgttttcacctattttgcgagaacccatccagatcccccttcccttcttcccctgccggcccagttatggcagagaacgatgtggacaatgagctcttggactatgaagatgatgaggtggagacagcagctgggggagatggggctgaggcccctgccaagaaggatgtcaagggctcctatgtctccatccacagctctggctttcgtgacttcctgctcaagccagagttgctccgggccattgtcgactgtggctttgagcatccgtcagaagtccagcatgagtgcatccctcaggccattctgggaatggatgtcctgtgccaggccaagtcgggcatgggaaagacagcagtgtttgtcttggccacactgcaacagctggagccagttactgggcaggtgtctgtgctggtgatgtgtcacactcgggagttggcttttcagatcagcaaggaatatgagcgcttctctaaatacatgcccaatgtcaaggttgctgttttttttggtggtctgtctatcaagaaggatgaagaggtgctgaagaagaactgcccgcatatcgtcgtggggactccaggccgtatcctagccctggctcgaaataagagcctcaacctcaaacacattaaacactttattttggatgaatgtgataagatgcttgaacagctcgacatgcgtcgggatgtccaggaaatttttcgcatgaccccccacgagaagcaggtcatgatgttcagtgctaccttgagcaaagagatccgtccagtctgccgcaagttcatgcaagattaaatacccttctaccttctctccctccactccccgcccgctgcctcctccccttcctcgccctcttcctcagactcccttgtcattcaagtgccaagaaggcggcttgtgcccaactgggagtaatgactccttgaagagacatacagaagcagagacagctagtgttagggcctgcgcgggtgccagggaaactccggaagacttggtcgggttaatgtgagagcgggtagtgttcgactttttcataaatcacaacatttttgaacctcttctcccttcgggggagggcaggatttttctgccctaccacccacccatccatcgtctcttacatgcaccctacagccacgcaccctcaaggtggcatcgagcatacagctggagccttctgctcaccaaaactcctacttcccggtggcaggagagcaagagagggacagacagatggcagggcatgtccaaaagaagagcatcagcacaaatgaatcctccccttccccacctccaggggtgggggcctttggcacctcaatccccgataccctactccttcccacccacatctccttgcacccatctggaacctcggttgatgtgagccggcaacagagaagcaccgtggcgcggcgagggaatgcagacggcacccagcggtggatggcggcagcggaggccgcggggaaacctgaccaggaagctgaggaccaaaccagcctctttttccgttcccggtttttttcctgaacccaacgcgtgccgtgccccgtttcccccaatatgtgttggggaggggtgtcctgaatggggtggtagattttttttcttaaaaaaatttttttgttttttttaatactcagaggagagggacataggaaagccaatggagatcttcgtggatgatgagacgaagttgacgctgcatgggttgcagcagtactacgtgaaactgaaggacaacgagaagaaccggaagctctttgaccttctggatgtccttgagttcaaccaggtcagttagacgtccagtagggggatgagcattggagcactccagctgtagcagaaacctggatattaagtacacttttattgaggaaatcacatgtgtgatgtgggagagaataatgagggtataaatatcttaggggctgagcatgagtaaggtgggagctgcttttctattctatggctggcacgggtatgtcctcaataacctcaaggaaaataaacttcaaaaattaagatccttggccaggcacggtggcttatgtgtgtaatcccagcacttggggaggctgagggaggtggatcacttgagtccaggagtttgagaccagtctgggcaacatggcgaaacttcatcactaccaaagaagaaaaaaattagccaggtgtggtggtgtatgcctgtagtcccagatactctggtggctgaggtgagaggatagcttgagcccaggaaattgaggctgcagtgaactatgattgcactactgtgctccagcttgggcaacagagtgagatcttgtctccaaaagtccttgaaggattttaggaagttgttaaaagtcttgaaacgatgtttgggggcatgttagggttcttgaatgtttaattcctctaataactgcttattcaagagaagcatttctgactgggtgcagggcagtggctcatgcccataatcccagtactttgggaggctgaggcaggagcattgcttgagcccaggacttcaagaccagcctgggtaacatagggagacgcccgtctctacaaatagtaaaaataaaaaataaaaaaagtagctgggcgtggtggtgtgcacctgtggtcccagctgcttgggatgctgaggtggaaggatctcttaaacccaggagggtggaggctgcagtgacttgcgattgcaccactgcactccagtctgggggacagagtgagaccccatctcaaaaaagtgtttaattaatatacttgtgagtggtctatttgcatttaaaactgctttctagaattaggatagctcccttaggtttaatgttttggtgagcaggaatatcagttacccctccagatcttaattctagttttttatcactttttcatgaggtgatctcatcctcatctcctagcatgtctggcaattttgatttctgaactctgtgctacctcagaggccagcttccttagggaaaaatcagtgctgaaataaagttatatttccttttctgctctaaatatatagtgggggaataagagaaatgaagaggaattcctgagaacgtaattactagaaactcccctctcccacgtaatgtctctcacacaccatggacccctattcccccaatttgcgaccccccaccccaccccacaacaggtggtgatctttgtgaagtctgtgcagcggtgcattgccttggcccagctactagtggagcagaacttcccagccattgccatccaccgtgggatgccccaggaggagaggctttctcggtatcagcagtttaaagattttcaacgacgaattcttgtggctaccaacctatttggccgaggcatggacatcgagcgggtgaacattgcttttaattatgacatgcctgaggattctgacacctacctgcatcgggtggccagagcaggccggtttggcaccaagggcttggctatcacatttgtgtccgatgagaatgatgccaagatcctcaatgatgtgcaggatcgctttgaggtcaatattagtgagctgcctgatgagatagacatctcctcctacattgaacagacacggtagaagactcgcccattttggaatgtgaccgtctgtccttcaggagaggacaccagggtgggggtgaaggagacactactgcccccacccctgacagcccccaccccatggcttccatcttttgcatcaccaccactcctgaacccccatttctgatttgtcagaatttttttttaacaaaactaaaaatgaaacacatgtgtctgtggtatctataagtgcttcgtccctttattgtatttggggtgaggttattttagggcatggtccagggtgaattcctataaggcctgggtgccctgcctgctgtgagatcaaaggggaatgggactaagactgcagagccctggctcccccactgcctgccaattgcctgcggtttgtggtctcttccactttctctggcctgggaagacgctggggtgtttatgatcccaaggctcctggtgggtggtgcgtgtattttcagtgccggagggtgctgtgggcactgggggaaacttaggcacctcctccaaggctctcttggtgcctcctcatctgttccttcagcttctggatcttgagcaccagggcttgggcctcccaggctccctcctgcccttcaaggagggcctggtacagctccagctgctgctccaacaactctt

SEQ ID NO: 312585 - DNA, 4572 bp, Homo sapiens
catcggccataacaacagaaatggccagtcagtcccaaggtatccagcagcttctgcaagctgagaagcgggcagctgagaaggtggcagatgccagaaagaggaaggcccggcgactgaagcaggcaaaggaggaggcacagatggaggtggagcaataccgcagagagcgagagcacgaattccagagcaagcagcaggcgacaggcattttccaaaggcaagcctggagcgcacggatctgtataaccgcggaaggccctgtttccggtcccttgcgcctgcgctcttgcagccaagaaggcgggaggctggagtagagggaagcctgcaaccggaagtgaaggcagatttccctccttcgtcgctgttgctgccgccatacgcgctctccctgtttaggtaagctttggccttcgctacaatccgtttccatctgcgcttctccgcacccatcccgtcacatgggttcctgatacccttttcacaggcgatggtctggtcgctggggcctagttggttcgctatttccttagcttgcatccctttcgagagcaaagagctcctgggggaaggaagggaagctaaggggggacccaatccaagatggtgtcctcggcgccattgtgttcgttttgctcccttcttccaatgggttcttctcatattggaggcctcagcatcaatgagaggcggtgctcggcgtcccttggtcttggtatttgcggagggcggggctcttctcaccttccttgttctttcttgagctctttttcggccctcggtgggactgggaggaggagctggtttctgggcccagttggatttttctcaccttgacttgcccaacttaatttggagtgccttccaagtgtttacgatacgattggtgtcattgtatgtttctccaaaaggagtctcaccttcgtagcgtaacagtgatgtgagaccacttggtaaagatcctgttaaagcctgggcggggattgcctttctctgtcacctattagctttcttattgtagggtggagacatgaattttgtttttttgtggccgagccatttgtcttgcaccgcccctcccccccatgctaattacacaaggcttgcttaaacagcggaagggaggatactgagaagtgggaggctgagagctatgggaggtggacggcggccatatgatgttttcttttcgaaaggtgagcgctttgcgcagtgatgaccctcatctatcacccttgactgatggctgctgagttaggcatccataacggtgggattataatagggaaagcggagtcttcctttgaggacttttcaggactctacttgtcatctccattttccactttactaagttattagtcatattttaccttttattatctattctatttcctcactgttactttcagatcaagaatttataagttggtcttccccttccaacttttctggtttccgctactgtgattgctaatcttgttgggaacctctgtcctaaccactttccctggtactgctttttctgttctgttatatttgcttttcgtttttatgttttgtatctgtttttctttccaggtaaaagtttcctggtttagggaaagtgggaactggggatggctcttctgttagaaatagtatctttgttttcctttgctgttcctcaatcccctactcttcaccccttgttttcacctattttgcgagaacccatccagatcccccttcccttcttcccctgccggcccagttatggcagagaacgatgtggacaatgagctcttggactatgaagatgatgaggtggagacagcagctgggggagatggggctgaggcccctgccaagaaggatgtcaagggctcctatgtctccatccacagctctggctttcgtgacttcctgctcaagccagagttgctccgggccattgtcgactgtggctttgagcatccgtcagaagtccagcatgagtgcatccctcaggccattctgggaatggatgtcctgtgccaggccaagtcgggcatgggaaagacagcagtgtttgtcttggccacactgcaacagctggagccagttactgggcaggtgtctgtgctggtgatgtgtcacactcgggagttggcttttcagatcagcaaggaatatgagcgcttctctaaatacatgcccaatgtcaaggttgctgttttttttggtggtctgtctatcaagaaggatgaagaggtgctgaagaagaactgcccgcatatcgtcgtggggactccaggccgtatcctagccctggctcgaaataagagcctcaacctcaaacacattaaacactttattttggatgaatgtgataagatgcttgaacagctcgacatgcgtcgggatgtccaggaaatttttcgcatgaccccccacgagaagcaggtcatgatgttcagtgctaccttgagcaaagagatccgtccagtctgccgcaagttcatgcaagattaaatacccttctaccttctctccctccactccccgcccgctgcctcctccccttcctcgccctcttcctcagactcccttgtcattcaagtgccaagaaggcggcttgtgcccaactgggagtaatgactccttgaagagacatacagaagcagagacagctagtgttagggcctgcgcgggtgccagggaaactccggaagacttggtcgggttaatgtgagagcgggtagtgttcgactttttcataaatcacaacatttttgaacctcttctcccttcgggggagggcaggatttttctgccctaccacccacccatccatcgtctcttacatgcaccctacagccacgcaccctcaaggtggcatcgagcatacagctggagccttctgctcaccaaaactcctacttcccggtggcaggagagcaagagagggacagacagatggcagggcatgtccaaaagaagagcatcagcacaaatgaatcctccccttccccacctccaggggtgggggcctttggcacctcaatccccgataccctactccttcccacccacatctccttgcacccatctggaacctcggttgatgtgagccggcaacagagaagcaccgtggcgcggcgagggaatgcagacggcacccagcggtggatggcggcagcggaggccgcggggaaacctgaccaggaagctgaggaccaaaccagcctctttttccgttcccggtttttttcctgaacccaacgcgtgccgtgccccgtttcccccaatatgtgttggggaggggtgtcctgaatggggtggtagattttttttcttaaaaaaatttttttgttttttttaatactcagaggagagggacataggaaagccaatggagatcttcgtggatgatgagacgaagttgacgctgcatgggttgcagcagtactacgtgaaactgaaggacaacgagaagaaccggaagctctttgaccttctggatgtccttgagttcaaccaggtggtgatctttgtgaagtctgtgcagcggtgcattgccttggcccagctactagtggagcagaacttcccagccattgccatccaccgtgggatgccccaggaggagaggctttctcggtatcagcagtttaaagattttcaacgacgaattcttgtggctaccaacctatttggccgaggcatggacatcgagcgggtgaacattgcttttaattatgacatgcctgaggattctgacacctacctgcatcgggtggccagagcaggccggtttggcaccaagggcttggctatcacatttgtgtccgatgagaatgatgccaagatcctcaatgatgtgcaggatcgctttgaggtcaatattagtgagctgcctgatgagatagacatctcctcctacattgaacagacacggtagaagactcgcccattttggaatgtgaccgtctgtccttcaggagaggacaccagggtgggggtgaaggagacactactgcccccacccctgacagcccccaccccatggcttccatcttttgcatcaccaccactcctgaacccccatttctgatttgtcagaatttttttttaacaaaactaaaaatgaaacacatgtgtctgtggtatctataagtgcttcgtccctttattgtatttggggtgaggttattttagggcatggtccagggtgaattcctataaggcctgggtgccctgcctgctgtgagatcaaaggggaatgggactaagactgcagagccctggctcccccactgcctgccaattgcctgcggtttgtggtctcttccactttctctggcctgggaagacgctggggtgtttatgatcccaaggctcctggtgggtggtgcgtgtattttcagtgccggagggtgctgtgggcactgggggaaacttaggcacctcctccaaggctctcttggtgcctcctcatctgttccttcagcttctggatcttgagcaccagggcttgggcctcccaggctccctcctgcccttcaaggagggcctggtacagctccagctgctgctccaacaactctt

SEQ ID NO: 312586 - DNA, 3329 bp, Homo sapiens
catcggccataacaacagaaatggccagtcagtcccaaggtatccagcagcttctgcaagctgagaagcgggcagctgagaaggtggcagatgccagaaagaggaaggcccggcgactgaagcaggcaaaggaggaggcacagatggaggtggagcaataccgcagagagcgagagcacgaattccagagcaagcagcaggcgacaggcattttccaaaggcaagcctggagcgcacggatctgtataaccgcggaaggccctgtttccggtcccttgcgcctgcgctcttgcagccaagaaggcgggaggctggagtagagggaagcctgcaaccggaagtgaaggcagatttccctccttcgtcgctgttgctgccgccatacgcgctctccctgtttaggtaagctttggccttcgctacaatccgtttccatctgcgcttctccgcacccatcccgtcacatgggttcctgatacccttttcacaggcgatggtctggtcgctggggcctagttggttcgctatttccttagcttgcatccctttcgagagcaaagagctcctgggggaaggaagggaagctaaggggggacccaatccaagatggtgtcctcggcgccattgtgttcgttttgctcccttcttccaatgggttcttctcatattggaggcctcagcatcaatgagaggcggtgctcggcgtcccttggtcttggtatttgcggagggcggggctcttctcaccttccttgttctttcttgagctctttttcggccctcggtgggactgggaggaggagctggtttctgggcccagttggatttttctcaccttgacttgcccaacttaatttggagtgccttccaagtgtttacgatacgattggtgtcattgtatgtttctccaaaaggagtctcaccttcgtagcgtaacagtgatgtgagaccacttggtaaagatcctgttaaagcctgggcggggattgcctttctctgtcacctattagctttcttattgtagggtggagacatgaattttgtttttttgtggccgagccatttgtcttgcaccgcccctcccccccatgctaattacacaaggcttgcttaaacagcggaagggaggatactgagaagtgggaggctgagagctatgggaggtggacggcggccatatgatgttttcttttcgaaaggtgagcgctttgcgcagtgatgaccctcatctatcacccttgactgatggctgctgagttaggcatccataacggtgggattataatagggaaagcggagtcttcctttgaggacttttcaggactctacttgtcatctccattttccactttactaagttattagtcatattttaccttttattatctattctatttcctcactgttactttcagatcaagaatttataagttggtcttccccttccaacttttctggtttccgctactgtgattgctaatcttgttgggaacctctgtcctaaccactttccctggtactgctttttctgttctgttatatttgcttttcgtttttatgttttgtatctgtttttctttccaggtaaaagtttcctggtttagggaaagtgggaactggggatggctcttctgttagaaatagtatctttgttttcctttgctgttcctcaatcccctactcttcaccccttgttttcacctattttgcgagaacccatccagatcccccttcccttcttcccctgccggcccagttatggcagagaacgatgtggacaatgagctcttggactatgaagatgatgaggtggagacagcagctgggggagatggggctgaggcccctgccaagaaggataaggatgaagaggtgctgaagaagaactgcccgcatatcgtcgtggggactccaggccgtatcctagccctggctcgaaataagagcctcaacctcaaacacattaaacactttattttggatgaatgtgataagatgcttgaacagctcgacatgcgtcgggatgtccaggaaatttttcgcatgaccccccacgagaagcaggtcatgatgttcagtgctaccttgagcaaagagatccgtccagtctgccgcaagttcatgcaagatccaatggagatcttcgtggatgatgagacgaagttgacgctgcatgggttgcagcagtactacgtgaaactgaaggacaacgagaagaaccggaagctctttgaccttctggatgtccttgagttcaaccaggtggtgatctttgtgaagtctgtgcagcggtgcattgccttggcccagctactagtggagcagaacttcccagccattgccatccaccgtgggatgccccaggaggagaggctttctcggtatcagcagtttaaagattttcaacgacgaattcttgtggctaccaacctatttggccgaggcatggacatcgagcgggtgaacattgcttttaattatgacatgcctgaggattctgacacctacctgcatcgggtggccagagcaggccggtttggcaccaagggcttggctatcacatttgtgtccgatgagaatgatgccaagatcctcaatgatgtgcaggatcgctttgaggtcaatattagtgagctgcctgatgagatagacatctcctcctacattgaacagacacggtagaagactcgcccattttggaatgtgaccgtctgtccttcaggagaggacaccagggtgggggtgaaggagacactactgcccccacccctgacagcccccaccccatggcttccatcttttgcatcaccaccactcctgaacccccatttctgatttgtcagaatttttttttaacaaaactaaaaatgaaacacatgtgtctgtggtatctataagtgcttcgtccctttattgtatttggggtgaggttattttagggcatggtccagggtgaattcctataaggcctgggtgccctgcctgctgtgagatcaaaggggaatgggactaagactgcagagccctggctcccccactgcctgccaattgcctgcggtttgtggtctcttccactttctctggcctgggaagacgctggggtgtttatgatcccaaggctcctggtgggtggtgcgtgtattttcagtgccggagggtgctgtgggcactgggggaaacttaggcacctcctccaaggctctcttggtgcctcctcatctgttccttcagcttctggatcttgagcaccagggcttgggcctcccaggctccctcctgcccttcaaggagggcctggtacagctccagctgctgctccaacaactctt

SEQ ID NO: 312587 - DNA, 4019 bp, Homo sapiens
catcggccataacaacagaaatggccagtcagtcccaaggtatccagcagcttctgcaagctgagaagcgggcagctgagaaggtggcagatgccagaaagaggaaggcccggcgactgaagcaggcaaaggaggaggcacagatggaggtggagcaataccgcagagagcgagagcacgaattccagagcaagcagcaggcgacaggcattttccaaaggcaagcctggagcgcacggatctgtataaccgcggaaggccctgtttccggtcccttgcgcctgcgctcttgcagccaagaaggcgggaggctggagtagagggaagcctgcaaccggaagtgaaggcagatttccctccttcgtcgctgttgctgccgccatacgcgctctccctgtttaggtaagctttggccttcgctacaatccgtttccatctgcgcttctccgcacccatcccgtcacatgggttcctgatacccttttcacaggcgatggtctggtcgctggggcctagttggttcgctatttccttagcttgcatccctttcgagagcaaagagctcctgggggaaggaagggaagctaaggggggacccaatccaagatggtgtcctcggcgccattgtgttcgttttgctcccttcttccaatgggttcttctcatattggaggcctcagcatcaatgagaggcggtgctcggcgtcccttggtcttggtatttgcggagggcggggctcttctcaccttccttgttctttcttgagctctttttcggccctcggtgggactgggaggaggagctggtttctgggcccagttggatttttctcaccttgacttgcccaacttaatttggagtgccttccaagtgtttacgatacgattggtgtcattgtatgtttctccaaaaggagtctcaccttcgtagcgtaacagtgatgtgagaccacttggtaaagatcctgttaaagcctgggcggggattgcctttctctgtcacctattagctttcttattgtagggtggagacatgaattttgtttttttgtggccgagccatttgtcttgcaccgcccctcccccccatgctaattacacaaggcttgcttaaacagcggaagggaggatactgagaagtgggaggctgagagctatgggaggtggacggcggccatatgatgttttcttttcgaaaggtgagcgctttgcgcagtgatgaccctcatctatcacccttgactgatggctgctgagttaggcatccataacggtgggattataatagggaaagcggagtcttcctttgaggacttttcaggactctacttgtcatctccattttccactttactaagttattagtcatattttaccttttattatctattctatttcctcactgttactttcagatcaagaatttataagttggtcttccccttccaacttttctggtttccgctactgtgattgctaatcttgttgggaacctctgtcctaaccactttccctggtactgctttttctgttctgttatatttgcttttcgtttttatgttttgtatctgtttttctttccaggtaaaagtttcctggtttagggaaagtgggaactggggatggctcttctgttagaaatagtatctttgttttcctttgctgttcctcaatcccctactcttcaccccttgttttcacctattttgcgagaacccatccagatcccccttcccttcttcccctgccggcccagttatggcagagaacgatgtggacaatgagctcttggactatgaagatgatgaggtggagacagcagctgggggagatggggctgaggcccctgccaagaaggatgtcaagggctcctatgtctccatccacagctctggctttcgtgacttcctgctcaagccagagttgctccgggccattgtcgactgtggctttgagcatccgtcagaagtccagcatgagtgcatccctcaggccattctgggaatggatgtcctgtgccaggccaagtcgggcatgggaaagacagcagtgtttgtcttggccacactgcaacagctggagccagttactgggcaggtgtctgtgctggtgatgtgtcacactcgggagttggcttttcagatcagcaaggaatatgagcgcttctctaaatacatgcccaatgtcaaggttgctgttttttttggtggtctgtctatcaagaaggatgaagaggtgctgaagaagaactgcccgcatatcgtcgtggggactccaggccgtatcctagccctggctcgaaataagagcctcaacctcaaacacattaaacactttattttggatgaatgtgataagatgcttgaacagctcgacatgcgtcgggatgtccaggaaatttttcgcatgaccccccacgagaagcaggtcatgatgttcagtgctaccttgagcaaagagatccgtccagtctgccgcaagttcatgcaagatccaatggagatcttcgtggatgatgagacgaagttgacgctgcatgggttgcagcagtactacgtgaaactgaaggacaacgagaagaaccggaagctctttgaccttctggatgtccttgagttcaaccaggtggtgatctttgtgaagtctgtgcagcggtgcattgccttggcccagctactagtggagcagaacttcccagccattgccatccaccgtgggatgccccaggaggagaggctttctcggtatcagcagtttaaagattttcaacgacgaattcttgtggctaccaacctatttggccgaggcatggacatcgagcgggtgaacattgcttttaattatgacatgcctgaggattctgacacctacctgcatcgggtggccagagcaggccggtttggcaccaagggcttggctatcacatttgtgtccgatgagaatgatgccaagatcctcaatgatgtgcaggatcgctttgaggtcaatattagtgagctgcctgatgagatagacatctcctcctacagtgagtactgatctcatgaaaccctttaggtcctccctgttccttagtgtgtttgtcctaaatcccatcacataggtcatgggcatctgatgcataatggacacttgactggttcatgccccctggtctttgatgctgtgttgggatgtttttctgacctttatgtggggtttctgtcttctctcatcatattacatcccttccctcacccccacgtccgtcctctgaacccaggcagtacaccagtgtctgcatgtgtgccgtgtgttcctgcctcactttccccttttcatgccttattctgaccatgctacgttttcttctcagttgaacagacacggtagaagactcgcccattttggaatgtgaccgtctgtccttcaggagaggacaccagggtgggggtgaaggagacactactgcccccacccctgacagcccccaccccatggcttccatcttttgcatcaccaccactcctgaacccccatttctgatttgtcagaatttttttttaacaaaactaaaaatgaaacacatgtgtctgtggtatctataagtgcttcgtccctttattgtatttggggtgaggttattttagggcatggtccagggtgaattcctataaggcctgggtgccctgcctgctgtgagatcaaaggggaatgggactaagactgcagagccctggctcccccactgcctgccaattgcctgcggtttgtggtctcttccactttctctggcctgggaagacgctggggtgtttatgatcccaaggctcctggtgggtggtgcgtgtattttcagtgccggagggtgctgtgggcactgggggaaacttaggcacctcctccaaggctctcttggtgcctcctcatctgttccttcagcttctggatcttgagcaccagggcttgggcctcccaggctccctcctgcccttcaaggagggcctggtacagctccagctgctgctccaacaactctt

SEQ ID NO: 312588 - DNA, 3690 bp, Homo sapiens
  misc_feature (2729)..(2729): n is a, c, g, or t
  misc_feature (2737)..(2737): n is a, c, g, or t
  misc_feature (2742)..(2742): n is a, c, g, or t
  misc_feature (2753)..(2753): n is a, c, g, or t
  misc_feature (2755)..(2755): n is a, c, g, or t
  misc_feature (2759)..(2759): n is a, c, g, or t
  misc_feature (2772)..(2772): n is a, c, g, or t
  misc_feature (2775)..(2776): n is a, c, g, or t
  misc_feature (2778)..(2778): n is a, c, g, or t
  misc_feature (2782)..(2782): n is a, c, g, or t
  misc_feature (2804)..(2804): n is a, c, g, or t
  misc_feature (2813)..(2813): n is a, c, g, or t
  misc_feature (2817)..(2817): n is a, c, g, or t
  misc_feature (2821)..(2821): n is a, c, g, or t
  misc_feature (2830)..(2830): n is a, c, g, or t
  misc_feature (2833)..(2836): n is a, c, g, or t
  misc_feature (2840)..(2840): n is a, c, g, or t
  misc_feature (2843)..(2843): n is a, c, g, or t
  misc_feature (2854)..(2855): n is a, c, g, or t
  misc_feature (2861)..(2861): n is a, c, g, or t
  misc_feature (2867)..(2867): n is a, c, g, or t
  misc_feature (2874)..(2874): n is a, c, g, or t
  misc_feature (2885)..(2885): n is a, c, g, or t
  misc_feature (2887)..(2887): n is a, c, g, or t
  misc_feature (2903)..(2903): n is a, c, g, or t
  misc_feature (2933)..(2933): n is a, c, g, or t
  misc_feature (2936)..(2936): n is a, c, g, or t
  misc_feature (2938)..(2938): n is a, c, g, or t
  misc_feature (2960)..(2960): n is a, c, g, or t
  misc_feature (2964)..(2964): n is a, c, g, or t
  misc_feature (2968)..(2969): n is a, c, g, or t
  misc_feature (2975)..(2976): n is a, c, g, or t
  misc_feature (2982)..(2982): n is a, c, g, or t
  misc_feature (3007)..(3007): n is a, c, g, or t
  misc_feature (3020)..(3020): n is a, c, g, or t
catcggccataacaacagaaatggccagtcagtcccaaggtatccagcagcttctgcaagctgagaagcgggcagctgagaaggtggcagatgccagaaagaggaaggcccggcgactgaagcaggcaaaggaggaggcacagatggaggtggagcaataccgcagagagcgagagcacgaattccagagcaagcagcaggcgacaggcattttccaaaggcaagcctggagcgcacggatctgtataaccgcggaaggccctgtttccggtcccttgcgcctgcgctcttgcagccaagaaggcgggaggctggagtagagggaagcctgcaaccggaagtgaaggcagatttccctccttcgtcgctgttgctgccgccatacgcgctctccctgtttaggtaagctttggccttcgctacaatccgtttccatctgcgcttctccgcacccatcccgtcacatgggttcctgatacccttttcacaggcgatggtctggtcgctggggcctagttggttcgctatttccttagcttgcatccctttcgagagcaaagagctcctgggggaaggaagggaagctaaggggggacccaatccaagatggtgtcctcggcgccattgtgttcgttttgctcccttcttccaatgggttcttctcatattggaggcctcagcatcaatgagaggcggtgctcggcgtcccttggtcttggtatttgcggagggcggggctcttctcaccttccttgttctttcttgagctctttttcggccctcggtgggactgggaggaggagctggtttctgggcccagttggatttttctcaccttgacttgcccaacttaatttggagtgccttccaagtgtttacgatacgattggtgtcattgtatgtttctccaaaaggagtctcaccttcgtagcgtaacagtgatgtgagaccacttggtaaagatcctgttaaagcctgggcggggattgcctttctctgtcacctattagctttcttattgtagggtggagacatgaattttgtttttttgtggccgagccatttgtcttgcaccgcccctcccccccatgctaattacacaaggcttgcttaaacagcggaagggaggatactgagaagtgggaggctgagagctatgggaggtggacggcggccatatgatgttttcttttcgaaaggtgagcgctttgcgcagtgatgaccctcatctatcacccttgactgatggctgctgagttaggcatccataacggtgggattataatagggaaagcggagtcttcctttgaggacttttcaggactctacttgtcatctccattttccactttactaagttattagtcatattttaccttttattatctattctatttcctcactgttactttcagatcaagaatttataagttggtcttccccttccaacttttctggtttccgctactgtgattgctaatcttgttgggaacctctgtcctaaccactttccctggtactgctttttctgttctgttatatttgcttttcgtttttatgttttgtatctgtttttctttccaggtaaaagtttcctggtttagggaaagtgggaactggggatggctcttctgttagaaatagtatctttgttttcctttgctgttcctcaatcccctactcttcaccccttgttttcacctattttgcgagaacccatccagatcccccttcccttcttcccctgccggcccagttatggcagagaacgatgtggacaatgagctcttggactatgaagatgatgaggtggagacagcagctgggggagatggggctgaggcccctgccaagaaggatgtcaagggctcctatgtctccatccacagctctggctttcgtgacttcctgctcaagccagagttgctccgggccattgtcgactgtggctttgagcatccgtcagaagtccagcatgagtgcatccctcaggccattctgggaatggatgtcctgtgccaggccaagtcgggcatgggaaagacagcagtgtttgtcttggccacactgcaacagctggagccagttactgggcaggtgtctgtgctggtgatgtgtcacactcgggagttggcttttcagatcagcaaggaatatgagcgcttctctaaatacatgcccaatgtcaaggttgctgttttttttggtggtctgtctatcaagaaggatgaagaggtgctgaagaagaactgcccgcatatcgtcgtggggactccaggccgtatcctagccctggctcgaaataagagcctcaacctcaaacacattaaacactttattttggatgaatgtgataagatgcttgaacagctcgacatgcgtcgggatgtccaggaaatttttcgcatgaccccccacgagaagcaggtcatgatgttcagtgctaccttgagcaaagagatccgtccagtctgccgcaagttcatgcaagatccaatggagatcttcgtggatgatgagacgaagttgacgctgcatgggttgcagcagtactacgtgaaactgaaggacaacgagaagaaccggaagctctttgaccttctggatgtccttgagttcaaccaggtggtgatctttgtgaagtctgtgcagcggtgcattgccttggcccagctactagtggagcagaacttcccagccaccccacccaccctcaatcccccaaaacnacaccctntctcnctatcaccacntnaaanattatcaacaacnaanncntctngccaccaacccatttcccccanccatccacncccncccncccaacatnccnnnnaacnatnacacccctgannaccccnacaccnacccccnccccccccccncnccacccccccttcccnccaagcccctcccaatcacattcctccccnatnanaataatcccaaaacccccaatnatgngcannaccccnntgaccncaatattactgagctccctgatganatacacacccccncctacattgaacagacacggtagaagactcgcccattttggaatgtgaccgtctgtccttcaggagaggacaccagggtgggggtgaaggagacactactgcccccacccctgacagcccccaccccatggcttccatcttttgcatcaccaccactcctgaacccccatttctgatttgtcagaatttttttttaacaaaactaaaaatgaaacacatgtgtctgtggtatctataagtgcttcgtccctttattgtatttggggtgaggttattttagggcatggtccagggtgaattcctataaggcctgggtgccctgcctgctgtgagatcaaaggggaatgggactaagactgcagagccctggctcccccactgcctgccaattgcctgcggtttgtggtctcttccactttctctggcctgggaagacgctggggtgtttatgatcccaaggctcctggtgggtggtgcgtgtattttcagtgccggagggtgctgtgggcactgggggaaacttaggcacctcctccaaggctctcttggtgcctcctcatctgttccttcagcttctggatcttgagcaccagggcttgggcctcccaggctccctcctgcccttcaaggagggcctggtacagctccagctgctgctccaacaactctt

SEQ ID NO: 312589 - DNA, 2808 bp, Homo sapiens
catcggccataacaacagaaatggccagtcagtcccaaggtatccagcagcttctgcaagctgagaagcgggcagctgagaaggtggcagatgccagaaagaggaaggcccggcgactgaagcaggcaaaggaggaggcacagatggaggtggagcaataccgcagagagcgagagcacgaattccagagcaagcagcaggcgacaggcattttccaaaggcaagcctggagcgcacggatctgtataaccgcggaaggccctgtttccggtcccttgcgcctgcgctcttgcagccaagaaggcgggaggctggagtagagggaagcctgcaaccggaagtgaaggcagatttccctccttcgtcgctgttgctgccgccatacgcgctctccctgtttaggtaagctttggccttcgctacaatccgtttccatctgcgcttctccgcacccatcccgtcacatgggttcctgatacccttttcacaggcgatggtctggtcgctggggcctagttggttcgctatttccttagcttgcatccctttcgagagcaaagagctcctgggggaaggaagggaagctaaggggggacccaatccaagatggtgtcctcggcgccattgtgttcgttttgctcccttcttccaatgggttcttctcatattggaggcctcagcatcaatgagaggcggtgctcggcgtcccttggtcttggtatttgcggagggcggggctcttctcaccttccttgttctttcttgagctctttttcggccctcggtgggactgggaggaggagctggtttctgggcccagttggatttttctcaccttgacttgcccaacttaatttggagtgccttccaagtgtttacgatacgattggtgtcattgtatgtttctccaaaaggagtctcaccttcgtagcgtaacagtgatgtgagaccacttggtaaagatcctgttaaagcctgggcggggattgcctttctctgtcacctattagctttcttattgtagggtggagacatgaattttgtttttttgtggccgagccatttgtcttgcaccgcccctcccccccatgctaattacacaaggcttgcttaaacagcggaagggaggatactgagaagtgggaggctgagagctatgggaggtggacggcggccatatgatgttttcttttcgaaaggtgagcgctttgcgcagtgatgaccctcatctatcacccttgactgatggctgctgagttaggcatccataacggtgggattataatagggaaagcggagtcttcctttgaggacttttcaggactctacttgtcatctccattttccactttactaagttattagtcatattttaccttttattatctattctatttcctcactgttactttcagatcaagaatttataagttggtcttccccttccaacttttctggtttccgctactgtgattgctaatcttgttgggaacctctgtcctaaccactttccctggtactgctttttctgttctgttatatttgcttttcgtttttatgttttgtatctgtttttctttccaggtaaaagtttcctggtttagggaaagtgggaactggggatggctcttctgttagaaatagtatctttgttttcctttgctgttcctcaatcccctactcttcaccccttgttttcacctattttgcgagaacccatccagatcccccttcccttcttcccctgccggcccagttatggcagagaacgatgtggacaatgagctcttggactatgaagatgatgaggtggagacagcagctgggggagatggggctgaggcccctgccaagaaggatgtcaagggctcctatgtctccatccacagctctggctttcgtgacttcctgctcaagccagagttgctccgggccattgtcgactgtggctttgagcatccgtcagaagtccagcatgagtgcatccctcaggccattctgggaatggatgtcctgtgccaggccaagtcgggcatgggaaagacagcagtgtttgtcttggccacactgcaacagctggagccagttactgggcaggtgtctgtgctggtgatgtgtcacactcgggagttggcttttcagatttgaacagacacggtagaagactcgcccattttggaatgtgaccgtctgtccttcaggagaggacaccagggtgggggtgaaggagacactactgcccccacccctgacagcccccaccccatggcttccatcttttgcatcaccaccactcctgaacccccatttctgatttgtcagaatttttttttaacaaaactaaaaatgaaacacatgtgtctgtggtatctataagtgcttcgtccctttattgtatttggggtgaggttattttagggcatggtccagggtgaattcctataaggcctgggtgccctgcctgctgtgagatcaaaggggaatgggactaagactgcagagccctggctcccccactgcctgccaattgcctgcggtttgtggtctcttccactttctctggcctgggaagacgctggggtgtttatgatcccaaggctcctggtgggtggtgcgtgtattttcagtgccggagggtgctgtgggcactgggggaaacttaggcacctcctccaaggctctcttggtgcctcctcatctgttccttcagcttctggatcttgagcaccagggcttgggcctcccaggctccctcctgcccttcaaggagggcctggtacagctccagctgctgctccaacaactctt

SEQ ID NO: 312590 - DNA, 2692 bp, Homo sapiens
catcggccataacaacagaaatggccagtcagtcccaaggtatccagcagcttctgcaagctgagaagcgggcagctgagaaggtggcagatgccagaaagaggaaggcccggcgactgaagcaggcaaaggaggaggcacagatggaggtggagcaataccgcagagagcgagagcacgaattccagagcaagcagcaggcgacaggcattttccaaaggcaagcctggagcgcacggatctgtataaccgcggaaggccctgtttccggtcccttgcgcctgcgctcttgcagccaagaaggcgggaggctggagtagagggaagcctgcaaccggaagtgaaggcagatttccctccttcgtcgctgttgctgccgccatacgcgctctccctgtttaggtaagctttggccttcgctacaatccgtttccatctgcgcttctccgcacccatcccgtcacatgggttcctgatacccttttcacaggcgatggtctggtcgctggggcctagttggttcgctatttccttagcttgcatccctttcgagagcaaagagctcctgggggaaggaagggaagctaaggggggacccaatccaagatggtgtcctcggcgccattgtgttcgttttgctcccttcttccaatgggttcttctcatattggaggcctcagcatcaatgagaggcggtgctcggcgtcccttggtcttggtatttgcggagggcggggctcttctcaccttccttgttctttcttgagctctttttcggccctcggtgggactgggaggaggagctggtttctgggcccagttggatttttctcaccttgacttgcccaacttaatttggagtgccttccaagtgtttacgatacgattggtgtcattgtatgtttctccaaaaggagtctcaccttcgtagcgtaacagtgatgtgagaccacttggtaaagatcctgttaaagcctgggcggggattgcctttctctgtcacctattagctttcttattgtagggtggagacatgaattttgtttttttgtggccgagccatttgtcttgcaccgcccctcccccccatgctaattacacaaggcttgcttaaacagcggaagggaggatactgagaagtgggaggctgagagctatgggaggtggacggcggccatatgatgttttcttttcgaaaggtgagcgctttgcgcagtgatgaccctcatctatcacccttgactgatggctgctgagttaggcatccataacggtgggattataatagggaaagcggagtcttcctttgaggacttttcaggactctacttgtcatctccattttccactttactaagttattagtcatattttaccttttattatctattctatttcctcactgttactttcagatcaagaatttataagttggtcttccccttccaacttttctggtttccgctactgtgattgctaatcttgttgggaacctctgtcctaaccactttccctggtactgctttttctgttctgttatatttgcttttcgtttttatgttttgtatctgtttttctttccaggtaaaagtttcctggtttagggaaagtgggaactggggatggctcttctgttagaaatagtatctttgttttcctttgctgttcctcaatcccctactcttcaccccttgttttcacctattttgcgagaacccatccagatcccccttcccttcttcccctgccggcccagttatggcagagaacgatgtggacaatgagctcttggactatgaagatgatgaggtggagacagcagctgggggagatggggctgaggcccctgccaagaaggatgtcaagggctcctatgtctccatccacagctctggctttcgtgacttcctgctcaagccagagttgctccgggccattgtcgactgtggctttgagcatccgtcagaagtccagcatgagtgcatccctcaggccattctgggaatggatgtcctgtgccaggccaagtcgggcatgggaaagacagcagtgtttgtcttggccacactgcaacagctggagccagttactgggcaggtgtctgtgctggtgatgtgtcacactcgggagttggcttttcagatcagcaaggaatatgagcgcttctctaaatacatgcccaatgtcaagtgctgtaataagcgggtctggtctatcaagaacgcgatgaacgagggtgcctgcagaaagaacggcaccagaatatcaggacgatgagaggactccaagggccgaaaatccgtcagccctcggagctcggaaacaagaagccgtcaagccgcgaaaaacaataagacacggtaagcggcctgacctgtgccaccggacggctgaaccagcgctggaccagtgggatgaggggatgtgcaccaagggaacgatcaagagcgacaagagaacgacgcccgacagaagggaaaggcgggggcacggaaagtgtacaagatgcaaaacgcgcggcaagcaaaggaagcaggcggtcaaggacggcagagcacgagatcactggcaagggaccgcaaatgagaggacactctccggggcagtcacgggagaagcgaagacggcgagccagcacacggggcggcgaagacagagaagaggcaggcacagcgagagacacacgaagaga

SEQ ID NO: 312591 - DNA, 1194 bp, Homo sapiens
ataaatggggaggggagagcccactgggtagaaggaacagggagcggccaggatgctgaatctgctgctgctggcgctgcccgtcctggcgagccgcgcctacgcggcccctgccccaggccaggccctgcagcgagtgggcatcgttgggggtcaggaggcccccaggagcaagtggccctggcaggtgagcctgagagtccacggcccatactggatgcacttctgcgggggctccctcatccacccccagtgggtgctgaccgcagcgcactgcgtgggaccggacgtcaaggatctggccgccctcagggtgcaactgcgggagcagcacctctactaccaggaccagctgctgccggtcagcaggatcatcgtgcacccacagttctacaccgcccagatcggagcggacatcgccctgctggagctggaggagccggtgaacgtctccagccacgtccacacggtcaccctgccccctgcctcagagaccttccccccggggatgccgtgctgggtcactggctggggcgatgtggacaatgatgagcgcctcccaccgccatttcctctgaagcaggtgaaggtccccataatggaaaaccacatttgtgacgcaaaataccaccttggcgcctacacgggagacgacgtccgcatcgtccgtgacgacatgctgtgtgccgggaacacccggagggactcatgccagggcgactccggagggcccctggtgtgcaaggtgaatggcacctggctgcaggcgggcgtggtcagctggggcgagggctgtgcccagcccaaccggcctggcatctacacccgtgtcacctactacttggactggatccaccactatgtccccaaaaagccgtgagtcaggcctggggtgtccacctgggtcactggaggaccaacccctgctgtccaaaacaccactgcttcctacccaggtggcgactgccccccacaccttccctgccccgtcctgagtgccccttcctgtcctaagccccctgctctcttctgagccccttcccctgtcctgaggacccttccccatcctgagcccccttccctgtcctaagcctgacgcctgcactgggccctccggccctcccctgcccaggcagctggtggtgggcgctaatcctcctgagtgctggacctcattaaagtgcatggaaatca

SEQ ID NO: 312592 - DNA, 1321 bp, Homo sapiens
ataaatggggaggggagagcccactgggtagaaggaacagggagcggccaggatgctgaatctgctgctgctggcgctgcccgtcctggcgagccgcgcctacgcggcccctgccccaggccaggccctgcagcgagtgggcatcgttgggggtcaggaggcccccaggagcaagtggccctggcaggtgagcctgagagtccacggcccatactggatgcacttctgcgggggctccctcatccacccccagtgggtgctgaccgcagcgcactgcgtgggaccggacgtcaaggatctggccgccctcagggtgcaactgcgggagcagcacctctactaccaggaccagctgctgccggtcagcaggatcatcgtgcacccacagttctacaccgcccagatcggagcggacatcgccctgctggagctggaggagccggtgaacgtctccagccacgtccacacggtcaccctgccccctgcctcagagaccttccccccggggatgccgtgctgggtcactggctggggcgatgtggacaatgatggtgggtctggggacagtggaggtggggccagggtcttagccacagcccagcccctgggctccctctgggctccaggtgggggttgcccggccccctcctgaggctgcaccctcttccccacctgcagagcgcctcccaccgccatttcctctgaagcaggtgaaggtccccataatggaaaaccacatttgtgacgcaaaataccaccttggcgcctacacgggagacgacgtccgcatcgtccgtgacgacatgctgtgtgccgggaacacccggagggactcatgccagggcgactccggagggcccctggtgtgcaaggtgaatggcacctggctgcaggcgggcgtggtcagctggggcgagggctgtgcccagcccaaccggcctggcatctacacccgtgtcacctactacttggactggatccaccactatgtccccaaaaagccgtgagtcaggcctggggtgtccacctgggtcactggaggaccaacccctgctgtccaaaacaccactgcttcctacccaggtggcgactgccccccacaccttccctgccccgtcctgagtgccccttcctgtcctaagccccctgctctcttctgagccccttcccctgtcctgaggacccttccccatcctgagcccccttccctgtcctaagcctgacgcctgcactgggccctccggccctcccctgcccaggcagctggtggtgggcgctaatcctcctgagtgctggacctcattaaagtgcatggaaatca

SEQ ID NO: 312593 - DNA, 1243 bp, Homo sapiens
ataaatggggaggggagagcccactgggtagaaggaacagggagcggccaggatgctgaatctgctgctgctggcgctgcccgtcctggcgagccgcgcctacgcggcccctgccccaggccaggccctgcagcgagtgggcatcgttgggggtcaggaggcccccaggagcaagtggccctggcaggtgagcctgagagtccacggcccatactggatgcacttctgcgggggctccctcatccacccccagtgggtgctgaccgcagcgcactgcgtgggaccggacgtcaaggatctggccgccctcagggtgcaactgcgggagcagcacctctactaccaggaccagctgctgccggtcagcaggatcatcgtgcacccacagttctacaccgcccagatcggagcggacatcgccctgctggagctggaggagccggtgaacgtctccagccacgtccacacggtcaccctgccccctgcctcagagaccttccccccggggatgccgtgctgggtcactggctggggcgatgtggacaatgatgagcgcctcccaccgccatttcctctgaagcaggtgaaggtccccataatggaaaaccacatttgtgacgcaaaataccaccttggcgcctacacgggagacgacgtccgcatcgtccgtgacgacatgctgtgtgccgggaacacccggagggactcatgccagggcgactccggagggcccctggtgtgcaaggtgaatggcacctggctgcaggcgggcgtggtcagctggggcgagggctgtgcccagcccaaccggcctggcatctacacccgtgtcacctactacttggactggatccaccactatgtccccaaaaagccgtgagtcaggcctggggtgtccacctgggtcactggaggaccaacccctgctgtccaaaacaccactgcttcctacccaggtggcgactgccccccacaccttccctgccccgtcctgagtgccccttcctgtcctaagccccctgctctcttctgagccccttcccctgtcctgaggacccttccccatcctgagcccccttccctgtcctaagcctgacgcctgcactgggccctccggccctcccctgcccaggcagctggtggtgggcgctaatcctcctgagtgctggacctcattaaagtgcatggaaatcaaaaaaaaaaagtcgacgcggccgcgaatttagtagtagtaggcggccgc

SEQ ID NO: 312594 - DNA, 778 bp, Homo sapiens
  misc_feature (741)..(742): n is a, c, g, or t
  misc_feature (745)..(745): n is a, c, g, or t
cagagtggcccagcctcagactcagagcaccaagacccaggcccgcaggcctggacccaccccggtccccccgtcccagctccattcttcaccccacaatctgtagcccccagccctgccctgtgaggcccggccaggcccacgatgctcctccttgctccccagatgctgaatctgctgctgctggcgctgcccgtcctggcgagccgcgcctacgcggcccctgccccaggccaggccctgcagcgagtgggcatcgttgggggtcaggaggcccccaggagcaagtggccctggcaggtgagcctgagagtccgcgaccgatactggatgcacttctgcgggggctccctcatccacccccagtgggtgctgaccgcagcgcactgcgtgggaccggacgtcaaggatctggccgccctcagggtgcaactgcgggagcagcacctctactaccaggaccagctgctgccggtcagcaggatcatcgtgcacccacagttctacaccgcccagatcggagcggacatcgccctgctggagctggaggagccggtgaacgtctccagccacgtccacacggtcaccctgccccctgcctcagagaccttccccccggggatgccgtgctgggtcactggctggggcgatgtggacaatgatgagcgcctcccaccgccatttcctctgaagcaggtgaaggtccccataatggaaaacaacatttgtgacgcagaacgnnacntaatggggatcttagagtcgaccagcagaatgc

SEQ ID NO: 312595 - DNA, 1194 bp, Homo sapiens
ataaatggggaggggagagcccactgggtagaaggaacagggagcggccaggatgctgaatctgctgctgctggcgctgcccgtcctggcgagccgcgcctacgcggcccctgccccaggccaggccctgcagcgagtgggcatcgttgggggtcaggaggcccccaggagcaagtggccctggcaggtgagcctgagagtccacggcccatactggatgcacttctgcgggggctccctcatccacccccagtgggtgctgaccgcagcgcactgcgtgggaccggacgtcaaggatctggccgccctcagggtgcaactgcgggagcagcacctctactaccaggaccagctgctgccggtcagcaggatcatcgtgcacccacagttctacaccgcccagatcggagcggacatcgccctgctggagctggaggagccggtgaacgtctccagccacgtccacacggtcaccctgccccctgcctcagagaccttccccccggggatgccgtgctgggtcactggctggggcgatgtggacaatgatgagcgcctcccaccgccatttcctctgaagcaggtgaaggtccccataatggaaaaccacatttgtgacgcaaaataccaccttggcgcctacacgggagacgacgtccgcatcgtccgtgacgacatgctgtgtgccgggaacacccggagggactcatgccagggcgactccggagggcccctggtgtgcaaggtgaatggcacctggctgcaggcgggcgtggtcagctggggcgagggctgtgcccagcccaaccggcctggcatctacacccgtgtcacctactacttggactggatccaccactatgtccccaaaaagccgtgagtcaggcctgggttggccacctgggtcactggaggaccaacccctgctgtccaaaacaccactgcttcctacccaggtggcgactgccccccacaccttccctgccccgtcctgagtgccccttcctgtcctaagccccctgctctcttctgagccccttcccctgtcctgaggacccttccccatcctgagcccccttccctgtcctaagcctgacgcctgcaccgggccctccggccctcccctgcccaggcagctggtggtgggcgctaatcctcctgagtgctggacctcattaaagtgcatggaaatca

SEQ ID NO: 312596 - DNA, 1167 bp, Homo sapiens
ataaatggggaggggagagcccactgggtagaaggaacagggagcggccaggatgctgaatctgctgctgctggcgctgcccgtcctggcgagccgcgcctacgcggcccctgccccaggccaggccctgcagcgagtgggcatcgttgggggtcaggaggcccccaggagcaagtggccctggcaggtgagcctgagagtccacggcccatactggatgcacttctgcgggggctccctcatccacccccagtgggtgctgaccgcagcgcactgcgtgggaccggtgcaactgcgggagcagcacctctactaccaggaccagctgctgccggtcagcaggatcatcgtgcacccacagttctacaccgcccagatcggagcggacatcgccctgctggagctggaggagccggtgaacgtctccagccacgtccacacggtcaccctgccccctgcctcagagaccttccccccggggatgccgtgctgggtcactggctggggcgatgtggacaatgatgagcgcctcccaccgccatttcctctgaagcaggtgaaggtccccataatggaaaaccacatttgtgacgcaaaataccaccttggcgcctacacgggagacgacgtccgcatcgtccgtgacgacatgctgtgtgccgggaacacccggagggactcatgccagggcgactccggagggcccctggtgtgcaaggtgaatggcacctggctgcaggcgggcgtggtcagctggggcgagggctgtgcccagcccaaccggcctggcatctacacccgtgtcacctactacttggactggatccaccactatgtccccaaaaagccgtgagtcaggcctggggtgtccacctgggtcactggaggaccaacccctgctgtccaaaacaccactgcttcctacccaggtggcgactgccccccacaccttccctgccccgtcctgagtgccccttcctgtcctaagccccctgctctcttctgagccccttcccctgtcctgaggacccttccccatcctgagcccccttccctgtcctaagcctgacgcctgcactgggccctccggccctcccctgcccaggcagctggtggtgggcgctaatcctcctgagtgctggacctcattaaagtgcatggaaatca

SEQ ID NO: 312597 - DNA, 1167 bp, Homo sapiens
ataaatggggaggggagagcccactgggtagaaggaacagggagcggccaggatgctgaatctgctgctgctggcgctgcccgtcctggcgagccgcgcctacgcggcccctgccccaggccaggccctgcagcgagtgggcatcgttgggggtcaggaggcccccaggagcaagtggccctggcaggtgagcctgagagtccacggcccatactggatgcacttctgcgggggctccctcatccacccccagtgggtgctgaccgcagcgcactgcgtgggaccggtgcaactgcgggagcagcacctctactaccaggaccagctgctgccggtcagcaggatcatcgtgcacccacagttctacaccgcccagatcggagcggacatcgccctgctggagctggaggagccggtgaacgtctccagccacgtccacacggtcaccctgccccctgcctcagagaccttccccccggggatgccgtgctgggtcactggctggggcgatgtggacaatgatgagcgcctcccaccgccatttcctctgaagcaggtgaaggtccccataatggaaaaccacatttgtgacgcaaaataccaccttggcgcctacacgggagacgacgtccgcatcgtccgtgacgacatgctgtgtgccgggaacacccggagggactcatgccagggcgactccggagggcccctggtgtgcaaggtgaatggcacctggctgcaggcgggcgtggtcagctggggcgagggctgtgcccagcccaaccggcctggcatctacacccgtgtcacctactacttggactggatccaccactatgtccccaaaaagccgtgagtcaggcctgggttggccacctgggtcactggaggaccaacccctgctgtccaaaacaccactgcttcctacccaggtggcgactgccccccacaccttccctgccccgtcctgagtgccccttcctgtcctaagccccctgctctcttctgagccccttcccctgtcctgaggacccttccccatcctgagcccccttccctgtcctaagcctgacgcctgcaccgggccctccggccctcccctgcccaggcagctggtggtgggcgctaatcctcctgagtgctggacctcattaaagtgcatggaaatca

SEQ ID NO: 312598 - DNA, 2268 bp, Homo sapiens
aggccgggccggagcggggcgaagggggccgagcggcgggccgggccgggccgggcagggccggggcgtgggccggcaggaagatggcgaacgtggggctgcagttccaggcgagcgcgggggactcggacccacagagccggcccctgctgctgctcgggcagctgcaccacctgcaccgcgtgccctggagccacgtccgcgggaagctgcagccccgggtcaccgaggagctctggcaggctgccctgagcacgctcaaccccaaccccacggacagctgtcccctctacctgaactacgccaccgtggctgccctgccctgcagggtgagccggcacaacagcccctcggccgcccacttcatcacgcggctggtgcggacctgcctgccgcccggagcgcatcgctgcattgtgatggtctgcgagcagccggaggtctttgcttccgcctgtgccctggcccgggccttcccgctgttcacccaccgctcaggtgcctctcggcgcttggagaagaagacggtcaccgtggagtttttcctggtgggacaagacaacgggccggtggaggtgtccacattgcagtgcttagcgaatgccacagacggcgtgcggctagcagcccgcatcgtggacacaccctgcaatgagatgaacaccgacaccttcctcgaggagattaacaaagttggaaaggagctggggatcatcccaaccatcatccgggatgaggaactgaagacgagaggatttggaggaatctatggggttggcaaagccgccctgcatcccccagccctggccgtcctcagccacaccccagatggagccacgcagaccatcgcctgggtgggcaaaggcatcgtctatgacactggaggcctcagcatcaaagggaagactaccatgccggggatgaagcgagactgcgggggtgctgcggccgtcctgggggccttcagagccgcaatcaagcagggtttcaaagacaacctccacgctgtgttctgcttggctgagaactcggtggggcccaatgcgacaaggccagatgacatccacctgctgtactcagggaagacggtggaaatcaacaacacggatgccgagggcaggctggtgctggcagatggcgtgtcctatgcttgcaaggacctgggggccgacatcatcctggacatggccaccctgaccggggctcagggcattgccacagggaagtaccacgccgcggtgctcaccaacagcgctgagtgggaggccgcctgtgtgaaggcgggcaggaagtgtggggacctggtgcacccgctggtctactgccccgagctgcacttcagcgagttcacctcagctgtggcggacatgaagaactcagtggcggaccgagacaacagccccagctcctgtgctggcctcttcatcgcctcacacatcggcttcgactggcccggagtctgggtccacctggacattgctgcaccggtgcatgctggtgagcgagccacaggcttcggtgtggccctcctgctggcgctcttcggccgtgcctctgaggaccctctgctgaacctggtgtccccactgggctgtgaggtggatgtcgaggagggggacctggggagggactccaagagacgcaggcttgtgtgagcctcctgcctcggccctgacaaacggggatcttttacctcactttgcactgattaattttaagcaattgaaagattgcccttcatatgggttttggtttgtctttctggtcgtcagcgtggtggtggaaacagctgaagttttaggagacagcttagggtttggtgcgggccacggggaggggaccgggaagcgctggggcttgtttctgtttgttacttacaggactgagacatcttctgtaaactgctacccctggggccttctgcaccccggggtgaggcctcctgcctgcctggtgccctgtcccagccccaggtcccgtgcagggcacctgcgtggctgacagccaggctcttactccagccggggctgccagcgcatccagccagcccagccctgtgaaagatggagctgacttgctgcaggggacctgatttatagggcaagagaagtcacactctggcctctcagaattcacttgaggttcaattaaatacagtcacaccgcaaaaaaaaaaaatttccgggtggatcggcaaaggcgaccttgggggggcggcaccttgtccttagaggtaatcgaccggaaatgccacgccggggaagtccc

SEQ ID NO: 312599 - DNA, 2485 bp, Homo sapiens
aagggctcagccgccaggccagtcctcgcccgcggaggcccagccccaggccccgtcgccggtgcggcgcggtggtcctcctgtcagcccagccctgcgccccgcgaggccgcgacacctgcggacggcggggggggagacgtggccgctcccagggccgcgcgtcggccccgcctggcgacaggccctggcttccagaagttcccatggcagtgtccccagctgcctttccttggggacacctggcccctgccccctctctggtggaagccgcctaagccctatccgagtgttggaagcaaagcagcccccagcctggcccttccaggcttggtggcttcatcccaccagggggatgcgagccagcctagagacagttagctctgcagagaggcgacacatctccctaaggatgggaaaacggtggccgggagctgcgcagtgcccttccaggactgcaggagtggttgtggccgtggctgcagggcagggcctcctggcacgtggccgctgtttgaagcctctgtgtcttgtctctcccttctgatctagctctggcaggctgccctgagcacgctcaaccccaaccccacggacagctgtcccctctacctgaactacgccaccgtggctgccctgccctgcagggtgagccggcacaacagcccctcggccgcccacttcatcacgcggctggtgcggacctgcctgccgcccggagcgcatcgctgcattgtgatggtctgcgagcagccggaggtctttgcttccgcctgtgccctggcccgggccttcccgctgttcacccaccgctcaggtgcctctcggcgcttggagaagaagacggtcaccgtggagtttttcctggtgggacaagacaacgggccggtggaggtgtccacattgcagtgcttagcgaatgccacagacggcgtgcggctagcagcccgcatcgtggacacaccctgcaatgagatgaacaccgacaccttcctcgaggagattaacaaagttggaaaggagctggggatcatcccaaccatcatccgggatgaggaactgaagacgagaggatttggaggaatctatggggttggcaaagccgccctgcatcccccagccctggccgtcctcagccacaccccagatggagccacgcagaccatcgcctgggtgggcaaaggcatcgtctatgacactggaggcctcagcatcaaagggaagactaccatgccggggatgaagcgagactgcgggggtgctgcggccgtcctgggggccttcagagccgcaatcaagcagggtttcaaagacaacctccacgctgtgttctgcttggctgagaactcggtggggcccaatgcgacaaggccagatgacatccacctgctgtactcagggaagacggtggaaatcaacaacacggatgccgagggcaggctggtgctggcagatggcgtgtcctatgcttgcaaggacctgggggccgacatcatcctggacatggccaccctgaccggggctcagggcattgccacagggaagtaccacgccgcggtgctcaccaacagcgctgagtgggaggccgcctgtgtgaaggcgggcaggaagtgtggggacctggtgcacccgctggtctactgccccgagctgcacttcagcgagttcacctcagctgtggcggacatgaagaactcagtggcggaccgagacaacagccccagctcctgtgctggcctcttcatcgcctcacacatcggcttcgactggcccggagtctgggtccacctggacattgctgcaccggtgcatgctggtgagcgagccacaggcttcggtgtggccctcctgctggcgctcttcggccgtgcctctgaggaccctctgctgaacctggtgtccccactgggctgtgaggtggatgtcgaggagggggacctggggagggactccaagagacgcaggcttgtgtgagcctcctgcctcggccctgacaaacggggatcttttacctcactttgcactgattaattttaagcaattgaaagattgcccttcatatgggttttggtttgtctttctggtcgtcagcgtggtggtggaaacagctgaagttttaggagacagcttagggtttggtgcgggccacggggaggggaccgggaagcgctggggcttgtttctgtttgttacttacaggactgagacatcttctgtaaactgctacccctggggccttctgcaccccggggtgaggcctcctgcctgcctggtgccctgtcccagccccaggtcccgtgcagggcacctgcgtggctgacagccaggctcttactccagccggggctgccagcgcatccagccagcccagccctgtgaaagatggagctgacttgctgcaggggacctgatttatagggcaagagaagtcacactctggcctctcagaattcacttgaggttcaattaaatacagtcacaccgc

SEQ ID NO: 312600 - DNA, 3097 bp, Homo sapiens
aggccgggccggagcggggcgaagggggccgagcggcgggccgggccgggccgggcagggccggggcgtgggccggcaggaagatggcgaacgtggggctgcagttccaggcgagcgcgggggactcggacccacagagccggcccctgctgctgctcgggcagctgcaccacctgcaccgcgtgccctggagccacgtccgcgggaagctgcagccccgggtcaccgaggagctctggcaggctgccctgagcacgctcaaccccaaccccacggacagctgtcccctctacctgaactacgccaccgtggctgccctgccctgcagggtgagccggcacaacagcccctcggccgcccacttcatcacgcggctggtgcggacctgcctgccgcccggagcgcatcgctgcattgtgatggtctgcgagcagccggaggtctttgcttccgcctgtgccctggcccgggccttcccgctgttcacccaccgctcaggtgcctctcggcgcttggagaagaagacggtcaccgtggagtttttcctggtgggacaagacaacgggccggtggaggtgtccacattgcagtgcttagcgaatgccacagacggcgtgcggctagcagcccgcatcgtggacacaccctgcaatgagatgaacaccgacaccttcctcgaggagattaacaaagttggaaaggagctggggatcatcccaaccatcatccgggatgaggaactgaagacgagaggatttggaggaatctatggggttggcaaagccgccctgcatcccccagccctggccgtcctcagccacaccccagatggagccacgcagaccatcgcctgggtgggcaaaggcatcgtctatgacactggaggcctcagcatcaaagggaagtgaaggaacgcaggttccgcgtcttcgttttgaccatcccgcactctcgtgttttattttgggtcctctgtttcgacaccgggaggtaggaaatcatgggccctggaggccccgactgtgcccagagccagcccacaggatctgactgtcagagcgattctcagaaggaatgtgggtagtagattttgtgtcgggtcattgctaacgtccatgtaatgttactttcaggataagtaacaacgatatgcgaatttgaagcttttgtttgtgtgattaaaacgcaaccgtagccacagcaattttttaaacttcaatcaacaacagattttcggaggaggaatatgttattgctgactttgttcagagataccggcacacggtggtaataagcaaactgacttctagtcggttatgattcctaaattcgccacagatagtgcaccccctactgcctgcacctggtactggctgctcccaccctcgcacgcaccctcaatacccacggtcaccctggaagccgctacattctggctggtagagtcgtggaccctcttctccttggatcagatgcttgtttttgatgtcggcttgttgtggaccaatgtgagaagatgagcttcctgggaattcattcgtttgcttgtggcactaactctagtcacttagggaaaatatcgttgcacctgacttcatctcatgtggctgtgggtagacctgtgcagttagtcagctcccggcctggaaattaacacaaaggaaaaacctgaccacacaggccttccctagaggccacagctgcacagccttcagggaagctgtggtctgagggtggctggtagaactgccagagagtagggcattttccatggctccagatcaccttctgaaaatgcgactatagcccctgcctattcccggggtccacctggtctgcagaccccataataccaggaagagctgggtgttctggcaccagtgaaacaatacctggttttttattttaaaccagcccatcttccccgctgcagttggaaccgttctacgtggatttgggatcaaccagcaggcctttcctgagctgttactgtgtggagtgggcgctgaggctccagccattgatgcaaagaccccaatcctgacctgaaggcgctcacaatctctccccaacggcctggtgtgaaacgcagacgcaacgcagcaggcattctccccagtggctgcctgtagagcaaatggtgcagaaatggtcactcctcaaaaagcaagccggctggagccagcccagctcccagttttgcaagaaaaaaaaaatcacagctccattttcaaagatttcaagggcagctcaagaccagcctggactagcaggcctcaaatgcattactggagacccctttacgctcttaacaagtaccgaccccaaagaggctttttgtataacaatgtctattgatatttactctactggaaattaaaagtgagaaatttataacatgtataattcattaaaaataacatataaatccattgcatgttatcataaataattttatgaagataagcatcttccaaaatgaaaaaataatttactgagagagtagcattgttgtacattttcacaaatcctgtcagtgtctggcttaatagaagacagctagggaccttgcgtctgcttccgatgtagtctatggaaatgtgttgtttcagttgaactgtatcaagaaaatctggcctcacgcattttatagttgaaacagggaaaaggattttagtacctttttcagctaactaactatgaacattctttgctactacaccaaaactcaacaagtggtagcttcttaaaggctggttataacatggaatctgaagcctcatgaatagacttttgggctctgtggcagttaaatccgctgttctctctcactttgaacatgtggtttttcatggaaaaatgaatgttcacttgaaaaatgttggttcacagagttctgcagaaattcaaatttttgacacattacattatatagtatcaaaaaatcacttaatatcaccatccatctcatcagaaaactcattatgaggaagttgtcatggtgataggagaaagtttttcaaaattctgatttttgcttaaaagctcaaatgtataccattggcaataaataatgtcagctgtttctggaaaaaaa

SEQ ID NO: 312601 - DNA, 2227 bp, Homo sapiens
tggccaggaagccggacagttgagttagaaaacatttctctttgaggtttctgaactgctgtttcttctctgccagctgggggcgcaatttctcattgatttctagaatgttcatctctgccttctcgctggacaaagggccggctgataccaccatgctgacgtttgtggcagaagaggtggggccagggactgggagaatgtttagagcatcctgacattcatcatgagaggattctctgtctacaaccagagttgagttgacttcgtcttcctcaaatgtgaatttgaagcttttgtttgtgtgattaaaacgcaaccgtagccacagcaattttttaaacttcaatcaacaacagattttcggaggaggaatatgttattgctgactttgttcagagataccggcacacggtggtaataagcaaactgacttctagtcggttatgattcctaaattcgccacagatagtgcaccccctactgcctgcacctggtactggctgctcccaccctcgcacgcaccctcaatacccacggtcaccctggaagccgctacattctggctggtagagtcgtggaccctcttctccttggatcagatgcttgtttttgatgtcggcttgttgtggaccaatgtgagaagatgagcttcctgggaattcattcgtttgcttgtggcactaactctagtcacttagggaaaatatcgttgcacctgacttcatctcatgtggctgtgggtagacctgtgcagttagtcagctcccggcctggaaattaacacaaaggaaaaacctgaccacacaggccttccctagaggccacagctgcacagccttcagggaagctgtggtctgagggtggctggtagaactgccagagagtagggcattttccatggctccagatcaccttctgaaaatgcgactatagcccctgcctattcccggggtccacctggtctgcagaccccataataccaggaagagctgggtgttctggcaccagtgaaacaatacctggttttttattttaaaccagcccatcttccccgctgcagttggaaccgttctacgtggatttgggatcaaccagcaggcctttcctgagctgttactgtgtggagtgggcgctgaggctccagccattgatgcaaagaccccaatcctgacctgaaggcgctcacaatctctccccaacggcctggtgtgaaacgcagacgcaacgcagcaggcattctccccagtggctgcctgtagagcaaatggtgcagaaatggtcactcctcaaaaagcaagccggctggagccagcccagctcccagttttgcaagaaaaaaaaaatcacagctccattttcaaagatttcaagggcagctcaagaccagcctggactagcaggcctcaaatgcattactggagacccctttacgctcttaacaagtaccgaccccaaagaggctttttgtataacaatgtctattgatatttactctactggaaattaaaagtgagaaatttataacatgtataattcattaaaaataacatataaatccattgcatgttatcataaataattttatgaagataagcatcttccaaaatgaaaaaataatttactgagagagtagcattgttgtacattttcacaaatcctgtcagtgtctggcttaatagaagacagctagggaccttgcgtctgcttccgatgtagtctatggaaatgtgttgtttcagttgaactgtatcaagaaaatctggcctcacgcattttatagttgaaacagggaaaaggattttagtacctttttcagctaactaactatgaacattctttgctactacaccaaaactcaacaagtggtagcttcttaaaggctggttataacatggaatctgaagcctcatgaatagacttttgggctctgtggcagttaaatccgctgttctctctcactttgaacatgtggtttttcatggaaaaatgaatgttcacttgaaaaatgttggttcacagagttctgcagaaattcaaatttttgacacattacattatatagtatcaaaaaatcacttaatatcaccatccatctcatcagaaaactcattatgaggaagttgtcatggtgataggagaaagtttttcaaaattctgatttttgcttaaaagctcaaatgtataccattggcaataaataatgtcagctgtttctggaaaaaaa

SEQ ID NO: 312602 - DNA, 1042 bp, Homo sapiens
gtctgcctcccggtccctcttttgccttgggtgtttctctcctgccgtcccgtccacacgcttcccgggttcctgcccgcccagggcattgccacagggaagtaccacgccgcggtgctcaccaacagcgctgagtgggaggccgcctgtgtgaaggcgggcaggaagtgtggggacctggtgcacccgctggtctactgccccgagctgcacttcagcgagttcacctcagctgtggcggacatgaagaactcagtggcggaccgagacaacagccccagctcctgtgctggcctcttcatcgcctcacacatcggcttcgactggcccggagtctgggtccacctggacattgctgcaccggtgcatgctggtgagcgagccacaggcttcggtgtggccctcctgctggcgctcttcggccgtgcctctgaggaccctctgctgaacctggtgtccccactgggctgtgaggtggatgtcgaggagggggacctggggagggactccaagagacgcaggcttgtgtgagcctcctgcctcggccctgacaaacggggatcttttacctcactttgcactgattaattttaagcaattgaaagattgcccttcatatgggttttggtttgtctttctggtcgtcagcgtggtggtggaaacagctgaagttttaggagacagcttagggtttggtgcgggccacggggaggggaccgggaagcgctggggcttgtttctgtttgttacttacaggactgagacatcttctgtaaactgctacccctggggccttctgcaccccggggtgaggcctcctgcctgcctggtgccctgtcccagccccaggtcccgtgcagggcacctgcgtggctgacagccaggctcttactccagccggggctgccagcgcatccagccagcccagccctgtgaaagatggagctgacttgctgcaggggacctgatttatagggcaagagaagtcacactctggcctctcagaattcacttgaggttcaattaaatacagtcacaccgc

SEQ ID NO: 312603 - DNA, 1248 bp, Homo sapiens
aggccgggccggagcggggcgaagggggccgagcggcgggccgggccgggccgggcagggccggggcgtgggccggcaggaagatggcgaacgtggggctgcagttccaggcgagcgcgggggactcggacccacagagccggcccctgctgctgctcgggcagctgcaccacctgcaccgcgtgccctggagccacgtccgcgggaagctgcagccccgggtcaccgaggagctctggcaggctgccctgagcacgctcaaccccaaccccacggacagctgtcccctctacctgaactacgccaccgtggctgccctgccctgcagggtgagccggcacaacagcccctcggccgcccacttcatcacgcggctggtgcggacctgcctgccgcccggagcgcatcgctgcattgtgatggtctgcgagcagccggaggtctttgcttccgcctgtgccctggcccgggccttcccgctgttcacccaccgctcaggtgcctctcggcgcttggagaagaagacggtcaccgtggagtttttcctggtgggacaagacaacgggccggtggaggtgtccacattgcagtgcttagcgaatgccacagacggcgtgcggctagcagcccgcatcgtggacacaccctgcaatgagatgaacaccgacaccttcctcgaggagattaacaaagttggaaaggagctggggatcatcccaaccatcatccgggatgaggaactgaagacgagaggatttggaggaatctatggggttggcaaagccgccctgcatcccccagccctggccgtcctcagccacaccccagatggagccacgcagaccatcgcctgggtgggcaaaggcatcgtctatgacactggaggcctcagcatcaaagggaagactaccatgccggggatgaagcgagactgcgggggtgctgcggccgtcctgggggccttcagagccgcaatcaagcagggtttcaaagacaacctccacgctgtgttctgcttggctgagaactcggtggggcccaatgcgacaaggccagatgacatccacctgctgtactcagggaagtacgtctggccctcccactccttcctgcccactgttggaactcgcgacccttcccggcctgcaatgcagggtagaccacgagctcctgggccaggcactgcacgggagcctagcaccttcatcgccccctccccttctgctcggcgtaccgagctcgcaattc

SEQ ID NO: 312604 - DNA, 124 bp, Homo sapiens
ggacccaggaggtgaggggtccccaggaacccctcctgtgctgcagccccacgcccagagtctgtgtcctgccctttgcttgcagggtgagcgagccacaggcttcggtgtggccctcctgctg

SEQ ID NO: 312605 - DNA, 2166 bp, Homo sapiens
aggccgggccggagcggggcgaagggggccgagcggcgggccgggccgggccgggcagggccggggcgtgggccggcaggaagatggcgaacgtggggctgcagttccaggcgagcgcgggggactcggacccacagagccggcccctgctgctgctcgggcagctgcaccacctgcaccgcgtgccctggagccacgtccgcgggaagctgcagccccgggtcaccgaggagctctggcaggctgccctgagcacgctcaaccccaaccccacggacagctgtcccctctacctgaactacgccaccgtggctgccctgccctgcagggtgagccggcacaacagcccctcggccgcccacttcatcacgcggctggtgcggacctgcctgccgcccggagcgcatcgctgcattgtgatggtctgcgagcagccggaggtctttgcttccgcctgtgccctggcccgggccttcccgctgttcacccaccgctcaggtgcctctcggcgcttggagaagaagacggtcaccgtggagtttttcctggtgggacaagacaacgggccggtggaggtgtccacattgcagtgcttagcgaatgccacagacggcgtgcggctagcagcccgcatcgtggacacaccctgcaatgagatgaacaccgacaccttcctcgaggagattaacaaagttggaaaggagctggggatcatcccaaccatcatccgggatgaggaactgaagacgagaggatttggaggaatctatggggttggcaaagccgccctgcatcccccagccctggccgtcctcagccacaccccagatggagccacgcagaccatcgcctgggtgggcaaaggcatcgtctatgacactggaggcctcagcatcaaagggaagactaccatgccggggatgaagcgagactgcgggggtgctgcggccgtcctgggggccttcagagccgcaatcaagcagggtttcaaagacaacctccacgctgtgttctgcttggctgagaactcggtggggcccaatgcgacaaggccagatgacatccacctgctgtactcagggaagacggtggaaatcaacaacacggatgccgagggcaggctggtgctggcagatggcgtgtcctatgcttgcaaggacctgggggccgacatcatcctggacatggccaccctgaccggggctcagggcattgccacagggaagtaccacgccgcggtgctcaccaacagcgctgagtgggaggccgcctgtgtgaaggcgggcaggaagtgtggggacctggtgcacccgctggtctactgccccgagctgcacttcagcgagttcacctcagctgtggcggacatgaagaactcagtggcggaccgagacaacagccccagctcctgtgctggcctcttcatcgcctcacacatcggcttcgactggcccggagtctgggtccacctggacattgctgcaccggtgcatgctggtgagcgagccacaggcttcggtgtggccctcctgctggcgctcttcggccgtgcctctgaggaccctctgctgaacctggtgtccccactgggctgtgaggtggatgtcgaggagggggacctggggagggactccaagagacgcaggcttgtgtgagcctcctgcctcggccctgacaaacggggatcttttacctcactttgcactgattaattttaagcaattgaaagattgcccttcatatgggttttggtttgtctttctggtcgtcagcgtggtggtggaaacagctgaagttttaggagacagcttagggtttggtgcgggccacggggaggggaccgggaagcgctggggcttgtttctgtttgttacttacaggactgagacatcttctgtaaactgctacccctggggccttctgcaccccggggtgaggcctcctgcctgcctggtgccctgtcccagccccaggtcccgtgcagggcacctgcgtggctgacagccaggctcttactccagccggggctgccagcgcatccagccagcccagccctgtgaaagatggagctgacttgctgcaggggacctgatttatagggcaagagaagtcacactctggcctctcagaattcacttgaggttcaattaaatacagtcacaccgc

SEQ ID NO: 312606 - DNA, 3161 bp, Homo sapiens
aggccgggccggagcggggcgaagggggccgagcggcgggccgggccgggccgggcagggccggggcgtgggccggcaggaagatggcgaacgtggggctgcagttccaggcgagcgcgggggactcggacccacagagccggcccctgctgctgctcgggcagctgcaccacctgcaccgcgtgccctggagccacgtccgcgggaagctgcagccccgggtcaccgaggagctctggcaggctgccctgagcacgctcaaccccaaccccacggacagctgtcccctctacctgaactacgccaccgtggctgccctgccctgcagggtgagccggcacaacagcccctcggccgcccacttcatcacgcggctggtgcggacctgcctgccgcccggagcgcatcgctgcattgtgatggtctgcgagcagccggaggtctttgcttccgcctgtgccctggcccgggccttcccgctgttcacccaccgctcaggtgcctctcggcgcttggagaagaagacggtcaccgtggagtttttcctggtgggacaagacaacgggccggtggaggtgtccacattgcagtgcttagcgaatgccacagacggcgtgcggctagcagcccgcatcgtggacacaccctgcaatgagatgaacaccgacaccttcctcgaggagattaacaaagttggaaaggagctggggatcatcccaaccatcatccgggatgaggaactgaagacgagaggatttggaggaatctatggggttggcaaagccgccctgcatcccccagccctggccgtcctcagccacaccccagatggagccacgcagaccatcgcctgggtgggcaaaggcatcgtctatgacactggaggcctcagcatcaaagggaagatgtctgcagaacaaaagcattttggacacagtaactccaagtgttcacatggaatgagggaagtgaaggaacgcaggttccgcgtcttcgttttgaccatcccgcactctcgtgttttattttgggtcctctgtttcgacaccgggaggtaggaaatcatgggccctggaggccccgactgtgcccagagccagcccacaggatctgactgtcagagcgattctcagaaggaatgtgggtagtagattttgtgtcgggtcattgctaacgtccatgtaatgttactttcaggataagtaacaacgatatgcgaatttgaagcttttgtttgtgtgattaaaacgcaaccgtagccacagcaattttttaaacttcaatcaacaacagattttcggaggaggaatatgttattgctgactttgttcagagataccggcacacggtggtaataagcaaactgacttctagtcggttatgattcctaaattcgccacagatagtgcaccccctactgcctgcacctggtactggctgctcccaccctcgcacgcaccctcaatacccacggtcaccctggaagccgctacattctggctggtagagtcgtggaccctcttctccttggatcagatgcttgtttttgatgtcggcttgttgtggaccaatgtgagaagatgagcttcctgggaattcattcgtttgcttgtggcactaactctagtcacttagggaaaatatcgttgcacctgacttcatctcatgtggctgtgggtagacctgtgcagttagtcagctcccggcctggaaattaacacaaaggaaaaacctgaccacacaggccttccctagaggccacagctgcacagccttcagggaagctgtggtctgagggtggctggtagaactgccagagagtagggcattttccatggctccagatcaccttctgaaaatgcgactatagcccctgcctattcccggggtccacctggtctgcagaccccataataccaggaagagctgggtgttctggcaccagtgaaacaatacctggttttttattttaaaccagcccatcttccccgctgcagttggaaccgttctacgtggatttgggatcaaccagcaggcctttcctgagctgttactgtgtggagtgggcgctgaggctccagccattgatgcaaagaccccaatcctgacctgaaggcgctcacaatctctccccaacggcctggtgtgaaacgcagacgcaacgcagcaggcattctccccagtggctgcctgtagagcaaatggtgcagaaatggtcactcctcaaaaagcaagccggctggagccagcccagctcccagttttgcaagaaaaaaaaaatcacagctccattttcaaagatttcaagggcagctcaagaccagcctggactagcaggcctcaaatgcattactggagacccctttacgctcttaacaagtaccgaccccaaagaggctttttgtataacaatgtctattgatatttactctactggaaattaaaagtgagaaatttataacatgtataattcattaaaaataacatataaatccattgcatgttatcataaataattttatgaagataagcatcttccaaaatgaaaaaataatttactgagagagtagcattgttgtacattttcacaaatcctgtcagtgtctggcttaatagaagacagctagggaccttgcgtctgcttccgatgtagtctatggaaatgtgttgtttcagttgaactgtatcaagaaaatctggcctcacgcattttatagttgaaacagggaaaaggattttagtacctttttcagctaactaactatgaacattctttgctactacaccaaaactcaacaagtggtagcttcttaaaggctggttataacatggaatctgaagcctcatgaatagacttttgggctctgtggcagttaaatccgctgttctctctcactttgaacatgtggtttttcatggaaaaatgaatgttcacttgaaaaatgttggttcacagagttctgcagaaattcaaatttttgacacattacattatatagtatcaaaaaatcacttaatatcaccatccatctcatcagaaaactcattatgaggaagttgtcatggtgataggagaaagtttttcaaaattctgatttttgcttaaaagctcaaatgtataccattggcaataaataatgtcagctgtttctggaaaaaaa

SEQ ID NO: 312607 - DNA, 3106 bp, Homo sapiens
aggccgggccggagcggggcgaagggggccgagcggcgggccgggccgggccgggcagggccggggcgtgggccggcaggaagatggcgaacgtggggctgcagttccaggcgagcgcgggggactcggacccacagagccggcccctgctgctgctcgggcagctgcaccacctgcaccgcgtgccctggagccacgtccgcgggaagctgcagccccgggtcaccgaggagctctggcaggctgccctgagcacgctcaaccccaaccccacggacagctgtcccctctacctgaactacgccaccgtggctgccctgccctgcagggtgagccggcacaacagcccctcggccgcccacttcatcacgcggctggtgcggacctgcctgccgcccggagcgcatcgctgcattgtgatggtctgcgagcagccggaggtctttgcttccgcctgtgccctggcccgggccttcccgctgttcacccaccgctcaggtgcctctcggcgcttggagaagaagacggtcaccgtggagtttttcctggtgggacaagacaacgggccggtggaggtgtccacattgcagtgcttagcgaatgccacagacggcgtgcggctagcagcccgcatcgtggacacaccctgcaatgagatgaacaccgacaccttcctcgaggagattaacaaagttggaaaggagctggggatcatcccaaccatcatccgggatgaggaactgaagacgagaggatttggaggaatctatggggttggcaaagccgccctgcatcccccagccctggccgtcctcagccacaccccagatggagccacgcagaccatcgcctgggtgggcaaaggcatcgtctatgacactggaggcctcagcatcaaagggaagatgtctgcagaacaaaagcattttggacacagtaactccaagtgttcacatggaatgagggaagtgaaggaacgcaggttccgcgtcttcgttttgaccatcccgcactctcgtgttttattttgggtcctctgtttcgacaccgggaggtaggaaatcatgggccctggaggccccgactgtgcccagagccagcccacaggatctgactgtcagagcgattctcagaaggaatgtgggtagtagattttgtgtcgggtcattgctaacgtccatgtaatgttactttcaggataagtaacaacgatatgcgaatttgaagcttttgtttgtgtgattaaaacgcaaccgtagccacagcaattttttaaacttcaatcaacaacagattttcggaggaggaatatgttattgctgactttgttcagagataccggcacacggtggtaataagcaaactgacttctagtcggttatgattcctaaattcgccacagatagtgcaccccctactgcctgcacctggtactggctgctcccaccctcgcacgcaccctcaatacccacggtcaccctggaagccgctacattctggctggtagagtcgtggaccctcttctccttggatcagatgcttgtttttgatgtcggcttgttgtggaccaatgtgagaagatgagcttcctgggaattcattcgtttgcttgtggcactaactctagtcacttagggaaaatatcgttgcacctgacttcatctcatgtggctgtgggtagacctgtgcagttagtcagctcccggcctggaaattaacacaaaggaaaaacctgaccacacaggccttccctagaggccacagctgcacagccttcagggaagctgtggtctgagggtggctggtagaactgccagagagtagggcattttccatggctccagatcaccttcccataataccaggaagagctgggtgttctggcaccagtgaaacaatacctggttttttattttaaaccagcccatcttccccgctgcagttggaaccgttctacgtggatttgggatcaaccagcaggcctttcctgagctgttactgtgtggagtgggcgctgaggctccagccattgatgcaaagaccccaatcctgacctgaaggcgctcacaatctctccccaacggcctggtgtgaaacgcagacgcaacgcagcaggcattctccccagtggctgcctgtagagcaaatggtgcagaaatggtcactcctcaaaaagcaagccggctggagccagcccagctcccagttttgcaagaaaaaaaaaatcacagctccattttcaaagatttcaagggcagctcaagaccagcctggactagcaggcctcaaatgcattactggagacccctttacgctcttaacaagtaccgaccccaaagaggctttttgtataacaatgtctattgatatttactctactggaaattaaaagtgagaaatttataacatgtataattcattaaaaataacatataaatccattgcatgttatcataaataattttatgaagataagcatcttccaaaatgaaaaaataatttactgagagagtagcattgttgtacattttcacaaatcctgtcagtgtctggcttaatagaagacagctagggaccttgcgtctgcttccgatgtagtctatggaaatgtgttgtttcagttgaactgtatcaagaaaatctggcctcacgcattttatagttgaaacagggaaaaggattttagtacctttttcagctaactaactatgaacattctttgctactacaccaaaactcaacaagtggtagcttcttaaaggctggttataacatggaatctgaagcctcatgaatagacttttgggctctgtggcagttaaatccgctgttctctctcactttgaacatgtggtttttcatggaaaaatgaatgttcacttgaaaaatgttggttcacagagttctgcagaaattcaaatttttgacacattacattatatagtatcaaaaaatcacttaatatcaccatccatctcatcagaaaactcattatgaggaagttgtcatggtgataggagaaagtttttcaaaattctgatttttgcttaaaagctcaaatgtataccattggcaataaataatgtcagctgtttctggaaaaaaa

SEQ ID NO: 312608 - DNA, 1311 bp, Homo sapiens
aggccgggccggagcggggcgaagggggccgagcggcgggccgggccgggccgggcagggccggggcgtgggccggcaggaagatggcgaacgtggggctgcagttccaggcgagcgcgggggactcggacccacagagccggcccctgctgctgctcgggcagctgcaccacctgcaccgcgtgccctggagccacgtccgcgggaagctgcagccccgggtcaccgaggagctctggcaggctgccctgagcacgctcaaccccaaccccacggacagctgtcccctctacctgaactacgccaccgtggctgccctgccctgcagggtgagccggcacaacagcccctcggccgcccacttcatcacgcggctggtgcggacctgcctgccgcccggagcgcatcgctgcattgtgatggtctgcgagcagccggaggtctttgcttccgcctgtgccctggcccgggccttcccgctgttcacccaccgctcaggtgcctctcggcgcttggagaagaagacggtcaccgtggagtttttcctggtgggacaagacaacgggccggtggaggtgtccacattgcagtgcttagcgaatgccacagacggcgtgcggctagcagcccgcatcgtggacacaccctgcaatgagatgaacaccgacaccttcctcgaggagattaacaaagttggaaaggagctggggatcatcccaaccatcatccgggatgaggaactgaagacgagaggatttggaggaatctatggggttggcaaagccgccctgcatcccccagccctggccgtcctcagccacaccccagatggagccacgcagaccatcgcctgggtgggcaaaggcatcgtctatgacactggaggcctcagcatcaaagggaagactaccatgccggggatgaagcgagactgcgggggtgctgcggccgtcctgggggccttcagagccgcaatcaagcagggtttcaaagacaacctccacgctgtgttctgcttggctgagaactcggtggggcccaatgcgacaaggccagatgacatccacctgctgtactcagggaagacggtggaaatcaacaacacggatgccgagggcaggctggtgagggcacctgcgtggctgacagccaggctcttactccagccggggctgccagcgcatccagccagcccagccctgtgaaagatggagctgacttgctgcaggggacctgatttatagggcaagagaagtcacactctggcctctcagaattcacttgaggttcaattaaatacagtcacaccgc

SEQ ID NO: 312609 - DNA, 2896 bp, Homo sapiens
agtgctggcacgagggagagtcgaacccggagcagggtcccatccgagcgtggactggcggcaggatgttcagctggatggggcggcaggcgggcgggcgcgaacgcgctggcggcgcggacgcggtgcagacggtgacgggcgggctgcgctcgctctacctgcgcaaggtgctgccgctggaggaggcgtaccgcttccacgagttccactcgcctgcgctggaggacgccgacttcgagaacaagcccatgatcctgctggtgggccagtacagcaccggcaagaccaccttcatcagatacctactggagcaggatttcccaggcatgaggattggtccggagcccaccacagactccttcatcgccgtgatgtatggagagactgagggcagcaccccagggaatgctttagtcgtggaccccaaaaagccgtttagaaagctcagtcgctttggaaacgctttcctgaatcgattcatgtgctcacagctccccaatcaggtcctgaagagcatcagcgtcatcgacagccccggcatcctttctggggagaagcagcgcatcagccgaggctatgacttctgccaggtcctgcagtggtttgccgagagggtggacaggatcatcctgctctttgacgctcacaagctggacatctcagatgaattctcagaggccatcaaggccttccggggccaggacgacaagatccgtgtcgtgctgaacaaggccgaccaagtggacacgcagcagctgatgcgggtctacggggccctcatgtggtccctaggcaaggtcatcaacacgcccgaggtactgcgcgtctacattggctccttctgggcgcagcccctgcagaacacggacaaccgccggctcttcgaggctgaggcccaggacctctttagagacatccagagcctcccccagaaggcagcggtgcgcaagctcaacgacctcatcaagcgagcgaggctggccaaggtgcatgcctacatcatcagctacctgaagaaggagatgccaagtgtatttggaaaggaaaacaagaagagagagcttatcagcaggctaccggaaatctacattcagctacagcgagaataccagatttctgcaggggacttccctgaggtcaaggctatgcaggaacagcttgagaactatgacttcaccaaattccactcgctgaagcccaagctgatcgaggcagtggacaacatgctgagcaacaagatctcgcccctcatgaacctcatcagccaggaggagacgagcacgcccacgcagctggtgcagggcggcgccttcgatggcaccaccgagggccccttcaaccagggctacggggagggtgccaaggagggcgccgacgaggaggagtgggtcgtggccaaagacaagcccgtctacgacgagctcttctacactctgtcgcccatcaatggcaagatatcaggtgtcaacgccaagaaggagatggtgacctccaagctgcccaacagcgtcctgggcaagatctggaagctggccgactgcgactgcgacggcatgcttgatgaggaggagttcgcgctggccaagcacctcatcaagatcaagctcgacggctacgagctgcccagcagcctgcccccccacctcgtgcccccctcgcacaggaagtccctgcccaaggccgactgaggggtgggctgcagaacggggtgggaactgggggacctgggcctcaggcctgctccaccactgactcaccgaatgaccttgggcaaggcactgccctctctgtgccttggtttccccatctgtagaatggggagggtggacactggaaactagatgacttctttcacctccaaaattcccttagtttctatgaaaatattgggggtaggggggtggattaggagattgaagggttgagaagaaagagaaattgtccaaagagtcctcagaacctgcctggagaaatgcgcatgggggtgggcctggtaagtcccaggaaccacaggaagtgagctaaggctcacccagagcagctgggtctccaggctgcctgggctttttgtcctcatgaacaactctggagcagctgtctgtccctcagagggcacctggaggcagcaaagattatcttatttattttattttgttttctgctatatttagagtggcaaaaaaatagagcagagggtttctgctgtctccagactgtctaccaaagagaaggcgacagatgcctcctgggtttggaagggggatgcactgtggatctgccatccattctgcagtctccagcagagcaggcagtcaggccccagcgtgcctccatcccagtgccccgatgaccatctggtcagccctcccaacctcccttccagggggcttaccagcaaagccatattcggctaggaatttggaattcacaacctttattaacccctggcaaaacttcccgtttgcatgtcaaatcacattgaagcctgaagattagcttttcttactggtttttccaataagtaatagcaaagcccacttatcatacttaaactacagtaaagaaaagaggtggttctctgcagtgatcgtttagtgtggccctcaaacattaaatatccccaggtctccttggtgggtggcaggatttaaattcaatcaaatcctgtcctagtgtgtgcagtgtcttcggccctgtggacacaggtgaatgagggaccagccctgccctgggctgttgagaagagatcagtccacccagagttagacattgtttttgtagaaaacaggcatttattatgtctagggttttgtgttttttttttttccttacaggataaaagcctttatacagaaacaaaatggaacctttcatataaaaccttttctttaaa

SEQ ID NO: 312610 - DNA, 2976 bp, Homo sapiens
agtgctggcacgagggagagtcgaacccggagcagggtcccatccgagcgtggactggcggcaggatgttcagctggatggggcggcaggcgggcgggcgcgaacgcgctggcggcgcggacgcggtgcagacggtgacgggcgggctgcgctcgctctacctgcgcaaggtgctgccgctggaggaggcgtaccgcttccacgagttccactcgcctgcgctggaggacgccgacttcgagaacaagcccatgatcctgctggtgggccagtacagcaccggcaagaccaccttcatcagatacctactggagcaggatttcccaggcatgaggattggtccggagcccaccacagactccttcatcgccgtgatgtatggagagactgagggcagcaccccagggaatgctttagtcgtggaccccaaaaagccgtttagaaagctcagtcgctttggaaacgctttcctgaatcgattcatgtgctcacagctccccaatcaggtcctgaagagcatcagcgtcatcgacagccccggcatcctttctggggagaagcagcgcatcagccgaggctatgacttctgccaggtcctgcagtggtttgccgagagggtggacaggatcatcctgctctttgacgctcacaagctggacatctcagatgaattctcagaggccatcaaggccttccggggccaggacgacaagatccgtgtcgtgctgaacaaggccgaccaagtggacacgcagcagctgatgcgggtctacggggccctcatgtggtccctaggcaaggtcatcaacacgcccgaggtactgcgcgtctacattggctccttctgggcgcagcccctgcagaacacggacaaccgccggctcttcgaggctgaggcccaggacctctttagagacatccagagcctcccccagaaggcagcggtgcgcaagctcaacgacctcatcaagcgagcgaggctggccaaggtgcatgcctacatcatcagctacctgaagaaggagatgccaagtgtatttggaaaggaaaacaagaagagagagcttatcagcaggctaccggaaatctacattcagctacagcgagaataccagatttctgcaggggacttccctgaggtcaaggctatgcaggaacagcttgagaactatgacttcaccaaattccactcgctgaagcccaagctgatcgaggcagtggacaacatgctgagcaacaagatctcgcccctcatgaacctcatcagccaggaggagacgagcacgcccacgcagctggtgcagggcggcgccttcgatggcaccaccgagggccccttcaaccagggctacggggagggtgccaaggagggcgccgacgaggaggagtgggtcgtggccaaagacaagcccgtctacgacgagctcttctacactctgtcgcccatcaatggcaagatatcaggtgtcaacgccaagaaggagatggtgacctccaagctgcccaacagcgtcctgggcaagatctggaagctggccgactgcgactgcgacggcatgcttgatgaggaggagttcgcgctggccaagcacctcatcaagatcaagctcgacggctacgagctgcccagcagcctgcccccccacctcgtgcccccctcgcacaggaagtccctgcccaaggccgactgaggggtgggctgcagaacggggtgggaactgggggacctgggcctcaggcctgctccaccactgactcaccgaatgaccttgggcaaggcactgccctctctgtgccttggtttccccatctgtagaatggggagggtggacactggaaactagatgacttctttcacctccaaaattcccttagtttctatgaaaatattgggggtaggggggtggattaggagattgaagggttgagaagaaagagaaattgtccaaagagtcctcagaacctgcctggagaaatgcgcatgggggtgggcctggtaagtcccaggaaccacaggaagtgagctaaggctcacccagagcagctgggtctccaggctgcctgggctttttgtcctcatgaacaactctggagcagctgtctgtccctcagagggcacctggaggcagcaaagattatcttatttattttattttgttttctgctatatttagagtggcaaaaaaatagagcagagggtttctgctgtctccagactgtctaccaaagagaaggcgacagatgcctcctgggtttggaagggggatgcactgtggatctgccatccattctgcagtctccagcagagcaggcagtcaggccccagcgtgcctccatcccagtgccccgatgaccatctggtcagccctcccaacctcccttccagggggcttaccagcaaagccatattcggctaggaatttggaattcacaacctttattaacccctggcaaaacttcccgtttgcatgtcaaatcacattgaagcctgaagattagcttttcttactggtttttccaataagtaatagcaaagcccacttatcatacttaaactacagtaaagaaaagaggtggttctctgcagtgatcgtttagtgtggccctcaaacattaaatatccccaggtctccttggtgggtggcaggatttaaattcaatcaaatcctgtcctagtgtgtgcagtgtcttcggccctgtggacacaggtgaatgagggaccagccctgccctgggctgttgagaagagatcagtccacccagagttagacattgtttttgtagaaaacaggcatttattatgtctagggcgtggggttttccttaaggaaaaagctttagaaacaatgacttttttaaacttttttaaaaaaaaaggcggggctaaatcccggggccctactccctttgaaagccaaagggtataaaagcggtaagggggaagctgcttgaccctggttgaacccaccgctattt

SEQ ID NO: 312611 - DNA, 854 bp, Homo sapiens
  misc_feature (241)..(241): n is a, c, g, or t
gaatgtgtcaaaatcccggtccatttttacccccgtattgccggttggttccgctattaccccgtaaagttttaatttcccctggcgcgtttaatatctgttgtgggttggtgtcccattgttgctccccccccccagagttatgggggttgcctctcccagagggtcccccggacgcgcggttgttcccacctgcccggcgccgttgtggtttacgtcgcggtccccgtggtcttggtgntttttgtaattccccctcccccttattgggggccgcccttgtgtgcccaaaaaaccggggttacccctaaattggggcccccccggggaaattttttccccccccccctttttttttttatttttttgttcatttattattttattatttttatttttattttgagaggaagtctctgtcacccaggctggagtgcagtggcgcaatctcagttcactgcaacctccgcctcccaggttcaagtgattcccctgcctcagcctcccaagtagctgggactacaggcacccgccaccacgcccggctaatttttgtattttagtagagatggggttttaccatgttggtcaatatggtctcgatctcctgacctcgtgatctacccacctcggcctcccaaagtgctgtaacctaagcagacagttctgtgaatgcgtgaggaccacctgaagtctgcagccacggtggaggtcaccaaagggtgaactgagagagaagagggaattcacttgcccaaaggtttacagatgcccaggcaaactgatttttccatccagaattatcttgttctttaactctcctcaattgtcatatataaacatgaatttatata

SEQ ID NO: 312612 - DNA, 298 bp, Homo sapiens
aaagctaatcttcaggcttcaatgtgatttgacatgcaaacgggaagttttgccaggggttaataaaggttgtgaattccaaattcctagccgaatatggctttgctggtaagccccctggaagggaggttgggagggctgttgagaagagatcagtccacccagagttagacattgtttttgtagaaaacaggcatttattatgtctagggttttgtgttttttttttttccttacaggataaaagcctttatacagaaacaaaatggaacctttcatataaaaccttttctttaaa

SEQ ID NO: 312613 - DNA, 4174 bp, Homo sapiens
agtgctggcacgagggagagtcgaacccggagcagggtcccatccgagcgtggactggcggcaggatgttcagctggatggggcggcaggcgggcgggcgcgaacgcgctggcggcgcggacgcggtgcagacggtgacgggcgggctgcgctcgctctacctgcgcaaggtgctgccgctggaggaggcgtaccgcttccacgagttccactcgcctgcgctggaggacgccgacttcgagaacaagcccatgatcctgctggtgggccagtacagcaccggcaagaccaccttcatcagatacctactggagcaggatttcccaggcatgaggattggtccggagcccaccacagactccttcatcgccgtgatgtatggagagactgagggcagcaccccagggaatgctttagtcgtggaccccaaaaagccgtttagaaagctcagtcgctttggaaacgctttcctgaatcgattcatgtgctcacagctccccaatcaggtcctgaagagcatcagcgtcatcgacagccccggcatcctttctggggagaagcagcgcatcagccgaggctatgacttctgccaggtcctgcagtggtttgccgagagggtggacaggatcatcctgctctttgacgctcacaagctggacatctcagatgaattctcagaggccatcaaggccttccggggccaggacgacaagatccgtgtcgtgctgaacaaggccgaccaagtggacacgcagcagctgatgcgggtctacggggccctcatgtggtccctaggcaaggtcatcaacacgcccgaggtactgcgcgtctacattggctccttctgggcgcagcccctgcagaacacggacaaccgccggctcttcgaggctgaggcccaggacctctttagagacatccagagcctcccccagaaggcagcggtgcgcaagctcaacgacctcatcaagcgagcgaggctggccaaggtgcatgcctacatcatcagctacctgaagaaggagatgccaagtgtatttggaaaggaaaacaagaagagagagcttatcagcaggctaccggaaatctacattcagctacagcgagaataccagatttctgcaggggacttccctgaggtcaaggctatgcaggaacagcttgagaactatgacttcaccaaattccactcgctgaagcccaagctgatcgaggcagtggacaacatgctgagcaacaagatctcgcccctcatgaacctcatcagccaggaggagacgagcacgcccacgcagctggtgcagggcggcgccttcgatggcaccaccgagggccccttcaaccagggctacggggagggtgccaaggagggcgccgacgaggaggagtgggtcgtggccaaagacaagcccgtctacgacgagctcttctacactctgtcgcccatcaatggcaagatatcaggtgtcaacgccaagaaggagatggtgacctccaagctgcccaacagcgtcctgggcaagatctggaagctggccgactgcgactgcgacggcatgcttgatgaggaggagttcgcgctggccaagcacctcatcaagatcaagctcgacggctacgagctgcccagcagcctgcccccccacctcgtgcccccctcgcacaggaagtccctgcccaaggccgactgaggggtgggctgcagaacggggtgggaactgggggacctgggcctcaggcctgctccaccactgactcaccgaatgaccttgggcaaggcactgccctctctgtgccttggtttccccatctgtagaatggggagggtggacactggaaactagatgacttctttcacctccaaaattcccttagtttctatgaaaatattgggggtaggggggtggattaggagattgaagggttgagaagaaagagaaattgtccaaagagtcctcagaacctgcctggagaaatgcgcatgggggtgggcctggtaagtcccaggaaccacaggaagtgagctaaggctcacccagagcagctgggtctccaggctgcctgggctttttgtcctcatgaacaactctggagcagctgtctgtccctcagagggcacctggaggcagcaaagattatcttatttattttattttgttttctgctatatttagagtggcaaaaaaatagagcagagggtttctgctgtctccagactgtctaccaaagagaaggcgacagatgcctcctgggtttggaagggggatgcactgtggatctgccatccattctgcagtctccagcagagcaggcagtcaggccccagcgtgcctccatcccagtgccccgatgaccatctggtcagccctcccaacctcccttccagggggcttaccagcaaagccatattcggctaggaatttggaattcacaacctttattaacccctggcaaaacttcccgtttgcatgtcaaatcacattgaagcctgaagattagcttttcttactggtttttccaataagtaatagcaaagcccacttatcatacttaaactacagtaaagaaaagaggtggttctctgcagtgatcgtttagtgtggccctcaaacattaaatatccccaggtctccttggtgggtggcaggatttaaattcaatcaaatcctgtcctagtgtgtgcagtgtcttcggccctgtggacacaggtgaatgagggaccagccctgccctgggctgttgagaagagatcagtccacccagagttagacattgtttttgtagaaaacaggcatttattatgtctagggttttgtgttttttttttttccttacaggataaaagcctttatacagaaacaaaatggaacctttcatataaaaccttttctttaaaggctgtgtggttcgtatcatgaatgcccatcacgaggcaggattcgggcacatacctgtacttctgctccagagtgtgcgctccccaaatcccctgagtaaacctctctggactgctgctcagacacctgcgtcaggtggaggtgcctccccctctgtgggcaccagcttggggaggtaggtgacttttccttgcaaatctccctgcctcatctccagaaaattgcatacctgcatggcctctctgcattatttatgcaggaagagacacgaaacagcaatggccacatggtatgggggcctgctggcaccagaagtgaatgaaatcagaaccgtcccactgagtcttccaaaaggcacataattttttttttctgtcacctgcctttggtgacagggtcaaaggcacagattgaagagaaaatcttgatttgggagaagcatttatatccagatgcctacccttacactccctagcttactttctacataatttagttttaagagcaggaaatgcataacatggtttttagtcttaacaagcacttaaattcattagacgcatagaaaagaaccatttattattttattatttttatttttattttgagaggaagtctctgtcacccaggctggagtgcagtggcgcaatctcagttcactgcaacctccgcctcccaggttcaagtgattcccctgcctcagcctcccaagtagctgggactacaggcacccgccaccacgcccggctaatttttgtattttagtagagatggggttttaccatgttggtcaatatggtctcgatctcctgacctcgtgatctacccacctcggcctcccaaagtgctgtaacctaagcagacagttctgtgaatgcgtgaggaccacctgaagtctgcagccacggtggaggtcaccaaagggtgaactgagagagaagagggaattcacttgcccaaaggtttacagatgcccaggcaaactgatttttccatccagaattatcttgttctttaactctcctcaattgtcatatataaacatgaatttatatacatgtgtgtcacatgagtatgtcgttttaaaacaacgtgtacatatgtaagttttgtctggatacagaaagctgctttagagggcagcaggttgaggtctctgatttctccgtggaggaaaacctctcaggcactgtgatctccctacctctgcgctctcaggtgggagaggcgtcaggcagcggagtcctttccctgctggcacctggtaatgttcttgg

SEQ ID NO: 312614 - DNA, 3187 bp, Homo sapiens
agtgctggcacgagggagagtcgaacccggagcagggtcccatccgagcgtggactggcggcaggatgttcagctggatggggcggcaggcgggcgggcgcgaacgcgctggcggcgcggacgcggtgcagacggtgacgggcgggctgcgctcgctctacctgcgcaaggtgctgccgctggaggaggcgtaccgcttccacgagttccactcgcctgcgctggaggacgccgacttcgagaacaagcccatgatcctgctggtgggccagtacagcaccggcaagaccaccttcatcagatacctactggagcaggatttcccaggcatgaggattggtccggagcccaccacagactccttcatcgccgtgatgtatggagagactgagggcagcaccccagggaatgctttagtcgtggaccccaaaaagccgtttagaaagctcagtcgctttggaaacgctttcctgaatcgattcatgtgctcacagctccccaatcaggtcctgaagagcatcagcgtcatcgacagccccggcatcctttctggggagaagcagcgcatcagccgaggctatgacttctgccaggtcctgcagtggtttgccgagagggtggacaggatcatcctgctctttgacgctcacaagctggacatctcagatgaattctcagaggccatcaaggccttccggggccaggacgacaagatccgtgtcgtgctgaacaaggccgaccaagtggacacgcagcagctgatgcgggtctacggggccctcatgtggtccctaggcaaggtcatcaacacgcccgaggtactgcgcgtctacattggctccttctgggcgcagcccctgcagaacacggacaaccgccggctcttcgaggctgaggcccaggacctctttagagacatccagagcctcccccagaaggcagcggtgcgcaagctcaacgacctcatcaagcgagcgaggctggccaaggtgcatgcctacatcatcagctacctgaagaaggagatgccaagtgtatttggaaaggaaaacaagaagagagagcttatcagcaggctaccggaaatctacattcagctacagcgagaataccagatttctgcaggggacttccctgaggtcaaggctatgcaggaacagcttgagaactatgacttcaccaaattccactcgctgaagcccaagctgatcgaggcagtggacaacatgctgagcaacaagatctcgcccctcatgaacctcatcagccaggaggagacgagcacgcccacgcagctggtgcagggcggcgccttcgatggcaccaccgagggccccttcaaccagggctacggggagggtgccaaggagggcgccgacgaggaggagtgggtcgtggccaaagacaagcccgtctacgacgagctcttctacactctgtcgcccatcaatggcaagatatcaggtgtcaacgccaagaaggagatggtgacctccaagctgcccaacagcgtcctgggcaagatctggaagctggccgactgcgactgcgacggcatgcttgatgaggaggagttcgcgctggccaagcacctcatcaagatcaagctcgacggctacgagctgcccagcagcctgcccccccacctcgtgcccccctcgcacaggaagtccctgcccaaggccgactgaggggtgggctgcagaacggggtgggaactgggggacctgggcctcaggcctgctccaccactgactcaccgaatgaccttgggcaaggcactgccctctctgtgccttggtttccccatctgtagaatggggagggtggacactggaaactagatgacttctttcacctccaaaattcccttagtttctatgaaaatattgggggtaggggggtggattaggagattgaagggttgagaagaaagagaaattgtccaaagagtcctcagaacctgcctggagaaatgcgcatgggggtgggcctggtaagtcccaggaaccacaggaagtgagctaaggctcacccagagcagctgggtctccaggctgcctgggctttttgtcctcatgaacaactctggagcagctgtctgtccctcagagggcacctggaggcagcaaagattatcttatttattttattttgttttctgctatatttagagtggcaaaaaaatagagcagagggtttctgctgtctccagactgtctaccaaagagaaggcgacagatgcctcctgggtttggaagggggatgcactgtggatctgccatccattctgcagtctccagcagagcaggcagtcaggccccagcgtgcctccatcccagtgccccgatgaccatctggtcagccctcccaacctcccttccagggggcttaccagcaaagccatattcggctaggaatttggaattcacaacctttattaacccctggcaaaacttcccgtttgcatgtcaaatcacattgaagcctgaagattagcttttcttactggtttttccaataagtaatagcaaagcccacttatcatacttaaactacagtaaagaaaagaggtggttctctgcagtgatcgtttagtgtggccctcaaacattaaatatccccaggtctccttggtgggtggcaggatttaaattcaatcaaatcctgtcctagtgtgtgcagtgtcttcggccctgtggacacaggtgaatgagggaccagccctgccctgggctgttgagaagagatcagtccacccagagttagacattgtttttgtagaaaacaggcatttattatgtctagggttttgtgttttttttttttccttacaggataaaagcctttatacagaaacaaaatggaacctttcatataaaaccttttctttaaaaaaaaaaaaaaaaaaaaaaaaaaaaaaaaaaaaaaaaaaagggggggggtcatatagagagcggggggagcgggaaaaagagagaggcagagagagaagaggggccaagcagagggcgcaaaccgatggtggtgctgcggagagccccaccgattttctgtggcaacacagaaggggggaaaaaaataaggcggcgggagacaccctataagagggggggggagggataaataataggtcgcgaaaaaagacgcgcggggtaaaaccgcgggtaaaaagaaagggggagaa

SEQ ID NO: 312615 - DNA, 3899 bp, Homo sapiens
agtgctggcacgagggagagtcgaacccggagcagggtcccatccgagcgtggactggcggcaggatgttcagctggatggggcggcaggcgggcgggcgcgaacgcgctggcggcgcggacgcggtgcagacggtgacgggcgggctgcgctcgctctacctgcgcaaggtgctgccgctggaggaggcgtaccgcttccacgagttccactcgcctgcgctggaggacgccgacttcgagaacaagcccatgatcctgctggtgggccagtacagcaccggcaagaccaccttcatcagatacctactggagcaggatttcccaggcatgaggattggtccggagcccaccacagactccttcatcgccgtgatgtatggagagactgagggcagcaccccagggaatgctttagtcgtggaccccaaaaagccgtttagaaagctcagtcgctttggaaacgctttcctgaatcgattcatgtgctcacagctccccaatcaggtcctgaagagcatcagcgtcatcgacagccccggcatcctttctggggagaagcagcgcatcagccgaggctatgacttctgccaggtcctgcagtggtttgccgagagggtggacaggatcatcctgctctttgacgctcacaagctggacatctcagatgaattctcagaggccatcaaggccttccggggccaggacgacaagatccgtgtcgtgctgaacaaggccgaccaagtggacacgcagcagctgatgcgggtctacggggccctcatgtggtccctaggcaaggtcatcaacacgcccgaggtactgcgcgtctacattggctccttctgggcgcagcccctgcagaacacggacaaccgccggctcttcgaggctgaggcccaggacctctttagagacatccagagcctcccccagaaggcagcggtgcgcaagctcaacgacctcatcaagcgagcgaggctggccaaggtgcatgcctacatcatcagctacctgaagaaggagatgccaagtgtatttggaaaggaaaacaagaagagagagcttatcagcaggctaccggaaatctacattcagctacagcgagaataccagatttctgcaggggacttccctgaggtcaaggctatgcaggaacagcttgagaactatgacttcaccaaattccactcgctgaagcccaagctgatcgaggcagtggacaacatgctgagcaacaagatctcgcccctcatgaacctcatcagccaggaggagacgagcacgcccacgcagctggtgcagggcggcgccttcgatggcaccaccgagggccccttcaaccagggctacggggagggtgccaaggagggcgccgacgaggaggagtgggtcgtggccaaagacaagcccgtctacgacgagctcttctacactctgtcgcccatcaatggcaagatatcaggtgtcaacgccaagaaggagatggtgacctccaagctgcccaacagcgtcctgggcaagatctggaagctggccgactgcgactgcgacggcatgcttgatgaggaggagttcgcgctggccaagcacctcatcaagatcaagctcgacggctacgagctgcccagcagcctgcccccccacctcgtgcccccctcgcacaggaagtccctgcccaaggccgactgaggggtgggctgcagaacggggtgggaactgggggacctgggcctcaggcctgctccaccactgactcaccgaatgaccttgggcaaggcactgccctctctgtgccttggtttccccatctgtagaatggggagggtggacactggaaactagatgacttctttcacctccaaaattcccttagtttctatgaaaatattgggggtaggggggtggattaggagattgaagggttgagaagaaagagaaattgtccaaagagtcctcagaacctgcctggagaaatgcgcatgggggtgggcctggtaagtcccaggaaccacaggaagtgagctaaggctcacccagagcagctgggtctccaggctgcctgggctttttgtcctcatgaacaactctggagcagctgtctgtccctcagagggcacctggaggcagcaaagattatcttatttattttattttgttttctgctatatttagagtggcaaaaaaatagagcagagggtttctgctgtctccagactgtctaccaaagagaaggcgacagatgcctcctgggtttggaagggggatgcactgtggatctgccatccattctgcagtctccagcagagcaggcagtcaggccccagcgtgcctccatcccagtgccccgatgaccatctggtcagccctcccaacctcccttccagggggcttaccagcaaagccatattcggctaggaatttggaattcacaacctttattaacccctggcaaaacttcccgtttgcatgtcaaatcacattgaagcctgaagattagcttttcttactggtttttccaataagtaatagcaaagcccacttatcatacttaaactacagtaaagtccccaggtctccttggtgggtggcaggatttaaattcaatcaaatcctgtcctagtgtgtgcagtgtcttcggccctgtggacacaggtgaatgagggaccagccctgccctgggctgttgagaagagatcagtccacccagagttagacattgtttttgtagaaaacaggcatttattatgtctagggttttgtgttttttttttttccttacaggataaaagcctttatacagaaacaaaatggaacctttcatataaaaccttttctttaaaggctgtgtggttcgtatcatgaatgcccatcacgaggcaggattcgggcacatacctgtacttctgctccagagtgtgcgctccccaaatcccctgagtaaacctctctggactgctgctcagacacctgcgtcaggtggaggtgcctccccctctgtgggcaccagcttggggaggtaggtgacttttccttgcaaatctccctgcctcatctccagaaaattgcatacctgcatggcctctctgcattatttatgcaggaagagacacgaaacagcaatggccacatggtatgggggcctgctggcaccagaagtgaatgaaatcagaaccgtcccactgagtcttccaaaaggcacataattttttttttctgtcacctgcctttggtgacagggtcaaaggcacagattgaagagaaaatcttgatttgggagaagcatttatatccagatgcctacccttacactccctagcttactttctacataatttagttttaagagcaggaaatgcataacatggtttttagtcttaacaagcacttaaattcattagacgcatagaaaagaaccatttattattttattatttttatttttattttgagaggaagtctctgtcacccaggctggagtgcagtggcgcaatctcagttcactgcaacctccgcctcccaggttcaagtgattcccctgcctcagcctcccaagtagctgggactacaggcacccgccaccacgcccggctaatttttgtattttagtagagatggggttttaccatgttggtcaatatggtctcgatctcctgacctcgtgatctacccacctcggcctcccaaagtgctgtaacctaagcagacagttctgtgaatgcgtgaggaccacctgaagtctgcagccacggtggaggtcaccaaagggtgaactgagagagaagagggaattcacttgcccaaaggtttacagatgcccaggcaaactgatttttccatccagaattatcttgttctttaactctcctcaattgtcatatataaacatgaatttatata

SEQ ID NO: 312616 - DNA, 1721 bp, Homo sapiens
agtgctggcacgagggagagtcgaacccggagcagggtcccatccgagcgtggactggcggcaggatgttcagctggatggggcggcaggcgggcgggcgcgaacgcgctggcggcgcggacgcggtgcagacggtgacgggcgggctgcgctcgctctacctgcgcaaggtgctgccgctggaggaggcgtaccgcttccacgagttccactcgcctgcgctggaggacgccgacttcgagaacaagcctcttctacactctgtcgcccatcaatggcaagatatcaggtgtcaacgccaagaaggagatggtgacctccaagctgcccaacagcgtcctgggcaagatctggaagctggccgactgcgactgcgacggcatgcttgatgaggaggagttcgcgctggccaagcacctcatcaagatcaagctcgacggctacgagctgcccagcagcctgcccccccacctcgtgcccccctcgcacaggaagtccctgcccaaggccgactgaggggtgggctgcagaacggggtgggaactgggggacctgggcctcaggcctgctccaccactgactcaccgaatgaccttgggcaaggcactgccctctctgtgccttggtttccccatctgtagaatggggagggtggacactggaaactagatgacttctttcacctccaaaattcccttagtttctatgaaaatattgggggtaggggggtggattaggagattgaagggttgagaagaaagagaaattgtccaaagagtcctcagaacctgcctggagaaatgcgcatgggggtgggcctggtaagtcccaggaaccacaggaagtgagctaaggctcacccagagcagctgggtctccaggctgcctgggctttttgtcctcatgaacaactctggagcagctgtctgtccctcagagggcacctggaggcagcaaagattatcttatttattttattttgttttctgctatatttagagtggcaaaaaaatagagcagagggtttctgctgtctccagactgtctaccaaagagaaggcgacagatgcctcctgggtttggaagggggatgcactgtggatctgccatccattctgcagtctccagcagagcaggcagtcaggccccagcgtgcctccatcccagtgccccgatgaccatctggtcagccctcccaacctcccttccagggggcttaccagcaaagccatattcggctaggaatttggaattcacaacctttattaacccctggcaaaacttcccgtttgcatgtcaaatcacattgaagcctgaagattagcttttcttactggtttttccaataagtaatagcaaagcccacttatcatacttaaactacagtaaagaaaagaggtggttctctgcagtgatcgtttagtgtggccctcaaacattaaatatccccaggtctccttggtgggtggcaggatttaaattcaatcaaatcctgtcctagtgtgtgcagtgtcttcggccctgtggacacaggtgaatgagggaccagccctgccctgggctgttgagaagagatcagtccacccagagttagacattgtttttgtagaaaacaggcatttattatgtctagggttttgtgttttttttttttccttacaggataaaagcctttatacagaaacaaaatggaacctttcatataaaaccttttctttaaa

SEQ ID NO: 312617 - DNA, 694 bp, Homo sapiens
  misc_feature (2)..(2): n is a, c, g, or t
  misc_feature (6)..(7): n is a, c, g, or t
  misc_feature (10)..(10): n is a, c, g, or t
tnattnnctncctgcagtcgatctagaggatccccgagtgggtcagtgtcttctggaagggggatgcactgtggatctgccatccattctgcagtctccagcagagcaggcagtcaggccccagcgtgcctccatcccagtgccccgatgaccatctggtcagccctcccaacctcccttccagggggcttaccagcaaagccatattcggctaggaatttggaattcacaacctttattaacccctggcaaaacttcccgtttgcatgtcaaatcacattgaagcctgaagattagcttttcttactggtttttccaataagtaatagcaaagcccacttatcatacttaaactacagtaaagaaaagaggtggttctctgcagtgatcgtttagtgtggccctcaaacattaaatatccccaggtctccttggtgggtggcaggatttaaattcaatcaaatcctgtcctagtgtgtgcagtgtcttcggccctgtggacacaggtgaatgagggaccagccctgccctgggctgttgagaagagatcagtccacccagagttagacattgtttttgtagaaaacaggcatttattatgtctagggttttgtgttttttttttttccttacaggataaaagcctttatacagaaacaaaatggaacctttcatataaaaccttttctttaaa

SEQ ID NO: 312618 - DNA, 2055 bp, Homo sapiens
agtgctggcacgagggagagtcgaacccggagcagggtcccatccgagcgtggactggcggcaggatgttcagctggatggggcggcaggcgggcgggcgcgaacgcgctggcggcgcggacgcggtgcagacggtgacgggcgggctgcgctcgctctacctgcgcaaggtgctgccgctggaggaggcgtaccgcttccacgagttccactcgcctgcgctggaggacgccgacttcgagaacaagcccatgatcctgctggtgggccagtacagcaccggcaagaccaccttcatcagatacctactggagcaggatttcccaggcatgaggattggtccggagcccaccacagactccttcatcgccgtgatgtatggagagactgagggcagcaccccagggaatgctttagtcgtggaccccaaaaagccgtttagaaagctcagtcgctttggaaacgctttcctgaatcgattcatgtgctcacagctccccaatcaggtcctgaagagcatcagcgtcatcgacagccccggcatcctttctggggagaagcagcgcatcagccgaggctatgacttctgccaggtcctgcagtggtttgccgagagggtggacaggatcatcctgctctttgacgctcacaagctggacatctcagatgaattctcagaggccatcaaggccttccggggccaggacgacaagatccgtgtcgtgctgaacaaggccgaccaagtggacacgcagcagctgatgcgggtctacggggccctcatgtggtccctaggcaaggtcatcaacacgcccgaggtactgcgcgtctacattggctccttctgggcgcagcccctgcagaacacggacaaccgccggctcttcgaggctgaggcccaggacctctttagagacatccagagcctcccccagaaggcagcggtgcgcaagctcaacgacctcatcaagcgagcgaggctggccaaggtgcatgcctacatcatcagctacctgaagaaggagatgccaagtgtatttggaaaggaaaacaagaagagagagcttatcagcaggctaccggaaatctacattcagctacagcgagaataccagatttctgcaggggacttccctgaggtcaaggctatgcaggaacagcttgagaactatgacttcaccaaattccactcgctgaagcccaagctgatcgaggcagtggacaacatgctgagcaacaagatctcgcccctcatgaacctcatcagccaggaggagacgagcacgcccacgcagctggtgcagggcggcgccttcgatggcaccaccgagggccccttcaaccagggctacggggagggtgccaaggagggcgccgacgaggaggagtgggtcgtggccaaagacaagcccgtctacgacgagctcttctacactctgtcgcccatcaatggcaagatatcaggtgtcaacgccaagaaggagatggtgacctccaagctgcccaacagcgtcctgggcaagatctggaagctggccgactgcgactgcgacggcatgcttgatgaggaggagttcgcgctggccaagcacctcatcaagatcaagctcgacggctacgagctgcccagcagcctgcccccccacctcgtgcccccctcgcacaggaagtccctgcccaaggccgactgaggggtgggctgcagaacggggtgggaactgggggacctgggcctcaggcctgctccaccactgactcaccgaatgaccttgggcaaggcactgccctctctgtgccttggtttccccatctgtagaatggggagggtggacactggaaactagatgacttctttcacctccaaaattcccttagtttctatgaaaatattgggggtaggggggtggattaggagatggcaggacctggacccttgaagaccagctaaacgggaactggatagcaggcctgaagttagactggagtgaatggtaagagagcaccacggacagcatgcagcacgtaaaatggcagccacgcagacctatgatagga

SEQ ID NO: 312619 - DNA, 689 bp, Homo sapiens
aaagaaaaggttttatatgaaaggttccattttgtttctgtataaaggcttttatcctgtaaggaaaaaaaaaaaaacacaaaaccctagacataataaatgcctgttttctacaaaaacaatgtctaactctgggtggactgatctcttctcatcagccctcccaacctcccttccagggggcttaccagcaaagccatattcggctaggaatttggaattcacaacctttattaacccctggcaaaacttcccgtttgcatgtcaaatcacattgaagcctgaagattagcttttcttactggtttttccaataagtaatagcaaagcccacttatcatacttaaactacagtaaagaaaagaggtggttctctgcagtgatcgtttagtgtggccctcaaacattaaatatccccaggtctccttggtgggtggcaggatttaaattcaatcaaatcctgtcctagtgtgtgcagtgtcttcggccctgtggacacaggtgaatgagggaccagccctgccctgggctgttgagaagagatcagtccacccagagttagacattgtttttgtagaaaacaggcatttattatgtctagggttttgtgttttttttttttccttacaggataaaagcctttatacagaaacaaaatggaacctttcatataaaaccttttctttaaa

SEQ ID NO: 312620 - DNA, 1386 bp, Homo sapiens
caatggtacacttacctgtacccacccgggtgaaaatcgatggccccgggcgctccccaggtctccttggtgggtggcaggatttaaattcaatcaaatcctgtcctagtgtgtgcagtgtcttcggccctgtggacacaggtgaatgagggaccagccctgccctgggctgttgagaagagatcagtccacccagagttagacattgtttttgtagaaaacaggcatttattatgtctagggttttgtgttttttttttttccttacaggataaaagcctttatacagaaacaaaatggaacctttcatataaaaccttttctttaaaggctgtgtggttcgtatcatgaatgcccatcacgaggcaggattcgggcacatacctgtacttctgctccagagtgtgcgctccccaaatcccctgagtaaacctctctggactgctgctcagacacctgcgtcaggtggaggtgcctccccctctgtgggcaccagcttggggaggtaggtgacttttccttgcaaatctccctgcctcatctccagaaaattgcatacctgcatggcctctctgcattatttatgcaggaagagacacgaaacagcaatggccacatggtatgggggcctgctggcaccagaagtgaatgaaatcagaaccgtcccactgagtcttccaaaaggcacataattttttttttctgtcacctgcctttggtgacagggtcaaaggcacagattgaagagaaaatcttgatttgggagaagcatttatatccagatgcctacccttacactccctagcttactttctacataatttagttttaagagcaggaaatgcataacatggtttttagtcttaacaagcacttaaattcattagacgcatagaaaagaaccatttattattttattatttttatttttattttgagaggaagtctctgtcacccaggctggagtgcagtggcgcaatctcagttcactgcaacctccgcctcccaggttcaagtgattcccctgcctcagcctcccaagtagctgggactacaggcacccgccaccacgcccggctaatttttgtattttagtagagatggggttttaccatgttggtcaatatggtctcgatctcctgacctcgtgatctacccacctcggcctcccaaagtgctgtaacctaagcagacagttctgtgaatgcgtgaggaccacctgaagtctgcagccacggtggaggtcaccaaagggtgaactgagagagaagagggaattcacttgcccaaaggtttacagatgcccaggcaaactgatttttccatccagaattatcttgttctttaactctcctcaattgtcatatataaacatgaatttatata

SEQ ID NO: 312621 - DNA, 2086 bp, Homo sapiens
agtgctggcacgagggagagtcgaacccggagcagggtcccatccgagcgtggactggcggcaggatgttcagctggatggggcggcaggcgggcgggcgcgaacgcgctggcggcgcggacgcggtgcagacggtgcgcaagctcaacgacctcatcaagcgagcgaggctggccaaggtgcatgcctacatcatcagctacctgaagaaggagatgccaagtgtatttggaaaggaaaacaagaagagagagcttatcagcaggctaccggaaatctacattcagctacagcgagaataccagatttctgcaggggacttccctgaggtcaaggctatgcaggaacagcttgagaactatgacttcaccaaattccactcgctgaagcccaagctgatcgaggcagtggacaacatgctgagcaacaagatctcgcccctcatgaacctcatcagccaggaggagacgagcacgcccacgcagctggtgcagggcggcgccttcgatggcaccaccgagggccccttcaaccagggctacggggagggtgccaaggagggcgccgacgaggaggagtgggtcgtggccaaagacaagcccgtctacgacgagctcttctacactctgtcgcccatcaatggcaagatatcaggtgtcaacgccaagaaggagatggtgacctccaagctgcccaacagcgtcctgggcaagatctggaagctggccgactgcgactgcgacggcatgcttgatgaggaggagttcgcgctggccaagcacctcatcaagatcaagctcgacggctacgagctgcccagcagcctgcccccccacctcgtgcccccctcgcacaggaagtccctgcccaaggccgactgaggggtgggctgcagaacggggtgggaactgggggacctgggcctcaggcctgctccaccactgactcaccgaatgaccttgggcaaggcactgccctctctgtgccttggtttccccatctgtagaatggggagggtggacactggaaactagatgacttctttcacctccaaaattcccttagtttctatgaaaatattgggggtaggggggtggattaggagattgaagggttgagaagaaagagaaattgtccaaagagtcctcagaacctgcctggagaaatgcgcatgggggtgggcctggtaagtcccaggaaccacaggaagtgagctaaggctcacccagagcagctgggtctccaggctgcctgggctttttgtcctcatgaacaactctggagcagctgtctgtccctcagagggcacctggaggcagcaaagattatcttatttattttattttgttttctgctatatttagagtggcaaaaaaatagagcagagggtttctgctgtctccagactgtctaccaaagagaaggcgacagatgcctcctgggtttggaagggggatgcactgtggatctgccatccattctgcagtctccagcagagcaggcagtcaggccccagcgtgcctccatcccagtgccccgatgaccatctggtcagccctcccaacctcccttccagggggcttaccagcaaagccatattcggctaggaatttggaattcacaacctttattaacccctggcaaaacttcccgtttgcatgtcaaatcacattgaagcctgaagattagcttttcttactggtttttccaataagtaatagcaaagcccacttatcatacttaaactacagtaaagaaaagaggtggttctctgcagtgatcgtttagtgtggccctcaaacattaaatatccccaggtctccttggtgggtggcaggatttaaattcaatcaaatcctgtcctagtgtgtgcagtgtcttcggccctgtggacacaggtgaatgagggaccagccctgccctgggctgttgagaagagatcagtccacccagagttagacattgtttttgtagaaaacaggcatttattatgtctagggttttgtgttttttttttttccttacaggataaaagcctttatacagaaacaaaatggaacctttcatataaaaccttttctttaaa

SEQ ID NO: 312622 - DNA, 3953 bp, Homo sapiens
agtgctggcacgagggagagtcgaacccggagcagggtcccatccgagcgtggactggcggcaggatgttcagctggatggggcggcaggcgggcgggcgcgaacgcgctggcggcgcggacgcggtgcagacggtgacgggcgggctgcgctcgctctacctgcgcaaggtgctgccgctggaggaggcgtaccgcttccacgagttccactcgcctgcgctggaggacgccgacttcgagaacaagcccatgatcctgctggtgggccagtacagcaccggcaagaccaccttcatcagatacctactggagcaggatttcccaggcatgaggattggtccggagcccaccacagactccttcatcgccgtgatgtatggagagactgagggcagcaccccagggaatgctttagtcgtggaccccaaaaagccgtttagaaagctcagtcgctttggaaacgctttcctgaatcgattcatgtgctcacagctccccaatcaggtcctgaagagcatcagcgtcatcgacagccccggcatcctttctggggagaagcagcgcatcagccgaggctatgacttctgccaggtcctgcagtggtttgccgagagggtggacaggatcatcctgctctttgacgctcacaagctggacatctcagatgaattctcagaggccatcaaggccttccggggccaggacgacaagatccgtgtcgtgctgaacaaggccgaccaagtggacacgcagcagctgatgcgggtctacggggccctcatgtggtccctaggcaaggtcatcaacacgcccgaggtactgcgcgtctacattggctccttctgggcgcagcccctgcagaacacggacaaccgccggctcttcgaggctgaggcccaggacctctttagagacatccagagcctcccccagaaggcagcggtgcgcaagctcaacgacctcatcaagcgagcgaggctggccaaggtgcatgcctacatcatcagctacctgaagaaggagatgccaagtgtatttggaaaggaaaacaagaagagagagcttatcagcaggctaccggaaatctacattcagctacagcgagaataccagatttctgcaggggacttccctgaggtcaaggctatgcaggaacagcttgagaactatgacttcaccaaattccactcgctgaagcccaagctgatcgaggcagtggacaacatgctgagcaacaagatctcgcccctcatgaacctcatcagccaggaggagacgagcacgcccacgcagctggtgcagggcggcgccttcgatggcaccaccgagggccccttcaaccagggctacggggagggtgccaaggagggcgccgacgaggaggagtgggtcgtggccaaagacaagcccgtctacgacgagctcttctacactctgtcgcccatcaatggcaagatatcaggtgtcaacgccaagaaggagatggtgacctccaagctgcccaacagcgtcctgggcaagatctggaagctggccgactgcgactgcgacggcatgcttgatgaggaggagttcgcgctggccaagcacctcatcaagatcaagctcgacggctacgagctgcccagcagcctgcccccccacctcgtgcccccctcgcacaggaagtccctgcccaaggccgactgaggggtgggctgcagaacggggtgggaactgggggacctgggcctcaggcctgctccaccactgactcaccgaatgaccttgggcaaggcactgccctctctgtgccttggtttccccatctgtagaatggggagggtggacactggaaactagatgacttctttcacctccaaaattcccttagtttctatgaaaatattgggggtaggggggtggattaggagattgaagggttgagaagaaagagaaattgtccaaagagtcctcagaacctgcctggagaaatgcgcatgggggtgggcctggtaagtcccaggaaccacaggaagtgagctaaggctcacccagagcagctgggtctccaggctgcctgggctttttgtcctcatgaacaactctggagcagctgtctgtccctcagagggcacctggaggcagcaaagattatcttatttattttattttgttttctgctatatttagagtggcaaaaaaatagagcagagggtttctgctgtctccagactgtctaccaaagagaaggcgacagatgcctcctgggtttggaagggggatgcactgtggatctgccatccattctgcagtctccagcagagcaggcagtcaggccccagcgtgcctccatcccagtgccccgatgaccatctggtcagccctcccaacctcccttccagggggcttaccagcaaagccatattcggctaggaatttggaattcacaacctttattaacccctggcaaaacttcccgtttgcatgtcaaatcacattgaagcctgaagattagcttttcttactggtttttccaataagtaatagcaaagcccacttatcatacttaaactacagtaaagaaaagaggtggttctctgcagtgatcgtttagtgtggccctcaaacattaaatatccccaggtctccttggtgggtggcaggatttaaattcaatcaaatcctgtcctagtgtgtgcagtgtcttcggccctgtggacacaggtgaatgagggaccagccctgccctgggctgttgagaagagatcagtccacccagagttagacattgtttttgtagaaaacaggcatttattatgtctagggttttgtgttttttttttttccttacaggataaaagcctttatacagaaacaaaatggaacctttcatataaaaccttttctttaaaggctgtgtggttcgtatcatgaatgcccatcacgaggcaggattcgggcacatacctgtacttctgctccagagtgtgcgctccccaaatcccctgagtaaacctctctggactgctgctcagacacctgcgtcaggtggaggtgcctccccctctgtgggcaccagcttggggaggtaggtgacttttccttgcaaatctccctgcctcatctccagaaaattgcatacctgcatggcctctctgcattatttatgcaggaagagacacgaaacagcaatggccacatggtatgggggcctgctggcaccagaagtgaatgaaatcagaaccgtcccactgagtcttccaaaaggcacataattttttttttctgtcacctgcctttggtgacagggtcaaaggcacagattgaagagaaaatcttgatttgggagaagcatttatatccagatgcctacccttacactccctagcttactttctacataatttagttttaagagcaggaaatgcataacatggtttttagtcttaacaagcacttaaattcattagacgcatagaaaagaaccatttattattttattatttttatttttattttgagaggaagtctctgtcacccaggctggagtgcagtggcgcaatctcagttcactgcaacctccgcctcccaggttcaagtgattcccctgcctcagcctcccaagtagctgggactacaggcacccgccaccacgcccggctaatttttgtattttagtagagatggggttttaccatgttggtcaatatggtctcgatctcctgacctcgtgatctacccacctcggcctcccaaagtgctgtaacctaagcagacagttctgtgaatgcgtgaggaccacctgaagtctgcagccacggtggaggtcaccaaagggtgaactgagagagaagagggaattcacttgcccaaaggtttacagatgcccaggcaaactgatttttccatccagaattatcttgttctttaactctcctcaattgtcatatataaacatgaatttatata

SEQ ID NO: 312623 - DNA, 3529 bp, Homo sapiens
agtgctggcacgagggagagtcgaacccggagcagggtcccatccgagcgtggactggcggcaggatgttcagctggatggggcggcaggcgggcgggcgcgaacgcgctggcggcgcggacgcggtgcagacggtgacgggcgggctgcgctcgctctacctgcgcaaggtgctgccgctggaggaggcgtaccgcttccacgagttccactcgcctgcgctggaggacgccgacttcgagaacaagcccatgatcctgctggtgggccagtacagcaccggcaagaccaccttcatcagatacctactggagcaggatttcccaggcatgaggattggtccggagcccaccacagactccttcatcgccgtgatgtatggagagactgagggcagcaccccagggaatgctttagtcgtggaccccaaaaagccgtttagaaagctcagtcgctttggaaacgctttcctgaatcgattcatgtgctcacagctccccaatcaggtcctgaagagcatcagcgtcatcgacagccccggcatcctttctggggagaagcagcgcatcagccgaggctatgacttctgccaggtcctgcagtggtttgccgagagggtggacaggatcatcctgctctttgacgctcacaagctggacatctcagatgaattctcagaggccatcaaggccttccggggccaggacgacaagatccgtgtcgtgctgaacaaggccgaccaagtggacacgcagcagctgatgcgggtctacggggccctcatgtggtccctaggcaaggtcatcaacacgcccgaggtactgcgcgtctacattggctccttctgggcgcagcccctgcagaacacggacaaccgccggctcttcgaggctgaggcccaggacctctttagagacatccagagcctcccccagaaggcagcggtgcgcaagctcaacgacctcatcaagcgagcgaggctggccaaggtgcatgcctacatcatcagctacctgaagaaggagatgccaagtgtatttggaaaggaaaacaagaagagagagcttatcagcaggctaccggaaatctacattcagctacagcgagaataccagatttctgcaggggacttccctgaggtcaaggctatgcaggaacagcttgagaactatgacttcaccaaattccactcgctgaagcccaagctgatcgaggcagtggacaacatgctgagcaacaagatctcgcccctcatgaacctcatcagccaggaggagacgagcacgcccacgcagctggtgcagggcggcgccttcgatggcaccaccgagggccccttcaaccagggctacggggagggtgccaaggagggcgccgacgaggaggagtgggtcgtggccaaagacaagcccgtctacgacgagctcttctacactctgtcgcccatcaatggcaagatatcaggtgtcaacgccaagaaggagatggtgacctccaagctgcccaacagcgtcctgggcaagatctggaagctggccgactgcgactgcgacggcatgcttgatgaggaggagttcgcgctggccaagcacctcatcaagatcaagctcgacggctacgagctgcccagcagcctgcccccccacctcgtgcccccctcgcacaggaagtccctgcccaaggccgactgaggggtgggctgcagaacggggtgggaactgggggacctgggcctcaggcctgctccaccactgactcaccgaatgaccttgggcaaggcactgccctctctgtgccttggtttccccatctgtagaatggggagggtggacactggaaactagatgacttctttcacctccaaaattcccttagtttctatgaaaatattgggggtaggggggtggattaggagattgaagggttgagaagaaagagaaattgtccaaagagtcctcagaacctgcctggagaaatgcgcatgggggtgggcctggtaagtcccaggaaccacaggaagtgagctaaggctcacccagagcagctgggtctccaggctgcctgggctttttgtcctcatgaacaactctggagcagctgtctgtccctcagagggcacctggaggcagcaaagattatcttatttattttattttgttttctgctatatttagagtggcaaaaaaatagagcagagggtttctgctgtctccagactgtctaccaaagagaaggcgacagatgcctcctgggtttggaagggggatgcactgtggatctgccatccattctgcagtctccagcagagcaggcagtcaggccccagcgtgcctccatcccagtgccccgatgaccatctggtcagccctcccaacctcccttccagggggcttaccagcaaagccatattcggctaggaatttggaattcacaacctttattaacccctggcaaaacttcccgtttgcatgtcaaatcacattgaagcctgaagattagcttttcttactggtttttccaataagtaatagcaaagcccacttatcatacttaaactacagtaaagaaaagaggtggttctctgcagtgatcgtttagtgtggccctcaaacattaaatatccccaggtctccttggtgggtggcaggatttaaattcaatcaaatcctgtcctagtgtgtgcagtgtcttcggccctgtggacacaggtgaatgagggaccagccctgccctgggctgttgagaagagatcagtccacccagagttagacattgtttttgtagaaaacaggcatttattatgtctagggttttgtgttttttttttttccttacaggataaaagcctttatacagaaacaaaatggaacctttcatataaaaccttttctttaaaaaaaaaaaaaaaaaaaaaaaaaaaaaaaaaaaaaaaaaaagggggggatttggggggggggaaaaaggaaaaggggaggaaggtgtcacacagagcaccaagacttttttgtaacaacagggtagaagactatcgagcgcgggcaccccaataaaagggaaggcagcaaaatatacgcgaaagacaccaggaggtaacccttgtttaatagctcctgggaccacaaacaccaagaaaaccaacgaaagaaaaacgatacgagcaagaaggacaacacagagacagcaatatgacaacgacaagcaccgagtactaaacagacaaacacaacagacagagcagacaccgacgaaaaacagagaggagcagccagaaagagcacaaacagaagacgacaaggaaacagaggagaaaagaaaaaagagacacaacaaaaagaaggaagaagaagaacaagaaaccaaaaagaaaaggaaaaagaacaagcaacgcgaaaaacagacagaacacaggaaccaaggacgagagaagaagaacagcggaaaaaacaaaagcagctcacagacacaacaccaaggaagaaaaacgaagcagaaagcaaaaacagagcaagagacgcaacacgcgagacca

SEQ ID NO: 312624 - DNA, 2559 bp, Homo sapiens
gcatgccatccatagactattttatcgactctgactgtatagacatactagactgtgcagacacgccaggcaatgcttacttcttaattggaaaaaccctgccggaaaactcagtcgctttggaaacgctttcctgaatcgattcatgtgctcacagctccccaatcaggtcctgaagagcatcagcgtcatcgacagccccggcatcctttctggggagaagcagcgcatcagccgaggctatgacttctgccaggtcctgcagtggtttgccgagagggtggacaggatcatcctgctctttgacgctcacaagctggacatctcagatgaattctcagaggccatcaaggccttccggggccaggacgacaagatccgtgtcgtgctgaacaaggccgaccaagtggacacgcagcagctgatgcgggtctacggggccctcatgtggtccctaggcaaggtcatcaacacgcccgaggtactgcgcgtctacattggctccttctgggcgcagcccctgcagaacacggacaaccgccggctcttcgaggctgaggcccaggacctctttagagacatccagagcctcccccagaaggcagcggtgcgcaagctcaacgacctcatcaagcgagcgaggctggccaaggtgcatgcctacatcatcagctacctgaagaaggagatgccaagtgtatttggaaaggaaaacaagaagagagagcttatcagcaggctaccggaaatctacattcagctacagcgagaataccagatttctgcaggggacttccctgaggtcaaggctatgcaggaacagcttgagaactatgacttcaccaaattccactcgctgaagcccaagctgatcgaggcagtggacaacatgctgagcaacaagatctcgcccctcatgaacctcatcagccaggaggagacgagcacgcccacgcagctggtgcagggcggcgccttcgatggcaccaccgagggccccttcaaccagggctacggggagggtgccaaggagggcgccgacgaggaggagtgggtcgtggccaaagacaagcccgtctacgacgagctcttctacactctgtcgcccatcaatggcaagatatcaggtgtcaacgccaagaaggagatggtgacctccaagctgcccaacagcgtcctgggcaagatctggaagctggccgactgcgactgcgacggcatgcttgatgaggaggagttcgcgctggccaagcacctcatcaagatcaagctcgacggctacgagctgcccagcagcctgcccccccacctcgtgcccccctcgcacaggaagtccctgcccaaggccgactgaggggtgggctgcagaacggggtgggaactgggggacctgggcctcaggcctgctccaccactgactcaccgaatgaccttgggcaaggcactgccctctctgtgccttggtttccccatctgtagaatggggagggtggacactggaaactagatgacttctttcacctccaaaattcccttagtttctatgaaaatattgggggtaggggggtggattaggagattgaagggttgagaagaaagagaaattgtccaaagagtcctcagaacctgcctggagaaatgcgcatgggggtgggcctggtaagtcccaggaaccacaggaagtgagctaaggctcacccagagcagctgggtctccaggctgcctgggctttttgtcctcatgaacaactctggagcagctgtctgtccctcagagggcacctggaggcagcaaagattatcttatttattttattttgttttctgctatatttagagtggcaaaaaaatagagcagagggtttctgctgtctccagactgtctaccaaagagaaggcgacagatgcctcctgggtttggaagggggatgcactgtggatctgccatccattctgcagtctccagcagagcaggcagtcaggccccagcgtgcctccatcccagtgccccgatgaccatctggtcagccctcccaacctcccttccagggggcttaccagcaaagccatattcggctaggaatttggaattcacaacctttattaacccctggcaaaacttcccgtttgcatgtcaaatcacattgaagcctgaagattagcttttcttactggtttttccaataagtaatagcaaagcccacttatcatacttaaactacagtaaagaaaagaggtggttctctgcagtgatcgtttagtgtggccctcaaacattaaatatccccaggtctccttggtgggtggcaggatttaaattcaatcaaatcctgtcctagtgtgtgcagtgtcttcggccctgtggacacaggtgaatgagggaccagccctgccctgggctgttgagaagagatcagtccacccagagttagacattgtttttgtagaaaacaggcatttattatgtctagggttttgtgttttttttttttccttacaggataaaagcctttatacagaaacaaaatggaacctttcatataaaaccttttctttaaa

SEQ ID NO: 312625 - DNA, 1192 bp, Homo sapiens
agtgctggcacgagggagagtcgaacccggagcagggtcccatccgagcgtggactggcggcaggatgttcagctggatggggcggcaggcgggcgggcgcgaacgcgctggcggcgcggacgcggtgcagacggtgacgggcgggctgcgctcgctctacctgcgcaaggtgctgccgctggaggaggcgtaccgcttccacgagttccactcgcctgcgctggaggacgccgacttcgagaacaagcccatgatcctgctggtgggccagtacagcaccggcaagaccaccttcatcagatacctactggagcaggatttcccaggcatgaggattggtccggagcccaccacagactccttcatcgccgtgatgtatggagagactgagggcagcaccccagggaatgctttagtcgtggaccccaaaaagccgtttagaaagctcagtcgctttggaaacgctttcctgaatcgattcatgtgctcacagctccccaatcaggtcctgaagagcatcagcgtcatcgacagccccggcatcctttctggggagaagcagcgcatcagccgaggctatgacttctgccaggtcctgcagtggtttgccgagagggtggacaggatcatcctgctctttgacgctcacaagctggtcagccctcccaacctcccttccagggggcttaccagcaaagccatattcggctaggaatttggaattcacaacctttattaacccctggcaaaacttcccgtttgcatgtcaaatcacattgaagcctgaagattagcttttcttactggtttttccaataagtaatagcaaagcccacttatcatacttaaactacagtaaagaaaagaggtggttctctgcagtgatcgtttagtgtggccctcaaacattaaatatccccaggtctccttggtgggtggcaggatttaaattcaatcaaatcctgtcctagtgtgtgcagtgtcttcggccctgtggacacaggtgaatgagggaccagccctgccctgggctgttgagaagagatcagtccacccagagttagacattgtttttgtagaaaacaggcatttattatgtctagggttttgtgttttttttttttccttacaggataaaagcctttatacagaaacaaaatggaacctttcatataaaaccttttctttaaa

SEQ ID NO: 312626 - DNA, 1612 bp, Homo sapiens
agtgctggcacgagggagagtcgaacccggagcagggtcccatccgagcgtggactggcggcaggatgttcagctggatggggcggcaggcgggcgggcgcgaacgcgctggcggcgcggacgcggtgcagacggtgacgggcgggctgcgctcgctctacctgcgcaaggtgctgccgctggaggaggcgtaccgcttccacgagttccactcgcctgcgctggaggacgccgacttcgagaacaagcccatgatcctgctggtgggccagtacagcaccggcaagaccaccttcatcagatacctactggagcaggatttcccaggcatgaggattggtccggagcccaccacagactccttcatcgccgtgatgtatggagagactgagggcagcaccccagggaatgctttagtcgtggaccccaaaaagccgtttagaaagctcagtcgctttggaaacgctttcctgaatcgattcatgtgctcacagctccccaatcaggtcctgaagagcatcagcgtcatcgacagccccggcatcctttctggggagaagcagcgcatcagccgaggctatgacttctgccaggtcctgcagtggtttgccgagagggtggacaggatcatcctgctctttgacgctcacaagctggacatctcagatgaattctcagaggccatcaaggccttccggggccaggacgacaagatccgtgtcgtgctgaacaaggccgaccaagtggacacgcagcagctgatgcgggtctacggggccctcatgtggtccctaggcaaggtcatcaacacgcccgaggtactgcgcgtctacattggctccttctgggcgcagcccctgcagaacacggacaaccgccggctcttcgaggctgaggcccaggacctctttagagacatccagagcctcccccagaaggcagcggtgcgcaagctcaacgacctcatcaagcgagcgaggctggccaaggtgcatgcctacatcatcagctacctgaagaaggagatgccaagtgtatttggaaaggaaaacaagaagagagagcttatcagcaggctaccggaaatctacattcagctacagcgagaataccagatttctgcaggggacttccctgaggtcaaggctatgcaggaacagcttgagaactatgacttcaccaaattccactcgctgaagcccaagctgatcgaggcagtggacaacatgctgagcaacaagatctcgcccctcatgaacctcatcagccaggaggagacgagcacgcccacgcagctggtgcagggcggcgccttcgatggcaccaccgagggccccttcaaccagggctacggggagggtgccaaggagggcgccgacgaggaggagtgggtcgtggccaaagacaagcccgtctacgacgagctcttctacactctgtcgcccatcaatggcaagatatcaggtgtcaacgccaaagggtgaactgagagagaagagggaattcacttgcccaaaggtttacagatgcccaggcaaactgatttttccatccagaattatcttgttctttaactctcctcaattgtcatatataaacatgaatttatata

SEQ ID NO: 312627 - DNA, 3410 bp, Homo sapiens
agctggcgacggcggcggcagcggcagaggtggcggcggcgtgtccgtgagagtggcgtgggggcggggaggagaggcggcggcggcagtgtccaagctacgccactcgggctggggcgttgggagcgggagtgcagagcgtggtcgtggcggcggcggtgagaagagcgaggcggaggagggggtgccatggccgggcagcagttccagtacgatgacagtgggaacaccttcttctacttcctcacctccttcgtggggctcatcgtgatcccggcgacatactacctctggccccgagatcagaatgccgagcaaattcgattaaagaatatcagaaaagtatatggaaggtgtatgtggtatcgtttacggttattaaaaccccagccaaatattattcctacagtaaagaaaatagttctgcttgcaggatgggcattgttcttattccttgcatataaagtttccaaaacagaccgagaataccaagaatacaatccttatgaagtattaaatttggatcctggagccacagtagcagaaattaaaaaacaatatcgtttgctgtcacttaaatatcatccagataaaggaggtgatgaggttatgttcatgaggatagcaaaagcttatgctgctttaacggatgaagagtcccggaaaaattgggaagaatttggaaatccagatgggcctcaagccacaagctttggaattgccctgccagcttggatagttgaccagaaaaattcaattctggttttacttgtatatggattggcatttatggttatccttccagttgttgtgggctcttggtggtatcgctcaatacgctatagtggagaccagattctaatacgcacaacacagatttatacatactttgtttataaaacccgaaatatggatatgaaacgtcttatcatggttttggctggagcttctgaatttgatcctcagtataataaagatgccacaagcagaccaacggataatattctaataccacagctaatcagagaaattggcagcattaatttaaagaagaatgagcctccacttacctgcccatatagcctgaaggccagagttcttttactgtctcatcttgctagaatgaaaattcctgagacccttgaagaagatcagcaattcatgctaaaaaagtgtcctgccctacttcaagaaatggttaatgtaatctgccaactaatagtaatggcccggaaccgtgaagaaagggagtttcgtgctccaactttggcatccctagaaaactgcatgaagctttctcagatggccgttcagggacttcagcaatttaagtctccccttctgcagctccctcatattgaagaggacaatcttagacgggtttctaatcataagaagtataaaattaaaactatccaggatttggtgagtttaaaagaatcagatcgtcacactctactgcacttccttgaagatgaaaaatatgaagaggttatggctgtccttgggagttttccatatgtgaccatggatataaaatcacaggtgttagatgatgaagatagcaacaacatcacagtaggatccttagttacagtgttggttaagttgacaaggcaaacaatggctgaagtatttgaaaaggagcagtccatctgtgctgcagaggaacagccagcagaagatgggcagggtgaaactaacaagaacaggacaaaaggaggatggcaacagaagagtaaaggacccaagaaaactgctaaatcaaaaaaaaagaaacctttaaaaaaaaaacctacacctgtgctattaccacagtcaaagcaacagaaacaaaagcaggcaaatggagtcgttgggaatgaagctgcagtaaaggaagatgaagaagaagtttcagataagggcagtgattctgaagaagaagaaaccaatagagattcccaaagtgagaaagatgatggtagtgacagagactctgatagagagcaagatgaaaaacaaaacaaagatgatgaagcagagtggcaagaattacaacaaagcatacagcgaaaagagagagctctattggaaaccaaatcaaaaataacacatcctgtgtatagcctttactttcctgaggaaaaacaagaatggtggtggctttacattgcagataggaaggagcagacattaatatccatgccatatcatgtgtgtacgctgaaagatacagaggaggtagagctgaagtttcctgcaccaggcaagcctggaaattatcagtatactgtgtttctgagatcagactcctatatgggtttggatcagattaaaccattgaagttggaagttcatgaggctaagcctgtgccagaaaatcacccacagtgggatacagcaatagagggggatgaagaccaggaggacagtgagggctttgaagatagctttgaggaagaagaggaggaagaagaagatgatgactaagcagtactctgaatggaccacagtgtttgcacatatttgcaattttttgctgttttggaagtgtatcataaaccagaaacagtacagaactgatgttgagggaggtgtagtttttttactctagaaatgggtgcataatataactaggcagtggcggtgccttggtacaacctgaaaaatgttaaggcttattgaaacctttcaagtaggggatggtacatttatttcatctgcaaatgataataaatcctttgttattataactgtccagaagtgtgggctatgtattatctgatcagtctatggtcccagtaaaagtaaagatgcaggaaacacagtctgtaaatgagcgacttttctttgttcagctttagttttagcaaacaccacaaatatgttttaagtaacatcgctcaagtttaagtaacatcgctcaagttgataatctcttgataagctctgttgttgacattttgcagtgatacaacagctccactcatagatttaaacttttatttttacttatcttggtcataagttggcattctctcacattccacatgatatagagggctacgttttggaattttccttttcttaattgcccagagttatcagacagattataaaaatggcttttaatggcttaaaccatttctaaacctctatcttagcagatcaatgcaggatctaattcttttgataagttctagctctaaaagtgatagtgggactgtatgttttctgatactggtggcttatgttattaaaccttttttaaaaaaggttcactctaaaagctgaactacatccttagttttcagtctacttgactctatcaggagctttttaaggaaagtaagtataacatgcaaaggaagctttttttgtattcattttggactcctgtcaataaaaatagaagtttgttgactcgt

SEQ ID NO: 312628 - DNA, 1784 bp, Homo sapiens
agctggcgacggcggcggcagcggcagaggtggcggcggcgtgtccgtgagagtggcgtgggggcggggaggagaggcggcggcggcagtgtccaagctacgccactcgggctggggcgttgggagcgggagtgcagagcgtggtcgtggcggcggcggtgagaagagcgaggcggaggagggggtgccatggccgggcagcagttccagtacgatgacagtgggaacaccttcttctacttcctcacctccttcgtggggctcatcgtgatcccggcgacatactacctctggccccgagatcagaatgccgagcaaattcgattaaagaatatcagaaaagtatatggaaggtgtatgtggtatcgtttacggttattaaaaccccagccaaatattattcctacagtaaagaaaatagttctgcttgcaggatgggcattgttcttattccttgcatataaagtttccaaaacagaccgagaataccaagaatacaatccttatgaagtattaaatttggatcctggagccacagtagcagaaattaaaaaacaatatcgtttgctgtcacttaaatatcatccagataaaggaggtgatgaggttatgttcatgaggatagcaaaagcttatgctgctttaacggatgaagagtcccggaaaaattgggaagaatttggaaatccagatgggcctcaagccacaagctttggaattgccctgccagcttggatagttgaccagaaaaattcaattctggttttacttgtatatggattggcatttatggttatccttccagttgttgtgggctcttggtggtatcgctcaatacgctatagtggagaccagattctaatacgcacaacacagatttatacatactttgtttataaaacccgaaatatggatatgaaacgtcttatcatggttttggctggagcttctgaatttgatcctcagtataataaagatgccacaagcagaccaacggataatattctaataccacagctaatcagagaaattggcagcattaatttaaagaagaatgagcctccacttacctgcccatatagcctgaaggccagagttcttttactgtctcatcttgctagaatgaaaattcctgagacccttgaagaagatcagcaattcatgctaaaaaagtgtcctgccctacttcaagaaatggttaatgtaatctgccaactaatagtaatggcccggaaccgtgaagaaagggagtttcgtgctccaactttggcatccctagaaaactgcatgaagctttctcagatggccgttcagggacttcagcaatttaagtctccccttctgcagctccctcatattgaagaggacaatcttagacgggtttctaatcataagaagtataaaattaaaactatccaggatttggtgagtttaaaagaatcagatcgtcacactctactgcacttccttgaagatgaaaaatatgaagaggttatggctgtccttgggagttttccatatgtgaccatggatataaaatcacaggtgttagatgatgaagatagcaacaacatcacagtaggatccttagttacagtgttggttaagttgacaaggcaaacaatggctgaagtatttgaaaaggagcagtccatctgtgctgcagaggaacagccagcagaagatgggcagggtgaaactaacaagaacaggacaaaaggaggatggcaacagaagagtaaaggacccaagaaaactgctaaatcaaaaaaaaagaaaccttt

SEQ ID NO: 312629 - DNA, 643 bp, Homo sapiens
agctggcgacggcggcggcagcggcagaggtggcggcggcgtgtccgtgagagtggcgtgggggcggggaggagaggcggcggcggcagtgtccaagctacgccactcgggctggggcgttgggagcgggagtgcagagcgtggtcgtggcggcggcggtgagaagagcgaggcggaggagggggtgccatggccgggcagcagttccagtacgatgacagtgggaacaccttcttctacttcctcacctccttcgtggggctcatcgtgatcccggcgacatactacctctggccccgagatcagaatgccgcggggagagtctcatttacccaggctggtcttgaacttgcttcaagtcatcctcccgcttcagccccccgagtagctggccttacagacttgagccactgtgtcaggatggatttttgaaatttgaaagtcatattttcatgcccagttgcagtatcttgaatatgaaagagaaatcttgaattactgcctcattcaaagctctgaataaggaacttttttcagaagtttgctgcaaaataatttgccgacttgtactgacaggaggctactgaataatctttatctcacttaataaatagttatgttctgtcttggaatattaatttgt

SEQ ID NO: 312630 - DNA, 347 bp, Homo sapiens
tggagacagagtctcactctgtcgcctaggctggagtgcagtggcgcgatcttggctcactgcaacctccgcctcccagggtcaagtgattctcctgcctcagcctcctgagtagctgggactatttttagtagagacggggtttgatccttagttacagtgttggttaagttgacaaggcaaacaatggctgaagtatttgaaaaggagcagtccatctgtgctgcagaggaacagccagcagaagatgggcagggtgaaactaacaagaacaggacaaaaggaggatggcaacagaagagtaaaggacccaagaaaactgctaaatcaaaaaaaaagaaaccttt

SEQ ID NO: 312631 - DNA, 247 bp, Homo sapiens
aggtcaacttgatagacaagcagctgaaaccaggtattcctcagattattccttagaaagttaacctttgatttgaggattctttgagccagatttaatttattgtgattattttttgatatttatttatttttatcttcattttttgagagacgaagtctcactctgtcagctaggctggagctgcagtgagccgtgaccatgccactgcagcccaacttcgatgacagtaatactccatctctaa

SEQ ID NO: 312632 - DNA, 6461 bp, Homo sapiens
  misc_feature (6415)..(6415): n is a, c, g, or t
  misc_feature (6440)..(6440): n is a, c, g, or t
agctggcgacggcggcggcagcggcagaggtggcggcggcgtgtccgtgagagtggcgtgggggcggggaggagaggcggcggcggcagtgtccaagctacgccactcgggctggggcgttgggagcgggagtgcagagcgtggtcgtggcggcggcggtgagaagagcgaggcggaggagggggtgccatggccgggcagcagttccagtacgatgacagtgggaacaccttcttctacttcctcacctccttcgtggggctcatcgtgatcccggcgacatactacctctggccccgagatcagaatgccgagcaaattcgattaaagaatatcagaaaagtatatggaaggtgtatgtggtatcgtttacggttattaaaaccccagccaaatattattcctacagtaaagaaaatagttctgcttgcaggatgggcattgttcttattccttgcatataaagtttccaaaacagaccgagaataccaagaatacaatccttatgaagtattaaatttggatcctggagccacagtagcagaaattaaaaaacaatatcgtttgctgtcacttaaatatcatccagataaaggaggtgatgaggttatgttcatgaggatagcaaaagcttatgctgctttaacggatgaagagtcccggaaaaattgggaagaatttggaaatccagatgggcctcaagccacaagctttggaattgccctgccagcttggatagttgaccagaaaaattcaattctggttttacttgtatatggattggcatttatggttatccttccagttgttgtgggctcttggtggtatcgctcaatacgctatagtggagaccagattctaatacgcacaacacagatttatacatactttgtttataaaacccgaaatatggatatgaaacgtcttatcatggttttggctggagcttctgaatttgatcctcagtataataaagatgccacaagcagaccaacggataatattctaataccacagctaatcagagaaattggcagcattaatttaaagaagaatgagcctccacttacctgcccatatagcctgaaggccagagttcttttactgtctcatcttgctagaatgaaaattcctgagacccttgaagaagatcagcaattcatgctaaaaaagtgtcctgccctacttcaagaaatggttaatgtaatctgccaactaatagtaatggcccggaaccgtgaagaaagggagtttcgtgctccaactttggcatccctagaaaactgcatgaagctttctcagatggccgttcagggacttcagcaatttaagtctccccttctgcagctccctcatattgaagaggacaatcttagacgggtttctaatcataagaagtataaaattaaaactatccaggatttggtgagtttaaaagaatcagatcgtcacactctactgcacttccttgaagatgaaaaatatgaagaggttatggctgtccttgggagttttccatatgtgaccatggatataaaatcacaggtgttagatgatgaagatagcaacaacatcacagtaggatccttagttacagtgttggttaagttgacaaggcaaacaatggctgaagtatttgaaaaggagcagtccatctgtgctgcagaggaacagccagcagaagatgggcagggtgaaactaacaagaacaggacaaaaggaggatggcaacagaagagtaaaggacccaagaaaactgctaaatcaaaaaaaaagaaacctttaaaaaaaaaacctacacctgtgctattaccacagtcaaagcaacagaaacaaaagcaggcaaatggagtcgttgggaatgaagctgcagtaaaggaagatgaagaagaagtttcagataagggcagtgattctgaagaagaagaaaccaatagagattcccaaagtgagaaagatgatggtagtgacagagactctgatagagagcaagatgaaaaacaaaacaaagatgatgaagcagagtggcaagaattacaacaaagcatacagcgaaaagagagagctctattggaaaccaaatcaaaaataacacatcctgtgtatagcctttactttcctgaggaaaaacaagaatggtggtggctttacattgcagataggaaggagcagacattaatatccatgccatatcatgtgtgtacgctgaaagatacagaggaggtagagctgaagtttcctgcaccaggcaagcctggaaattatcagtatactgtgtttctgagatcagactcctatatgggtttggatcagattaaaccattgaagttggaagttcatgaggctaagcctgtgccagaaaatcacccacagtgggatacagcaatagagggggatgaagaccaggaggacagtgagggctttgaagatagctttgaggaagaagaggaggaagaagaagatgatgactaagcagtactctgaatggaccacagtgtttgcacatatttgcaattttttgctgttttggaagtgtatcataaaccagaaacagtacagaactgatgttgagggaggtgtagtttttttactctagaaatgggtgcataatataactaggcagtggcggtgccttggtacaacctgaaaaatgttaaggcttattgaaacctttcaagtaggggatggtacatttatttcatctgcaaatgataataaatcctttgttattataactgtccagaagtgtgggctatgtattatctgatcagtctatggtcccagtaaaagtaaagatgcaggaaacacagtctgtaaatgagcgacttttctttgttcagctttagttttagcaaacaccacaaatatgttttaagtaacatcgctcaagtttaagtaacatcgctcaagttgataatctcttgataagctctgttgttgacattttgcagtgatacaacagctccactcatagatttaaacttttatttttacttatcttggtcataagttggcattctctcacattccacatgatatagagggctacgttttggaattttccttttcttaattgcccagagttatcagacagattataaaaatggcttttaatggcttaaaccatttctaaacctctatcttagcagatcaatgcaggatctaattcttttgataagttctagctctaaaagtgatagtgggactgtatgttttctgatactggtggcttatgttattaaaccttttttaaaaaaggttcactctaaaagctgaactacatccttagttttcagtctacttgactctatcaggagctttttaaggaaagtaagtataacatgcaaaggaagctttttttgtattcattttggactcctgtcaataaaaatagaagtttgttgactcgttttatgtttcaatggtgtgtgtctttttactatcaggacataaatagggcaatccacttctttatttttcaactaaagattgaatagtattgtacattactgctaaagtgactgctatttctgtatactgtagaaaaacccaggagtgagagggatttcccctcatagtacaactggaaggatagtgcttgtaaagagtagagatgtgtacatgatgaatcattgagggagggtggatatttttattcctagatatggaggaaacataagtctgtagtattataaaactgattgtaataattctttcctatcaaaatctccataggtcaaaatattgttggaatactaaaatttgcaaccttgtttactttaaaaggttgccactttcagtgcagaatactaccggcatcttgttactgcaatagttggaaataaaatgtgaaaattagcaaaaccatgcatggttttttggttctaaatttaagatgtaatatttcctataaaagggtgaaagcagtttctttctctataacctcaatcaccagtttagtgagagcctttcttggcaggcaggaggcagtgtcaccgaggatttttttcatttacttcattgtacaagtaggagggtgggtttaattttcaaatcaggttctgctgtgaagcaccagtgtcttgaggcagctactgattacctaagtgtggtggcagggggtaagccagctggtgtcaagtgaaaggagggattagagaaaacaggtgtggcacaaaggcaaggaaactgagcagacaagacagaacaatgtgtagaatgcatatttcctagttttcttgaaagatttcaagaaaagttttttttttttctagtggctactttgccttaaagaggctttataagttcattcacacagctggcttctctggttttaagattctggagaggatgataacctagtaacaccgcagtgcttaaaaaaaaaaaaaaaactaccatcaccagaaaattccaccagtttgttttccttttctctttgtgtgatgtgtatgtacttcccaactaagtaaaataaaatttcctctagtgagtgctttaggtaacctctttccatatggcagtagtgaaagaactgagccttcagttgatagttcttctctctccagcaagtcgctaaactccacatcccttcgtttttcctctggaatgagaataacaaactatcctagtttgcatttaatctaatggaaacttgagcaaagtttcaattttcttcctataaagaaactgacattttgtcaacaattgatgagcctatagatcatacagtgtataggaagtgaaattgaaacagttaaattatgtgatatttttctctaattggtaaagtacctatttattttagcattataatatttgattgaggccctgaggtgttaatatctcaatctcagagttagatgttcatgtcctttttgaattttttaaacatttttcataattttttttttaagttagggagcacattgagtgaagttctctgtgtagaacaataccttctgctctgcttctcccagctttcactgagggctggaaaaggacaggcctgtccagctgtactgtcccactgtgtatggggaagctcaggctctggtggaagcagggggcatggatgtcaaacaactgatgtggaaacagggagggagagatataatgaggctctctaggcatgttatttttgaccacaagttttgttcagtttgcttcagccaatccaaaccatatactagagtgttctgtagtcacaattcttatttcaaatgtaattcagcaccttacataatttttgagaggttgtcattcatcacatatttactgagtttctatgtgccaggctctgtgactggatactggagctatcaaaatgaaaaaaatagtgttaagaactcactcgctggtgttagagcaggtagatgagtggcaatccatttaaatccatttgccttggctattatttggaatgcctttttttttttttaagtctatctactgtaggcagaagaattatttctttaggggctagctgtttattttgctggcctttttttctctctttctctttttcttcttaagacggagtctcgctctgtcctccaggctgggaggagtgcagtgggcacgatctcagctcactgcaacctcggcctcccagtttcaagcgattcttctgcctcagcctcctgagtagctgggactgcaggtgcatgccaccacacccagctaattttttaatttttagtagagatgggattttgccacgttgtccagcctggtctcgaactcctggcctcaagtgatcagccctcctcagcctcccaaagtgctggcattacaggcatgagtcactgcgcccagcctgttgggtttttttggaaaaaaaccaaaaacaacaaatcatcatcctttcctttaaaatgttttttttttttaagaaacaattttcccacaaacggtctgatttaactccatgaaatcctctatttagactgccttaaagtgaaataactgttggtgaaccataacgacattttaccagctgtgtagtgattagtccaaatatgtctcaagaagttagcaccaagcattctcatccatttaaacttgatgctagggctattttgcaaaacttaaaaagatgcgatcttgtacatatttctgtaacctgagctgaaaacccaaataacaatcattgacatactttagggctattgtttcaggtgggggtgtatacatcccaggggcgtggagatgatcaatccattgaggaagtattaagatgattatttgtatttaatctcatccttttaaatttctatttttgtgtgttttataatgtacataatatattgtacaattgtacacttctattatttataaataaacatttattggtgcattaaaaaaaaaaaaaaaaaaaattcactgaccatcattttacaacatgataactggnaccctgacattacccaacttaatcncctgatcacacatcccccttt

SEQ ID NO: 312633 - DNA, 4905 bp, Homo sapiens
agctggcgacggcggcggcagcggcagaggtggcggcggcgtgtccgtgagagtggcgtgggggcggggaggagaggcggcggcggcagtgtccaagctacgccactcgggctggggcgttgggagcgggagtgcagagcgtggtcgtggcggcggcggtgagaagagcgaggcggaggagggggtgccatggccgggcagcagttccagtacgatgacagtgggaacaccttcttctacttcctcacctccttcgtggggctcatcgtgatcccggcgacatactacctctggccccgagatcagaatgccgagcaaattcgattaaagaatatcagaaaagtatatggaaggtgtatgtggtatcgtttacggttattaaaaccccagccaaatattattcctacagtaaagaaaatagttctgcttgcaggatgggcattgttcttattccttgcatataaagtttccaaaacagaccgagaataccaagaatacaatccttatgaagtattaaatttggatcctggagccacagtagcagaaattaaaaaacaatatcgtttgctgtcacttaaatatcatccagataaaggaggtgatgaggttatgttcatgaggatagcaaaagcttatgctgctttaacggatgaagagtcccggaaaaattgggaagaatttggaaatccagatgggcctcaagccacaagctttggaattgccctgccagcttggatagttgaccagaaaaattcaattctggttttacttgtatatggattggcatttatggttatccttccagttgttgtgggctcttggtggtatcgctcaatacgctatagtggagaccagattctaatacgcacaacacagatttatacatactttgtttataaaacccgaaatatggatatgaaacgtcttatcatggttttggctggagcttctgaatttgatcctcagtataataaagatgccacaagcagaccaacggataatattctaataccacagctaatcagagaaattggcagcattaatttaaagaagaatgagcctccacttacctgcccatatagcctgaaggccagagttcttttactgtctcatcttgctagaatgaaaattcctgagacccttgaagaagatcagcaattcatgctaaaaaagtgtcctgccctacttcaagaaatggttaatgtaatctgccaactaatagtaatggcccggaaccgtgaagaaagggagtttcgtgctccaactttggcatccctagaaaactgcatgaagctttctcagatggccgttcagggacttcagcaatttaagtctccccttctgcagctccctcatattgaagaggacaatcttagacgggtttctaatcataagaagtataaaattaaaactatccaggatttggtgagtttaaaagaatcagatcgtcacactctactgcacttccttgaagatgaaaaatatgaagaggttatggctgtccttgggagttttccatatgtgaccatggatataaaatcacaggtgttagatgatgaagatagcaacaacatcacagtaggatccttagttacagtgttggttaagttgacaaggcaaacaatggctgaagtatttgaaaaggagcagtccatctgtgctgcagaggaacagccagcagaagatgggcagggtgaaactaacaagaacaggacaaaaggaggatggcaacagaagagtaaaggacccaagaaaactgctaaatcaaaaaaaaagaaacctttaaaaaaaaaacctacacctgtgctattaccacagtcaaagcaacagaaacaaaagcaggcaaatggagtcgttgggaatgaagctgcagtaaaggaagatgaagaagaagtttcagataagggcagtgattctgaagaagaagaaaccaatagagattcccaaagtgagaaagatgatggtagtgacagagactctgatagagagcaagatgaaaaacaaaacaaagatgatgaagcagagtggcaagaattacaacaaagcatacagcgaaaagagagagctctattggaaaccaaatcaaaaataacacatcctgtgtatagcctttactttcctgaggaaaaacaagaatggtggtggctttacattgcagataggaaggagcagacattaatatccatgccatatcatgtgtgtacgctgaaagatacagaggaggtagagctgaagtttcctgcaccaggcaagcctggaaattatcagtatactgtgtttctgagatcagactcctatatgggtttggatcagattaaaccattgaagttggaagttcatgaggctaagcctgtgccagaaaatcacccacagtgggatacagcaatagagggggatgaagaccaggaggacagtgagggctttgaagatagctttgaggaagaagaggaggaagaagaagatgatgactaagcagtactctgaatggaccacagtgtttgcacatatttgcaattttttgctgttttggaagtgtatcataaaccagaaacagtacagaactgatgttgagggaggtgtagtttttttactctagaaatgggtgcataatataactaggcagtggcggtgccttggtacaacctgaaaaatgttaaggcttattgaaacctttcaagtaggggatggtacatttatttcatctgcaaatgataataaatcctttgttattataactgtccagaagtgtgggctatgtattatctgatcagtctatggtcccagtaaaagtaaagatgcaggaaacacagtctgtaaatgagcgacttttctttgttcagctttagttttagcaaacaccacaaatatgttttaagtaacatcgctcaagtttaagtaacatcgctcaagttgataatctcttgataagctctgttgttgacattttgcagtgatacaacagctccactcatagatttaaacttttatttttacttatcttggtcataagttggcattctctcacattccacatgatatagagggctacgttttggaattttccttttcttaattgcccagagttatcagacagattataaaaatggcttttaatggcttaaaccatttctaaacctctatcttagcagatcaatgcaggatctaattcttttgataagttctagctctaaaagtgatagtgggactgtatgttttctgatactggtggcttatgttattaaaccttttttaaaaaaggttcactctaaaagctgaactacatccttagttttcagtctacttgactctatcaggagctttttaaggaaagtaagtataacatgcaaaggaagctttttttgtattcattttggactcctgtcaataaaaatagaagtttgttgactcgttttatgtttcaatggtgtgtgtctttttactatcaggacataaatagggcaatccacttctttatttttcaactaaagattgaatagtattgtacattactgctaaagtgactgctatttctgtatactgtagaaaaacccaggagtgagagggatttcccctcatagtacaactggaaggatagtgcttgtaaagagtagagatgtgtacatgatgaatcattgagggagggtggatatttttattcctagatatggaggaaacataagtctgtagtattataaaactgattgtaataattctttcctatcaaaatctccataggtcaaaatattgttggaatactaaaatttgcaaccttgtttactttaaaaggttgccactttcagtgcagaatactaccggcatcttgttactgcaatagttggaaataaaatgtgaaaattagcaaaaccatgcatggttttttggttctaaatttaagatgtaatatttcctataaaagggtgaaagcagtttctttctctataacctcaatcaccagtttagtgagagcctttcttggcaggcaggaggcagtgtcaccgaggatttttttcatttacttcattgtacaagtaggagggtgggtttaattttcaaatcaggttctgctgtgaagcaccagtgtcttgaggcagctactgattacctaagtgtggtggcagggggtaagccagctggtgtcaagtgaaaggagggattagagaaaacaggtgtggcacaaaggcaaggaaactgagcagacaagacagaacaatgtgtagaatgcatatttcctagttttcttgaaagatttcaagaaaagttttttttttttctagtggctactttgccttaaagaggctttataagttcattcacacagctggcttctctggttttaagattctggagaggatgataacctagtaacaccgcagtgcttaaaaaaaaaaaaaaaactaccatcaccagaaaattccaccagtttgttttccttttctctttgtgtgatgtgtatgtacttcccaactaagtaaaataaaatttcctctagtgagtgctttaggtaacctctttccatatggcagtagtgaaagaactgagccttcagttgatagttcttctctctccagcaagtcgctaaactccacatcccttcgtttttcctctggaatgagaataacaaactatcctagtttgcatttaatctaatggaaacttgagcaaagtttcaattttcttcctataaagaaactgacattttgtcaacaattgatgagcctatagatcatacagtgtataggaagtgaaattgaaacagttaaattatgtgatatttttctctaattggtaaagtacctattaaaatacagctgttcatgaggagacttaccacaattcaaagtgtagcagttgtgtattttagcatctaactctgagattgagatattaacacctcagggcctcaat

SEQ ID NO: 312634 - DNA, 6362 bp, Homo sapiens
  misc_feature (6316)..(6316): n is a, c, g, or t
  misc_feature (6341)..(6341): n is a, c, g, or t
agctggcgacggcggcggcagcggcagaggtggcggcggcgtgtccgtgagagtggcgtgggggcggggaggagaggcggcggcggcagtgtccaagctacgccactcgggctggggcgttgggagcgggagtgcagagcgtggtcgtggcggcggcggtgagaagagcgaggcggaggagggggtgccatggccgggcagcagttccagtacgatgacagtgggaacaccttcttctacttcctcacctccttcgtggggctcatcgtgatcccggcgacatactacctctggccccgagatcagaatgccgagcaaattcgattaaagaatatcagaaaagtatatggaaggtgtatgtggtatcgtttacggttattaaaaccccagccaaatattattcctacagtaaagaaaatagttctgcttgcaggatgggcattgttcttattccttgcatataaagtttccaaaacagaccgagaataccaagaatacaatccttatgaagtattaaatttggatcctggagccacagtagcagaaattaaaaaacaatatcgtttgctgtcacttaaatatcatccagataaaggaggtgatgaggttatgttcatgaggatagcaaaagcttatgctgctttaacggatgaagagtcccggaaaaattgggaagaatttggaaatccagatgggcctcaagccacaagctttggaattgccctgccagcttggatagttgaccagaaaaattcaattctggttttacttgtatatggattggcatttatggttatccttccagttgttgtgggctcttggtggtatcgctcaatacgctatagtggagaccagattctaatacgcacaacacagatttatacatactttgtttataaaacccgaaatatggatatgaaacgtcttatcatggttttggctggagcttctgaatttgatcctcagtataataaagatgccacaagcagaccaacggataatattctaataccacagctaatcagagaaattggcagcattaatttaaagaagaatgagcctccacttacctgcccatatagcctgaaggccagagttcttttactgtctcatcttgctagaatgaaaattcctgagacccttgaagaagatcagcaattcatgctaaaaaagtgtcctgccctacttcaagaaatggttaatgtaatctgccaactaatagtaatggcccggaaccgtgaagaaagggagtttcgtgctccaactttggcatccctagaaaactgcatgaagctttctcagatggccgttcagggacttcagcaatttaagtctccccttctgcagctccctcatattgaagaggacaatcttagacgggtttctaatcataagaagtataaaattaaaactatccaggatttggtgagtttaaaagaatcagatcgtcacactctactgcacttccttgaagatgaaaaatatgaagaggttatggctgtccttgggagttttccatatgtgaccatggatataaaatcacaggtgttagatgatgaagatagcaacaacatcacagtaggatccttagttacagtgttggttaagttgacaaggcaaacaatggctgaagtatttgaaaaggagcagtccatctgtgctgcagaggaacagccagcagaagatgggcagggtgaaactaacaagaacaggacaaaaggaggatggcaacagaagagtaaaggacccaagaaaactgctaaatcaaaaaaaaagaaacctttaaaaaaaaaacctacacctgtgctattaccacagtcaaagcaacagaaacaaaagcaggcaaatggagtcgttgggaatgaagctgcagtaaaggaagatgaagaagaagtttcagataagggcagtgattctgaagaagaagaaaccaatagagattcccaaagtgagaaagatgatggtagtgacagagactctgatagagagcaagatgaaaaacaaaacaaagatgatgaagcagagtggcaagaattacaacaaagcatacagcgaaaagagagagctctattggaaaccaaatcaaaaataacacatcctgtgtatagcctttactttcctgaggtagagctgaagtttcctgcaccaggcaagcctggaaattatcagtatactgtgtttctgagatcagactcctatatgggtttggatcagattaaaccattgaagttggaagttcatgaggctaagcctgtgccagaaaatcacccacagtgggatacagcaatagagggggatgaagaccaggaggacagtgagggctttgaagatagctttgaggaagaagaggaggaagaagaagatgatgactaagcagtactctgaatggaccacagtgtttgcacatatttgcaattttttgctgttttggaagtgtatcataaaccagaaacagtacagaactgatgttgagggaggtgtagtttttttactctagaaatgggtgcataatataactaggcagtggcggtgccttggtacaacctgaaaaatgttaaggcttattgaaacctttcaagtaggggatggtacatttatttcatctgcaaatgataataaatcctttgttattataactgtccagaagtgtgggctatgtattatctgatcagtctatggtcccagtaaaagtaaagatgcaggaaacacagtctgtaaatgagcgacttttctttgttcagctttagttttagcaaacaccacaaatatgttttaagtaacatcgctcaagtttaagtaacatcgctcaagttgataatctcttgataagctctgttgttgacattttgcagtgatacaacagctccactcatagatttaaacttttatttttacttatcttggtcataagttggcattctctcacattccacatgatatagagggctacgttttggaattttccttttcttaattgcccagagttatcagacagattataaaaatggcttttaatggcttaaaccatttctaaacctctatcttagcagatcaatgcaggatctaattcttttgataagttctagctctaaaagtgatagtgggactgtatgttttctgatactggtggcttatgttattaaaccttttttaaaaaaggttcactctaaaagctgaactacatccttagttttcagtctacttgactctatcaggagctttttaaggaaagtaagtataacatgcaaaggaagctttttttgtattcattttggactcctgtcaataaaaatagaagtttgttgactcgttttatgtttcaatggtgtgtgtctttttactatcaggacataaatagggcaatccacttctttatttttcaactaaagattgaatagtattgtacattactgctaaagtgactgctatttctgtatactgtagaaaaacccaggagtgagagggatttcccctcatagtacaactggaaggatagtgcttgtaaagagtagagatgtgtacatgatgaatcattgagggagggtggatatttttattcctagatatggaggaaacataagtctgtagtattataaaactgattgtaataattctttcctatcaaaatctccataggtcaaaatattgttggaatactaaaatttgcaaccttgtttactttaaaaggttgccactttcagtgcagaatactaccggcatcttgttactgcaatagttggaaataaaatgtgaaaattagcaaaaccatgcatggttttttggttctaaatttaagatgtaatatttcctataaaagggtgaaagcagtttctttctctataacctcaatcaccagtttagtgagagcctttcttggcaggcaggaggcagtgtcaccgaggatttttttcatttacttcattgtacaagtaggagggtgggtttaattttcaaatcaggttctgctgtgaagcaccagtgtcttgaggcagctactgattacctaagtgtggtggcagggggtaagccagctggtgtcaagtgaaaggagggattagagaaaacaggtgtggcacaaaggcaaggaaactgagcagacaagacagaacaatgtgtagaatgcatatttcctagttttcttgaaagatttcaagaaaagttttttttttttctagtggctactttgccttaaagaggctttataagttcattcacacagctggcttctctggttttaagattctggagaggatgataacctagtaacaccgcagtgcttaaaaaaaaaaaaaaaactaccatcaccagaaaattccaccagtttgttttccttttctctttgtgtgatgtgtatgtacttcccaactaagtaaaataaaatttcctctagtgagtgctttaggtaacctctttccatatggcagtagtgaaagaactgagccttcagttgatagttcttctctctccagcaagtcgctaaactccacatcccttcgtttttcctctggaatgagaataacaaactatcctagtttgcatttaatctaatggaaacttgagcaaagtttcaattttcttcctataaagaaactgacattttgtcaacaattgatgagcctatagatcatacagtgtataggaagtgaaattgaaacagttaaattatgtgatatttttctctaattggtaaagtacctatttattttagcattataatatttgattgaggccctgaggtgttaatatctcaatctcagagttagatgttcatgtcctttttgaattttttaaacatttttcataattttttttttaagttagggagcacattgagtgaagttctctgtgtagaacaataccttctgctctgcttctcccagctttcactgagggctggaaaaggacaggcctgtccagctgtactgtcccactgtgtatggggaagctcaggctctggtggaagcagggggcatggatgtcaaacaactgatgtggaaacagggagggagagatataatgaggctctctaggcatgttatttttgaccacaagttttgttcagtttgcttcagccaatccaaaccatatactagagtgttctgtagtcacaattcttatttcaaatgtaattcagcaccttacataatttttgagaggttgtcattcatcacatatttactgagtttctatgtgccaggctctgtgactggatactggagctatcaaaatgaaaaaaatagtgttaagaactcactcgctggtgttagagcaggtagatgagtggcaatccatttaaatccatttgccttggctattatttggaatgcctttttttttttttaagtctatctactgtaggcagaagaattatttctttaggggctagctgtttattttgctggcctttttttctctctttctctttttcttcttaagacggagtctcgctctgtcctccaggctgggaggagtgcagtgggcacgatctcagctcactgcaacctcggcctcccagtttcaagcgattcttctgcctcagcctcctgagtagctgggactgcaggtgcatgccaccacacccagctaattttttaatttttagtagagatgggattttgccacgttgtccagcctggtctcgaactcctggcctcaagtgatcagccctcctcagcctcccaaagtgctggcattacaggcatgagtcactgcgcccagcctgttgggtttttttggaaaaaaaccaaaaacaacaaatcatcatcctttcctttaaaatgttttttttttttaagaaacaattttcccacaaacggtctgatttaactccatgaaatcctctatttagactgccttaaagtgaaataactgttggtgaaccataacgacattttaccagctgtgtagtgattagtccaaatatgtctcaagaagttagcaccaagcattctcatccatttaaacttgatgctagggctattttgcaaaacttaaaaagatgcgatcttgtacatatttctgtaacctgagctgaaaacccaaataacaatcattgacatactttagggctattgtttcaggtgggggtgtatacatcccaggggcgtggagatgatcaatccattgaggaagtattaagatgattatttgtatttaatctcatccttttaaatttctatttttgtgtgttttataatgtacataatatattgtacaattgtacacttctattatttataaataaacatttattggtgcattaaaaaaaaaaaaaaaaaaaattcactgaccatcattttacaacatgataactggnaccctgacattacccaacttaatcncctgatcacacatcccccttt

SEQ ID NO: 312635 - DNA, 6331 bp, Homo sapiens
  misc_feature (6285)..(6285): n is a, c, g, or t
  misc_feature (6310)..(6310): n is a, c, g, or t
agctggcgacggcggcggcagcggcagaggtggcggcggcgtgtccgtgagagtggcgtgggggcggggaggagaggcggcggcggcagtgtccaagctacgccactcgggctggggcgttgggagcgggagtgcagagcgtggtcgtggcggcggcggtgagaagagcgaggcggaggagggggtgccatggccgggcagcagttccagtacgatgacagtgggaacaccttcttctacttcctcacctccttcgtggggctcatcgtgatcccggcgacatactacctctggccccgagatcagaatgccgagcaaattcgattaaagaatatcagaaaagtatatggaaggtgtatgtggtatcgtttacggttattaaaaccccagccaaatattattcctacagtaaagaaaatagttctgcttgcaggatgggcattgttcttattccttgcatataaagtttccaaaacagaccgagaataccaagaatacaatccttatgaagtattaaatttggatcctggagccacagtagcagaaattaaaaaacaatatcgtttgctgtcacttaaatatcatccagataaaggaggtgatgaggttatgttcatgaggatagcaaaagcttatgctgctttaacggatgaagagtcccggaaaaattgggaagaatttggaaatccagatgggcctcaagccacaagctttggaattgccctgccagcttggatagttgaccagaaaaattcaattctggttttacttgtatatggattggcatttatggttatccttccagttgttgtgggctcttggtggtatcgctcaatacgctatagtggagaccagattctaatacgcacaacacagatttatacatactttgtttataaaacccgaaatatggatatgaaacgtcttatcatggttttggctggagcttctgaatttgatcctcagtataataaagatgccacaagcagaccaacggataatattctaataccacagctaatcagagaaattggcagcattaatttaaagaagaatgagcctccacttacctgcccatatagcctgaaggccagagttcttttactgtctcatcttgctagaatgaaaattcctgagacccttgaagaagatcagcaattcatgctaaaaaagtgtcctgccctacttcaagaaatggttaatgtaatctgccaactaatagtaatggcccggaaccgtgaagaaagggagtttcgtgctccaactttggcatccctagaaaactgcatgaagctttctcagatggccgttcagggacttcagcaatttaagtctccccttctgcagctccctcatattgaagaggacaatcttagacgggtttctaatcataagaagtataaaattaaaactatccaggatttggtgagtttaaaagaatcagatcgtcacactctactgcacttccttgaagatgaaaaatatgaagaggttatggctgtccttgggagttttccatatgtgaccatggatataaaatcacaggtgttagatgatgaagatagcaacaacatcacagtaggatccttagttacagtgttggttaagttgacaaggcaaacaatggctgaagtatttgaaaaggagcagtccatctgtgctgcagaggaacagccagcagaagatgggcagggtgaaactaacaagaacaggacaaaaggaggatggcaacagaagagtaaaggacccaagaaaactgctaaatcaaaaaaaaagaaacctttaaaaaaaaaacctacacctgtgctattaccacagtcaaagcaacagaaacaaaagcaggcaaatggagtcgttgggaatgaagctgcagtaaaggaagatgaagaagaagtttcagataagggcagtgattctgaagaagaagaaaccaatagagattcccaaagtgagaaagatgatggtagtgacagagactctgatagagagcaagatgaaaaacaaaacaaagatgatgaagcagagtggcaagaattacaacaaagcatacagcgaaaagagagagctctattggaaaccaaatcaaaaataacacatcctgtgtatagcctttactttcctgaggaaaaacaagaatggtggtggctttacattgcagataggaaggagcagacattaatatccatgccatatcatgtttggaagttcatgaggctaagcctgtgccagaaaatcacccacagtgggatacagcaatagagggggatgaagaccaggaggacagtgagggctttgaagatagctttgaggaagaagaggaggaagaagaagatgatgactaagcagtactctgaatggaccacagtgtttgcacatatttgcaattttttgctgttttggaagtgtatcataaaccagaaacagtacagaactgatgttgagggaggtgtagtttttttactctagaaatgggtgcataatataactaggcagtggcggtgccttggtacaacctgaaaaatgttaaggcttattgaaacctttcaagtaggggatggtacatttatttcatctgcaaatgataataaatcctttgttattataactgtccagaagtgtgggctatgtattatctgatcagtctatggtcccagtaaaagtaaagatgcaggaaacacagtctgtaaatgagcgacttttctttgttcagctttagttttagcaaacaccacaaatatgttttaagtaacatcgctcaagtttaagtaacatcgctcaagttgataatctcttgataagctctgttgttgacattttgcagtgatacaacagctccactcatagatttaaacttttatttttacttatcttggtcataagttggcattctctcacattccacatgatatagagggctacgttttggaattttccttttcttaattgcccagagttatcagacagattataaaaatggcttttaatggcttaaaccatttctaaacctctatcttagcagatcaatgcaggatctaattcttttgataagttctagctctaaaagtgatagtgggactgtatgttttctgatactggtggcttatgttattaaaccttttttaaaaaaggttcactctaaaagctgaactacatccttagttttcagtctacttgactctatcaggagctttttaaggaaagtaagtataacatgcaaaggaagctttttttgtattcattttggactcctgtcaataaaaatagaagtttgttgactcgttttatgtttcaatggtgtgtgtctttttactatcaggacataaatagggcaatccacttctttatttttcaactaaagattgaatagtattgtacattactgctaaagtgactgctatttctgtatactgtagaaaaacccaggagtgagagggatttcccctcatagtacaactggaaggatagtgcttgtaaagagtagagatgtgtacatgatgaatcattgagggagggtggatatttttattcctagatatggaggaaacataagtctgtagtattataaaactgattgtaataattctttcctatcaaaatctccataggtcaaaatattgttggaatactaaaatttgcaaccttgtttactttaaaaggttgccactttcagtgcagaatactaccggcatcttgttactgcaatagttggaaataaaatgtgaaaattagcaaaaccatgcatggttttttggttctaaatttaagatgtaatatttcctataaaagggtgaaagcagtttctttctctataacctcaatcaccagtttagtgagagcctttcttggcaggcaggaggcagtgtcaccgaggatttttttcatttacttcattgtacaagtaggagggtgggtttaattttcaaatcaggttctgctgtgaagcaccagtgtcttgaggcagctactgattacctaagtgtggtggcagggggtaagccagctggtgtcaagtgaaaggagggattagagaaaacaggtgtggcacaaaggcaaggaaactgagcagacaagacagaacaatgtgtagaatgcatatttcctagttttcttgaaagatttcaagaaaagttttttttttttctagtggctactttgccttaaagaggctttataagttcattcacacagctggcttctctggttttaagattctggagaggatgataacctagtaacaccgcagtgcttaaaaaaaaaaaaaaaactaccatcaccagaaaattccaccagtttgttttccttttctctttgtgtgatgtgtatgtacttcccaactaagtaaaataaaatttcctctagtgagtgctttaggtaacctctttccatatggcagtagtgaaagaactgagccttcagttgatagttcttctctctccagcaagtcgctaaactccacatcccttcgtttttcctctggaatgagaataacaaactatcctagtttgcatttaatctaatggaaacttgagcaaagtttcaattttcttcctataaagaaactgacattttgtcaacaattgatgagcctatagatcatacagtgtataggaagtgaaattgaaacagttaaattatgtgatatttttctctaattggtaaagtacctatttattttagcattataatatttgattgaggccctgaggtgttaatatctcaatctcagagttagatgttcatgtcctttttgaattttttaaacatttttcataattttttttttaagttagggagcacattgagtgaagttctctgtgtagaacaataccttctgctctgcttctcccagctttcactgagggctggaaaaggacaggcctgtccagctgtactgtcccactgtgtatggggaagctcaggctctggtggaagcagggggcatggatgtcaaacaactgatgtggaaacagggagggagagatataatgaggctctctaggcatgttatttttgaccacaagttttgttcagtttgcttcagccaatccaaaccatatactagagtgttctgtagtcacaattcttatttcaaatgtaattcagcaccttacataatttttgagaggttgtcattcatcacatatttactgagtttctatgtgccaggctctgtgactggatactggagctatcaaaatgaaaaaaatagtgttaagaactcactcgctggtgttagagcaggtagatgagtggcaatccatttaaatccatttgccttggctattatttggaatgcctttttttttttttaagtctatctactgtaggcagaagaattatttctttaggggctagctgtttattttgctggcctttttttctctctttctctttttcttcttaagacggagtctcgctctgtcctccaggctgggaggagtgcagtgggcacgatctcagctcactgcaacctcggcctcccagtttcaagcgattcttctgcctcagcctcctgagtagctgggactgcaggtgcatgccaccacacccagctaattttttaatttttagtagagatgggattttgccacgttgtccagcctggtctcgaactcctggcctcaagtgatcagccctcctcagcctcccaaagtgctggcattacaggcatgagtcactgcgcccagcctgttgggtttttttggaaaaaaaccaaaaacaacaaatcatcatcctttcctttaaaatgttttttttttttaagaaacaattttcccacaaacggtctgatttaactccatgaaatcctctatttagactgccttaaagtgaaataactgttggtgaaccataacgacattttaccagctgtgtagtgattagtccaaatatgtctcaagaagttagcaccaagcattctcatccatttaaacttgatgctagggctattttgcaaaacttaaaaagatgcgatcttgtacatatttctgtaacctgagctgaaaacccaaataacaatcattgacatactttagggctattgtttcaggtgggggtgtatacatcccaggggcgtggagatgatcaatccattgaggaagtattaagatgattatttgtatttaatctcatccttttaaatttctatttttgtgtgttttataatgtacataatatattgtacaattgtacacttctattatttataaataaacatttattggtgcattaaaaaaaaaaaaaaaaaaaattcactgaccatcattttacaacatgataactggnaccctgacattacccaacttaatcncctgatcacacatcccccttt

SEQ ID NO: 312636 - DNA, 5772 bp, Homo sapiens
  misc_feature (5726)..(5726): n is a, c, g, or t
  misc_feature (5751)..(5751): n is a, c, g, or t
ctgggctcaagcagtcctctcacctcagcctcccaaagtgctgggattacaggaatgagccatctcgcccagcctatcgtagtttttatactttctttcttgtttaattttttttgtgttttagggctcttggtggtatcgctcaatacgctatagtggagaccagattctaatacgcacaacacagatttatacatactttgtttataaaacccgaaatatggatatgaaacgtcttatcatggttttggctggagcttctgaatttgatcctcagtataataaagatgccacaagcagaccaacggataatattctaataccacagctaatcagagaaattggcagcattaatttaaagaagaatgagcctccacttacctgcccatatagcctgaaggccagagttcttttactgtctcatcttgctagaatgaaaattcctgagacccttgaagaagatcagcaattcatgctaaaaaagtgtcctgccctacttcaagaaatggttaatgtaatctgccaactaatagtaatggcccggaaccgtgaagaaagggagtttcgtgctccaactttggcatccctagaaaactgcatgaagctttctcagatggccgttcagggacttcagcaatttaagtctccccttctgcagctccctcatattgaagaggacaatcttagacgggtttctaatcataagaagtataaaattaaaactatccaggatttggtgagtttaaaagaatcagatcgtcacactctactgcacttccttgaagatgaaaaatatgaagaggttatggctgtccttgggagttttccatatgtgaccatggatataaaatcacaggtgttagatgatgaagatagcaacaacatcacagtaggatccttagttacagtgttggttaagttgacaaggcaaacaatggctgaagtatttgaaaaggagcagtccatctgtgctgcagaggaacagccagcagaagatgggcagggtgaaactaacaagaacaggacaaaaggaggatggcaacagaagagtaaaggacccaagaaaactgctaaatcaaaaaaaaagaaacctttaaaaaaaaaacctacacctgtgctattaccacagtcaaagcaacagaaacaaaagcaggcaaatggagtcgttgggaatgaagctgcagtaaaggaagatgaagaagaagtttcagataagggcagtgattctgaagaagaagaaaccaatagagattcccaaagtgagaaagatgatggtagtgacagagactctgatagagagcaagatgaaaaacaaaacaaagatgatgaagcagagtggcaagaattacaacaaagcatacagcgaaaagagagagctctattggaaaccaaatcaaaaataacacatcctgtgtatagcctttactttcctgaggaaaaacaagaatggtggtggctttacattgcagataggaaggagcagacattaatatccatgccatatcatgtgtgtacgctgaaagatacagaggaggtagagctgaagtttcctgcaccaggcaagcctggaaattatcagtatactgtgtttctgagatcagactcctatatgggtttggatcagattaaaccattgaagttggaagttcatgaggctaagcctgtgccagaaaatcacccacagtgggatacagcaatagagggggatgaagaccaggaggacagtgagggctttgaagatagctttgaggaagaagaggaggaagaagaagatgatgactaagcagtactctgaatggaccacagtgtttgcacatatttgcaattttttgctgttttggaagtgtatcataaaccagaaacagtacagaactgatgttgagggaggtgtagtttttttactctagaaatgggtgcataatataactaggcagtggcggtgccttggtacaacctgaaaaatgttaaggcttattgaaacctttcaagtaggggatggtacatttatttcatctgcaaatgataataaatcctttgttattataactgtccagaagtgtgggctatgtattatctgatcagtctatggtcccagtaaaagtaaagatgcaggaaacacagtctgtaaatgagcgacttttctttgttcagctttagttttagcaaacaccacaaatatgttttaagtaacatcgctcaagtttaagtaacatcgctcaagttgataatctcttgataagctctgttgttgacattttgcagtgatacaacagctccactcatagatttaaacttttatttttacttatcttggtcataagttggcattctctcacattccacatgatatagagggctacgttttggaattttccttttcttaattgcccagagttatcagacagattataaaaatggcttttaatggcttaaaccatttctaaacctctatcttagcagatcaatgcaggatctaattcttttgataagttctagctctaaaagtgatagtgggactgtatgttttctgatactggtggcttatgttattaaaccttttttaaaaaaggttcactctaaaagctgaactacatccttagttttcagtctacttgactctatcaggagctttttaaggaaagtaagtataacatgcaaaggaagctttttttgtattcattttggactcctgtcaataaaaatagaagtttgttgactcgttttatgtttcaatggtgtgtgtctttttactatcaggacataaatagggcaatccacttctttatttttcaactaaagattgaatagtattgtacattactgctaaagtgactgctatttctgtatactgtagaaaaacccaggagtgagagggatttcccctcatagtacaactggaaggatagtgcttgtaaagagtagagatgtgtacatgatgaatcattgagggagggtggatatttttattcctagatatggaggaaacataagtctgtagtattataaaactgattgtaataattctttcctatcaaaatctccataggtcaaaatattgttggaatactaaaatttgcaaccttgtttactttaaaaggttgccactttcagtgcagaatactaccggcatcttgttactgcaatagttggaaataaaatgtgaaaattagcaaaaccatgcatggttttttggttctaaatttaagatgtaatatttcctataaaagggtgaaagcagtttctttctctataacctcaatcaccagtttagtgagagcctttcttggcaggcaggaggcagtgtcaccgaggatttttttcatttacttcattgtacaagtaggagggtgggtttaattttcaaatcaggttctgctgtgaagcaccagtgtcttgaggcagctactgattacctaagtgtggtggcagggggtaagccagctggtgtcaagtgaaaggagggattagagaaaacaggtgtggcacaaaggcaaggaaactgagcagacaagacagaacaatgtgtagaatgcatatttcctagttttcttgaaagatttcaagaaaagttttttttttttctagtggctactttgccttaaagaggctttataagttcattcacacagctggcttctctggttttaagattctggagaggatgataacctagtaacaccgcagtgcttaaaaaaaaaaaaaaaactaccatcaccagaaaattccaccagtttgttttccttttctctttgtgtgatgtgtatgtacttcccaactaagtaaaataaaatttcctctagtgagtgctttaggtaacctctttccatatggcagtagtgaaagaactgagccttcagttgatagttcttctctctccagcaagtcgctaaactccacatcccttcgtttttcctctggaatgagaataacaaactatcctagtttgcatttaatctaatggaaacttgagcaaagtttcaattttcttcctataaagaaactgacattttgtcaacaattgatgagcctatagatcatacagtgtataggaagtgaaattgaaacagttaaattatgtgatatttttctctaattggtaaagtacctatttattttagcattataatatttgattgaggccctgaggtgttaatatctcaatctcagagttagatgttcatgtcctttttgaattttttaaacatttttcataattttttttttaagttagggagcacattgagtgaagttctctgtgtagaacaataccttctgctctgcttctcccagctttcactgagggctggaaaaggacaggcctgtccagctgtactgtcccactgtgtatggggaagctcaggctctggtggaagcagggggcatggatgtcaaacaactgatgtggaaacagggagggagagatataatgaggctctctaggcatgttatttttgaccacaagttttgttcagtttgcttcagccaatccaaaccatatactagagtgttctgtagtcacaattcttatttcaaatgtaattcagcaccttacataatttttgagaggttgtcattcatcacatatttactgagtttctatgtgccaggctctgtgactggatactggagctatcaaaatgaaaaaaatagtgttaagaactcactcgctggtgttagagcaggtagatgagtggcaatccatttaaatccatttgccttggctattatttggaatgcctttttttttttttaagtctatctactgtaggcagaagaattatttctttaggggctagctgtttattttgctggcctttttttctctctttctctttttcttcttaagacggagtctcgctctgtcctccaggctgggaggagtgcagtgggcacgatctcagctcactgcaacctcggcctcccagtttcaagcgattcttctgcctcagcctcctgagtagctgggactgcaggtgcatgccaccacacccagctaattttttaatttttagtagagatgggattttgccacgttgtccagcctggtctcgaactcctggcctcaagtgatcagccctcctcagcctcccaaagtgctggcattacaggcatgagtcactgcgcccagcctgttgggtttttttggaaaaaaaccaaaaacaacaaatcatcatcctttcctttaaaatgttttttttttttaagaaacaattttcccacaaacggtctgatttaactccatgaaatcctctatttagactgccttaaagtgaaataactgttggtgaaccataacgacattttaccagctgtgtagtgattagtccaaatatgtctcaagaagttagcaccaagcattctcatccatttaaacttgatgctagggctattttgcaaaacttaaaaagatgcgatcttgtacatatttctgtaacctgagctgaaaacccaaataacaatcattgacatactttagggctattgtttcaggtgggggtgtatacatcccaggggcgtggagatgatcaatccattgaggaagtattaagatgattatttgtatttaatctcatccttttaaatttctatttttgtgtgttttataatgtacataatatattgtacaattgtacacttctattatttataaataaacatttattggtgcattaaaaaaaaaaaaaaaaaaaattcactgaccatcattttacaacatgataactggnaccctgacattacccaacttaatcncctgatcacacatcccccttt

SEQ ID NO: 312637 - DNA, 4374 bp, Homo sapiens
  misc_feature (4328)..(4328): n is a, c, g, or t
  misc_feature (4353)..(4353): n is a, c, g, or t
acccctcttctttttttttttttttttttgtttccaggaaaaacaagaatggtggtggctttacattgcagataggaaggagcagacattaatatccatgccatatcatgtgtgtacgctgaaagatacagaggaggtagagctgaagtttcctgcaccaggcaagcctggaaattatcagtatactgtgtttctgagatcagactcctatatgggtttggatcagattaaaccattgaagttggaagttcatgaggctaagcctgtgccagaaaatcacccacagtgggatacagcaatagagggggatgaagaccaggaggacagtgagggctttgaagatagctttgaggaagaagaggaggaagaagaagatgatgactaagcagtactctgaatggaccacagtgtttgcacatatttgcaattttttgctgttttggaagtgtatcataaaccagaaacagtacagaactgatgttgagggaggtgtagtttttttactctagaaatgggtgcataatataactaggcagtggcggtgccttggtacaacctgaaaaatgttaaggcttattgaaacctttcaagtaggggatggtacatttatttcatctgcaaatgataataaatcctttgttattataactgtccagaagtgtgggctatgtattatctgatcagtctatggtcccagtaaaagtaaagatgcaggaaacacagtctgtaaatgagcgacttttctttgttcagctttagttttagcaaacaccacaaatatgttttaagtaacatcgctcaagtttaagtaacatcgctcaagttgataatctcttgataagctctgttgttgacattttgcagtgatacaacagctccactcatagatttaaacttttatttttacttatcttggtcataagttggcattctctcacattccacatgatatagagggctacgttttggaattttccttttcttaattgcccagagttatcagacagattataaaaatggcttttaatggcttaaaccatttctaaacctctatcttagcagatcaatgcaggatctaattcttttgataagttctagctctaaaagtgatagtgggactgtatgttttctgatactggtggcttatgttattaaaccttttttaaaaaaggttcactctaaaagctgaactacatccttagttttcagtctacttgactctatcaggagctttttaaggaaagtaagtataacatgcaaaggaagctttttttgtattcattttggactcctgtcaataaaaatagaagtttgttgactcgttttatgtttcaatggtgtgtgtctttttactatcaggacataaatagggcaatccacttctttatttttcaactaaagattgaatagtattgtacattactgctaaagtgactgctatttctgtatactgtagaaaaacccaggagtgagagggatttcccctcatagtacaactggaaggatagtgcttgtaaagagtagagatgtgtacatgatgaatcattgagggagggtggatatttttattcctagatatggaggaaacataagtctgtagtattataaaactgattgtaataattctttcctatcaaaatctccataggtcaaaatattgttggaatactaaaatttgcaaccttgtttactttaaaaggttgccactttcagtgcagaatactaccggcatcttgttactgcaatagttggaaataaaatgtgaaaattagcaaaaccatgcatggttttttggttctaaatttaagatgtaatatttcctataaaagggtgaaagcagtttctttctctataacctcaatcaccagtttagtgagagcctttcttggcaggcaggaggcagtgtcaccgaggatttttttcatttacttcattgtacaagtaggagggtgggtttaattttcaaatcaggttctgctgtgaagcaccagtgtcttgaggcagctactgattacctaagtgtggtggcagggggtaagccagctggtgtcaagtgaaaggagggattagagaaaacaggtgtggcacaaaggcaaggaaactgagcagacaagacagaacaatgtgtagaatgcatatttcctagttttcttgaaagatttcaagaaaagttttttttttttctagtggctactttgccttaaagaggctttataagttcattcacacagctggcttctctggttttaagattctggagaggatgataacctagtaacaccgcagtgcttaaaaaaaaaaaaaaaactaccatcaccagaaaattccaccagtttgttttccttttctctttgtgtgatgtgtatgtacttcccaactaagtaaaataaaatttcctctagtgagtgctttaggtaacctctttccatatggcagtagtgaaagaactgagccttcagttgatagttcttctctctccagcaagtcgctaaactccacatcccttcgtttttcctctggaatgagaataacaaactatcctagtttgcatttaatctaatggaaacttgagcaaagtttcaattttcttcctataaagaaactgacattttgtcaacaattgatgagcctatagatcatacagtgtataggaagtgaaattgaaacagttaaattatgtgatatttttctctaattggtaaagtacctatttattttagcattataatatttgattgaggccctgaggtgttaatatctcaatctcagagttagatgttcatgtcctttttgaattttttaaacatttttcataattttttttttaagttagggagcacattgagtgaagttctctgtgtagaacaataccttctgctctgcttctcccagctttcactgagggctggaaaaggacaggcctgtccagctgtactgtcccactgtgtatggggaagctcaggctctggtggaagcagggggcatggatgtcaaacaactgatgtggaaacagggagggagagatataatgaggctctctaggcatgttatttttgaccacaagttttgttcagtttgcttcagccaatccaaaccatatactagagtgttctgtagtcacaattcttatttcaaatgtaattcagcaccttacataatttttgagaggttgtcattcatcacatatttactgagtttctatgtgccaggctctgtgactggatactggagctatcaaaatgaaaaaaatagtgttaagaactcactcgctggtgttagagcaggtagatgagtggcaatccatttaaatccatttgccttggctattatttggaatgcctttttttttttttaagtctatctactgtaggcagaagaattatttctttaggggctagctgtttattttgctggcctttttttctctctttctctttttcttcttaagacggagtctcgctctgtcctccaggctgggaggagtgcagtgggcacgatctcagctcactgcaacctcggcctcccagtttcaagcgattcttctgcctcagcctcctgagtagctgggactgcaggtgcatgccaccacacccagctaattttttaatttttagtagagatgggattttgccacgttgtccagcctggtctcgaactcctggcctcaagtgatcagccctcctcagcctcccaaagtgctggcattacaggcatgagtcactgcgcccagcctgttgggtttttttggaaaaaaaccaaaaacaacaaatcatcatcctttcctttaaaatgttttttttttttaagaaacaattttcccacaaacggtctgatttaactccatgaaatcctctatttagactgccttaaagtgaaataactgttggtgaaccataacgacattttaccagctgtgtagtgattagtccaaatatgtctcaagaagttagcaccaagcattctcatccatttaaacttgatgctagggctattttgcaaaacttaaaaagatgcgatcttgtacatatttctgtaacctgagctgaaaacccaaataacaatcattgacatactttagggctattgtttcaggtgggggtgtatacatcccaggggcgtggagatgatcaatccattgaggaagtattaagatgattatttgtatttaatctcatccttttaaatttctatttttgtgtgttttataatgtacataatatattgtacaattgtacacttctattatttataaataaacatttattggtgcattaaaaaaaaaaaaaaaaaaaattcactgaccatcattttacaacatgataactggnaccctgacattacccaacttaatcncctgatcacacatcccccttt

SEQ ID NO: 312638 - DNA, 3936 bp, Homo sapiens
  misc_feature (3890)..(3890): n is a, c, g, or t
  misc_feature (3915)..(3915): n is a, c, g, or t
cagctgattctagaggatccctcaaacagtacagaactgatgttgagggaggtgtagtttttttactctagaaatgggtgcataatataactaggcagtggcggtgccttggtacaacctgaaaaatgttaaggcttattgaaacctttcaagtaggggatggtacatttatttcatctgcaaatgataataaatcctttgttattataactgtccagaagtgtgggctatgtattatctgatcagtctatggtcccagtaaaagtaaagatgcaggaaacacagtctgtaaatgagcgacttttctttgttcagctttagttttagcaaacaccacaaatatgttttaagtaacatcgctcaagtttaagtaacatcgctcaagttgataatctcttgataagctctgttgttgacattttgcagtgatacaacagctccactcatagatttaaacttttatttttacttatcttggtcataagttggcattctctcacattccacatgatatagagggctacgttttggaattttccttttcttaattgcccagagttatcagacagattataaaaatggcttttaatggcttaaaccatttctaaacctctatcttagcagatcaatgcaggatctaattcttttgataagttctagctctaaaagtgatagtgggactgtatgttttctgatactggtggcttatgttattaaaccttttttaaaaaaggttcactctaaaagctgaactacatccttagttttcagtctacttgactctatcaggagctttttaaggaaagtaagtataacatgcaaaggaagctttttttgtattcattttggactcctgtcaataaaaatagaagtttgttgactcgttttatgtttcaatggtgtgtgtctttttactatcaggacataaatagggcaatccacttctttatttttcaactaaagattgaatagtattgtacattactgctaaagtgactgctatttctgtatactgtagaaaaacccaggagtgagagggatttcccctcatagtacaactggaaggatagtgcttgtaaagagtagagatgtgtacatgatgaatcattgagggagggtggatatttttattcctagatatggaggaaacataagtctgtagtattataaaactgattgtaataattctttcctatcaaaatctccataggtcaaaatattgttggaatactaaaatttgcaaccttgtttactttaaaaggttgccactttcagtgcagaatactaccggcatcttgttactgcaatagttggaaataaaatgtgaaaattagcaaaaccatgcatggttttttggttctaaatttaagatgtaatatttcctataaaagggtgaaagcagtttctttctctataacctcaatcaccagtttagtgagagcctttcttggcaggcaggaggcagtgtcaccgaggatttttttcatttacttcattgtacaagtaggagggtgggtttaattttcaaatcaggttctgctgtgaagcaccagtgtcttgaggcagctactgattacctaagtgtggtggcagggggtaagccagctggtgtcaagtgaaaggagggattagagaaaacaggtgtggcacaaaggcaaggaaactgagcagacaagacagaacaatgtgtagaatgcatatttcctagttttcttgaaagatttcaagaaaagttttttttttttctagtggctactttgccttaaagaggctttataagttcattcacacagctggcttctctggttttaagattctggagaggatgataacctagtaacaccgcagtgcttaaaaaaaaaaaaaaaactaccatcaccagaaaattccaccagtttgttttccttttctctttgtgtgatgtgtatgtacttcccaactaagtaaaataaaatttcctctagtgagtgctttaggtaacctctttccatatggcagtagtgaaagaactgagccttcagttgatagttcttctctctccagcaagtcgctaaactccacatcccttcgtttttcctctggaatgagaataacaaactatcctagtttgcatttaatctaatggaaacttgagcaaagtttcaattttcttcctataaagaaactgacattttgtcaacaattgatgagcctatagatcatacagtgtataggaagtgaaattgaaacagttaaattatgtgatatttttctctaattggtaaagtacctatttattttagcattataatatttgattgaggccctgaggtgttaatatctcaatctcagagttagatgttcatgtcctttttgaattttttaaacatttttcataattttttttttaagttagggagcacattgagtgaagttctctgtgtagaacaataccttctgctctgcttctcccagctttcactgagggctggaaaaggacaggcctgtccagctgtactgtcccactgtgtatggggaagctcaggctctggtggaagcagggggcatggatgtcaaacaactgatgtggaaacagggagggagagatataatgaggctctctaggcatgttatttttgaccacaagttttgttcagtttgcttcagccaatccaaaccatatactagagtgttctgtagtcacaattcttatttcaaatgtaattcagcaccttacataatttttgagaggttgtcattcatcacatatttactgagtttctatgtgccaggctctgtgactggatactggagctatcaaaatgaaaaaaatagtgttaagaactcactcgctggtgttagagcaggtagatgagtggcaatccatttaaatccatttgccttggctattatttggaatgcctttttttttttttaagtctatctactgtaggcagaagaattatttctttaggggctagctgtttattttgctggcctttttttctctctttctctttttcttcttaagacggagtctcgctctgtcctccaggctgggaggagtgcagtgggcacgatctcagctcactgcaacctcggcctcccagtttcaagcgattcttctgcctcagcctcctgagtagctgggactgcaggtgcatgccaccacacccagctaattttttaatttttagtagagatgggattttgccacgttgtccagcctggtctcgaactcctggcctcaagtgatcagccctcctcagcctcccaaagtgctggcattacaggcatgagtcactgcgcccagcctgttgggtttttttggaaaaaaaccaaaaacaacaaatcatcatcctttcctttaaaatgttttttttttttaagaaacaattttcccacaaacggtctgatttaactccatgaaatcctctatttagactgccttaaagtgaaataactgttggtgaaccataacgacattttaccagctgtgtagtgattagtccaaatatgtctcaagaagttagcaccaagcattctcatccatttaaacttgatgctagggctattttgcaaaacttaaaaagatgcgatcttgtacatatttctgtaacctgagctgaaaacccaaataacaatcattgacatactttagggctattgtttcaggtgggggtgtatacatcccaggggcgtggagatgatcaatccattgaggaagtattaagatgattatttgtatttaatctcatccttttaaatttctatttttgtgtgttttataatgtacataatatattgtacaattgtacacttctattatttataaataaacatttattggtgcattaaaaaaaaaaaaaaaaaaaattcactgaccatcattttacaacatgataactggnaccctgacattacccaacttaatcncctgatcacacatcccccttt

SEQ ID NO: 312639 - DNA, 1966 bp, Homo sapiens
agctggcgacggcggcggcagcggcagaggtggcggcggcgtgtccgtgagagtggcgtgggggcggggaggagaggcggcggcggcagtgtccaagctacgccactcgggctggggcgttgggagcgggagtgcagagcgtggtcgtggcggcggcggtgagaagagcgaggcggaggagggggtgccatggccgggcagcagttccagtacgatgacagtgggaacaccttcttctacttcctcacctccttcgtggggctcatcgtgatcccggcgacatactacctctggccccgagatcagaatgccgagcaaattcgattaaagaatatcagaaaagtatatggaaggtgtatgtggtatcgtttacggttattaaaaccccagccaaatattattcctacagtaaagaaaatagttctgcttgcaggatgggcattgttcttattccttgcatataaagtttccaaaacagaccgagaataccaagaatacaatccttatgaagtattaaatttggatcctggagccacagtagcagaaattaaaaaacaatatcgtttgctgtcacttaaatatcatccagataaaggaggtgatgaggttatgttcatgaggatagcaaaagcttatgctgctttaacggatgaagagtcccggaaaaattgggaagaatttggaaatccagatgggcctcaagccacaagctttggaattgccctgccagcttggatagttgaccagaaaaattcaattctggttttacttgtatatggattggcatttatggttatccttccagttgttgtgggctcttggtggtatcgctcaatacgctatagtggagaccagattctaatacgcacaacacagatttatacatactttgtttataaaacccgaaatatggatatgaaacgtcttatcatggttttggctggagcttctgaatttgatcctcagtataataaagatgccacaagcagaccaacggataatattctaataccacagctaatcagagaaattggcagcattaatttaaagaagaatgagcctccacttacctgcccatatagcctgaaggccagagttcttttactgtctcatcttgctagaatgaaaattcctgagacccttgaagaagatcagcaattcatgctaaaaaagtgtcctgccctacttcaagaaatggttaatgtaatctgccaactaatagtaatggcccggaaccgtgaagaaagggagtttcgtgctccaactttggcatccctagaaaactgcatgaagctttctcagatggccgttcagggacttcagcaatttaagtctccccttctgcagctccctcatattgaagaggacaatcttagacgggtttctaatcataagaagtataaaattaaaactatccaggatttggtgagtttaaaagaatcagatcgtcacactctactgcacttccttgaagatgaaaaatatgaagaggttatggctgtccttgggagttttccatatgtgaccatggatataaaatcacaggtgttagatgatgaagatagcaacaacatcacagtaggatccttagttacagtgttggttaagttgacaaggcaaacaatggctgaagtatttgaaaaggagcagtccatctgtgctgcagaggaacagccagcagaagatggggtaaaaacttgggtttccgaacctatttttcctagtgaaagaaatattttatttacttttccaattgacttatattgctctgggagagtaattcagtttagctatttccacctaaaaattactacaaccttcaattgaatctgttgctataacttaagagtgtgacgtgttatgattcacagcagggtgaaactaacaagaacaggacaaaaggaggatggcaacagaagagtaaaggacccaagaaaactgctaaatcaaaaaaaaagaaaccttt

SEQ ID NO: 312640 - DNA, 411 bp, Homo sapiens
ttaaaaaacaatatcgtttgctgtcacttaaatatcatccagataaaggaggtgatgaggttatgttcatgaggatagcaaaagcttatgctgcgtaagtatcaggatccattacaaatttttaagaatggtacagataagccaggtgcagtggttcatgcctgtaatcccagtactttgggaggctgaggcaggaggatcgcttgagcccaggagtttgagaccatccctggcaacataccaagaccccatctctacaaaaaataaaagaattaaccctgtgtggtggtgtgtgcctgtagtcctagctacttgggaggctgaggtgggagcgttgtttgagcctgggaggtcaaggctgcagtgagccgtgaccatgccactgcagcccaacttcgatgacagtaatac

SEQ ID NO: 312641 - DNA, 477 bp, Homo sapiens
taagaataaaagtgaaattttaaacaaatatttttactgtatgtatccttactgtgtttgtaaacttgagtagactgtacttttcaaaacttgttcaagacagatgtgagatactttagaaggtatctacctgcataggcacacattcatcagctagtaattgctaaacgtctccttctttgtcaattgtagccagttaaaaatacttaataaaaatgcagtttgaaagattgctttgtttgtctgaaagataaatataggttgacagattttgtatttctcttcttgccgccccccaggaagtatttgaaaaggagcagtccatctgtgctgcagaggaacagccagcagaagatggggtaaaaacttgggtttccgaacctatttttcctagtgaaagaaatattttatttacttttccaattgacttatattgctctgggagagtaattcagtttagctatttccacctaaaaa

SEQ ID NO: 312642 - DNA, 991 bp, Homo sapiens
agctggcgacggcggcggcagcggcagaggtggcggcggcgtgtccgtgagagtggcgtgggggcggggaggagaggcggcggcggcagtgtccaagctacgccactcgggctggggcgttgggagcgggagtgcagagcgtggtcgtggcggcggcggtgagaagagcgaggcggaggagggggtgccatggccgggcagcagttccagtacgatgacagtgggaacaccttcttctacttcctcacctccttcgtggggctcatcgtgatcccggcgacatactacctctggccccgagatcagaatgccgagcaaattcgattaaagaatatcagaaaagtatatggaaggtgtatgtggtatcgtttacggttattaaaaccccagccaaatattattcctacagtaaagaaaatagttctgcttgcaggatgggcattgttcttattccttgcatataaagtttccaaaacagaccgagaataccaagaatacaatccttatgaagtattaaatttggatcctggagccacagtagcagaaattaaaaaacaatatcgtttgctgtcacttaaatatcatccagataaaggaggtgatgaggttatgttcatgaggatagcaaaagcttatgctgctttaacggatgaagagtcccggaaaaattgggaagaatttggaaatccagatgggcctcaagccacaagctttggaattgccctgccagcttggatagttgaccagaaaaattcaattctggttttacttgtatatggattggcatttatggttatccttccagttgttgtggtaagttttagctttttaagttaatgttttttttggaaaggagattgacatgttttggagtctccctataacattttaaatgtatgttagaatataacccattgatccttgaatttaagagtcttgccactgaaggtgaggtgggaggatcgcttgagcctaggtgtttgaggttgcg

SEQ ID NO: 312643 - DNA, 3616 bp, Homo sapiens
agctggcgacggcggcggcagcggcagaggtggcggcggcgtgtccgtgagagtggcgtgggggcggggaggagaggcggcggcggcagtgtccaagctacgccactcgggctggggcgttgggagcgggagtgcagagcgtggtcgtggcggcggcggtgagaagagcgaggcggaggagggggtgccatggccgggcagcagttccagtacgatgacagtgggaacaccttcttctacttcctcacctccttcgtggggctcatcgtgatcccggcgacatactacctctggccccgagatcagaatgccgagcaaattcgattaaagaatatcagaaaagtatatggaaggtgtatgtggtatcgtttacggttattaaaaccccagccaaatattattcctacagtaaagaaaatagttctgcttgcaggatgggcattgttcttattccttgcatataaagtttccaaaacagaccgagaataccaagaatacaatccttatgaagtattaaatttggatcctggagccacagtagcagaaattaaaaaacaatatcgtttgctgtcacttaaatatcatccagataaaggaggtgatgaggttatgttcatgaggatagcaaaagcttatgctgctttaacggatgaagagtcccggaaaaattgggaagaatttggaaatccagatgggcctcaagccacaagctttggaattgccctgccagcttggatagttgaccagaaaaattcaattctggttttacttgtatatggattggcatttatggttatccttccagttgttgtgggctcttggtggtatcgctcaatacgctatagtggagaccagattctaatacgcacaacacagatttatacatactttgtttataaaacccgaaatatggatatgaaacgtcttatcatggttttggctggagcttctgaatttgatcctcagtataataaagatgccacaagcagaccaacggataatattctaataccacagctaatcagagaaattggcagcattaatttaaagaagaatgagcctccacttacctgcccatatagcctgaaggccagagttcttttactgtctcatcttgctagaatgaaaattcctgagacccttgaagaagatcagcaattcatgctaaaaaagtgtcctgccctacttcaagaaatggttaatgtaatctgccaactaatagtaatggcccggaaccgtgaagaaagggagtttcgtgctccaactttggcatccctagaaaactgcatgaagctttctcagatggccgttcagggacttcagcaatttaagtctccccttctgcagctccctcatattgaagaggacaatcttagacgggtttctaatcataagaagtataaaattaaaactatccaggatttggtgagtttaaaagaatcagatcgtcacactctactgcacttccttgaagatgaaaaatatgaagaggttatggctgtccttgggagttttccatatgtgaccatggatataaaatcacaggtgttagatgatgaagatagcaacaacatcacagtaggatccttagttacagtgttggttaagttgacaaggcaaacaatggctgaagtatttgaaaaggagcagtccatctgtgctgcagaggaacagccagcagaagatgggcagggtgaaactaacaagaacaggacaaaaggaggatggcaacagaagagtaaaggacccaagaaaactgctaaatcaaaaaaaaagaaacctttaaaaaaaaaacctacacctgtgctattaccacagtcaaagcaacagaaacaaaagcaggcaaatggagtcgttgggaatgaagctgcagtaaaggaagatgaagaagaagtttcagataagggcagtgattctgaagaagaagaaaccaatagagattcccaaagtgagaaagatgatggtagtgacagagactctgatagagagcaagatgaaaaacaaaacaaagatgatgaagcagagtggcaagaattacaacaaagcatacagcgaaaagagagagctctattggaaaccaaatcaaaaataacacatcctgtgtatagcctttactttcctgaggaaaaacaagaatggtggtggctttacattgcagataggaaggagcagacattaatatccatgccatatcatgtgtgtacgctgaaagatacagaggaggtagagctgaagtttcctgcaccaggcaagcctggaaattatcagtatactgtgtttctgagatcagactcctatatgggtttggatcagattaaaccattgaagttggaagttcatgaggctaagcctgtgccagaaaatcacccacagtgggatacagcaatagagggggatgaagaccaggaggacagtgagggctttgaagatagctttgaggaagaagaggaggaagaagaagatgatgactaagcagtactctgaatggaccacagtgtttgcacatatttgcaattttttgctgttttggaagtgtatcataaaccagaaacagtacagaactgatgttgagggaggtgtagtttttttactctagaaatgggtgcataatataactaggcagtggcggtgccttggtacaacctgaaaaatgttaaggcttattgaaacctttcaagtaggggatggtacatttatttcatctgcaaatgataataaatcctttgttattataactgtccagaagtgtgggctatgtattatctgatcagtctatggtcccagtaaaagtaaagatgcaggaaacacagtctgtaaatgagcgacttttctttgttcagctttagttttagcaaacaccacaaatatgttttaagtaacatcgctcaagtttaagtaacatcgctcaagttgataatctcttgataagctctgttgttgacattttgcagtgatacaacagctccactcatagatttaaacttttatttttacttatcttggtcataagttggcattctctcacattccacatgatatagagggctacgttttggaattttccttttcttaattgcccagagttatcagacagattataaaaatggcttttaatggcttaaaccatttctaaacctctatcttagcagatcaatgcaggatctaattcttttgataagttctagctctaaaagtgatagtgggactgtatgttttctgatactggtggcttatgttattaaaccttttttaaaaaaggttcactctaaaagctgaactacatccttagttttcagtctacttgactctatcaggagctttttaaggaaagtaagtataacatgcaaaggaagctttttttgtattcattttggactcctgtcaataaaaatagaagtttgttgactcgtaaaaaaaaccacaaaaaaaaaaaaaatggggggcggcccgggcccgaaaaaaattttaaaacactcggtgggggcggggccccctagtaagtcaccggggccaagtggtccaaggaaaccgggccgacagggtgggtctcccccaaaaacgcggggacggcggtggacacaccaaggggcggggccgggtccacagggccgggcaa

SEQ ID NO: 312644 - DNA, 6515 bp, Homo sapiens
  misc_feature (6469)..(6469): n is a, c, g, or t
  misc_feature (6494)..(6494): n is a, c, g, or t
agctggcgacggcggcggcagcggcagaggtggcggcggcgtgtccgtgagagtggcgtgggggcggggaggagaggcggcggcggcagtgtccaagctacgccactcgggctggggcgttgggagcgggagtgcagagcgtggtcgtggcggcggcggtgagaagagcgaggcggaggagggggtgccatggccgggcagcagttccagtacgatgacagtgggaacaccttcttctacttcctcacctccttcgtggggctcatcgtgatcccggcgacatactacctctggccccgagatcagaatgccgagcaaattcgattaaagaatatcagaaaagtatatggaaggtgtatgtggtatcgtttacggttattaaaaccccagccaaatattattcctacagtaaagaaaatagttctgcttgcaggatgggcattgttcttattccttgcatataaagtttccaaaacagaccgagaataccaagaatacaatccttatgaagtattaaatttggatcctggagccacagtagcagaaattaaaaaacaatatcgtttgctgtcacttaaatatcatccagataaaggaggtgatgaggttatgttcatgaggatagcaaaagcttatgctgctttaacggatgaagagtcccggaaaaattgggaagaatttggaaatccagatgggcctcaagccacaagctttggaattgccctgccagcttggatagttgaccagaaaaattcaattctggttttacttgtatatggattggcatttatggttatccttccagttgttgtgggctcttggtggtatcgctcaatacgctatagtggagaccagattctaatacgcacaacacagatttatacatactttgtttataaaacccgaaatatggatatgaaacgtcttatcatggttttggctggagcttctgaatttgatcctcagtataataaagatgccacaagcagaccaacggataatattctaataccacagctaatcagagaaattggcagcattaatttaaagaagaatgagcctccacttacctgcccatatagcctgaaggccagagttcttttactgtctcatcttgctagaatgaaaattcctgagacccttgaagaagatcagcaattcatgctaaaaaagtgtcctgccctacttcaagaaatggttaatgtaatctgccaactaatagtaatggcccggaaccgtgaagaaagggagtttcgtgctccaactttggcatccctagaaaactgcatgaagctttctcagatggccgttcagggacttcagcaatttaagtctccccttctgcagctccctcatattgaagaggacaatcttagacgggtttctaatcataagaagtataaaattaaaactatccaggatttggtgagtttaaaagaatcagatcgtcacactctactgcacttccttgaagatgaaaaatatgaagaggttatggctgtccttgggagttttccatatgtgaccatggatataaaatcacaggtgttagatgatgaagatagcaacaacatcacagtaggatccttagttacagtgttggttaagttgacaaggcaaacaatggctgaagtatttgaaaaggagcagtccatctgtgctgcagaggaacagccagcagaagatgggcagggtgaaactaacaagaacaggacaaaaggaggatggcaacagaagagtaaaggacccaagaaaactgctaaatcaaaaaaaaagaaacctttaaaaaaaaaacctacacctgtgctattaccacagtcaaagcaacagaaacaaaagcaggcaaatggagtcgttgggaatgaagctgcagtaaaggaagatgaagaagaagtttcagataagggcagtgattctgaagaagaagaaaccaatagagattcccaaagtgagaaagatgatggtagtgacagagactctgatagagagcaagatgaaaaacaaaacaaagatgatgaagcagagtggcaagaattacaacaaagcatacagcgaaaagagagagctctattggaaaccaaatcaaaaataacacatcctgtgtatagcctttactttcctgaggaaaaacaagaatggtggtggctttacattgcagataggaaggagcagacattaatatccatgccatatcatgtgtgtacgctgaaagatacagaggaggtagagctgaagtttcctgcaccaggcaagcctggaaattatcagtatactgtgtttctgagatcagactcctatatgggtttggatcagattaaaccattgaagttggaagttcatgaggctaagcctgtgccagaaaatcacccacagtgggatacagcaatagagggggatgaagaccaggaggacagtgagggctttgaagatagctttgaggaagaagaggaggaagaagaagatgatgactaagcagtactctgaatggaccacagtgtttgcacatatttgcaattttttgctgttttggaagtgtatcataaaccagaaacagtacagaactgatgttgagggaggtgtagtttttttactctagaaatgggtgcataatataactaggcagtggcggtgccttggtacaacctgaaaaatgttaaggcttattgaaacctttcaagtaggggatggtacatttatttcatctgcaaatgataataaatcctttgttattataactgtccagaagtgtgggctatgtattatctgatcagtctatggtcccagtaaaagtaaagatgcaggaaacacagtctgtaaatgagcgacttttctttgttcagctttagttttagcaaacaccacaaatatgttttaagtaacatcgctcaagtttaagtaacatcgctcaagttgataatctcttgataagctctgttgttgacattttgcagtgatacaacagctccactcatagatttaaacttttatttttacttatcttggtcataagttggcattctctcacattccacatgatatagagggctacgttttggaattttccttttcttaattgcccagagttatcagacagattataaaaatggcttttaatggcttaaaccatttctaaacctctatcttagcagatcaatgcaggatctaattcttttgataagttctagctctaaaagtgatagtgggactgtatgttttctgatactggtggcttatgttattaaaccttttttaaaaaaggttcactctaaaagctgaactacatccttagttttcagtctacttgactctatcaggagctttttaaggaaagtaagtataacatgcaaaggaagctttttttgtattcattttggactcctgtcaataaaaatagaagtttgttgactcgttttatgtttcaatggtgtgtgtctttttactatcaggacataaatagggcaatccacttctttatttttcaactaaagattgaatagtattgtacattactgctaaagtgactgctatttctgtatactgtagaaaaacccaggagtgagagggatttcccctcatagtacaactggaaggatagtgcttgtaaagagtagagatgtgtacatgatgaatcattgagggagggtggatatttttattcctagatatggaggaaacataagtctgtagtattataaaactgattgtaataattctttcctatcaaaatctccataggtcaaaatattgttggaatactaaaatttgcaaccttgtttactttaaaaggttgccactttcagtgcagaatactaccggcatcttgttactgcaatagttggaaataaaatgtgaaaattagcaaaaccatgcatggttttttggttctaaatttaagatgtaatatttcctataaaagggtgaaagcagtttctttctctataacctcaatcaccagtttagtgagagcctttcttggcaggcaggaggcagtgtcaccgaggatttttttcatttacttcattgtacaagtaggagggtgggtttaattttcaaatcaggttctgctgtgaagcaccagtgtcttgaggcagctactgattacctaagtgtggtggcagggggtaagccagctggtgtcaagtgaaaggagggattagagaaaacaggtgtggcacaaaggcaaggaaactgagcagacaagacagaacaatgtgtagaatgcatatttcctagttttcttgaaagatttcaagaaaagttttttttttttctagtggctactttgccttaaagaggctttataagttcattcacacagctggcttctctggttttaagattctggagaggatgataacctagtaacaccgcagtgcttaaaaaaaaaaaaaaaactaccatcaccagaaaattccaccagtttgttttccttttctctttgtgtgatgtgtatgtacttcccaactaagtaaaataaaatttcctctagtgagtgctttaggtaacctctttccatatggcagtagtgaaagaactgagccttcagttgatagttcttctctctccagcaagtcgctaaactccacatcccttcgtttttcctctggaatgagaataacaaactatcctagtttgcatttaatctaatggaaacttgagcaaagtttcaattttcttcctataaagaaactgacattttgtcaacaattgatgagcctatagatcatacagtgtataggaagtgaaattgaaacagttaaattatgtgatatttttctctaattggtaaagtacctattaaaatacagctgttcatgaggagacttaccacaattcaaagtgtagcagttgtgtattttagcattataatatttgattgaggccctgaggtgttaatatctcaatctcagagttagatgttcatgtcctttttgaattttttaaacatttttcataattttttttttaagttagggagcacattgagtgaagttctctgtgtagaacaataccttctgctctgcttctcccagctttcactgagggctggaaaaggacaggcctgtccagctgtactgtcccactgtgtatggggaagctcaggctctggtggaagcagggggcatggatgtcaaacaactgatgtggaaacagggagggagagatataatgaggctctctaggcatgttatttttgaccacaagttttgttcagtttgcttcagccaatccaaaccatatactagagtgttctgtagtcacaattcttatttcaaatgtaattcagcaccttacataatttttgagaggttgtcattcatcacatatttactgagtttctatgtgccaggctctgtgactggatactggagctatcaaaatgaaaaaaatagtgttaagaactcactcgctggtgttagagcaggtagatgagtggcaatccatttaaatccatttgccttggctattatttggaatgcctttttttttttttaagtctatctactgtaggcagaagaattatttctttaggggctagctgtttattttgctggcctttttttctctctttctctttttcttcttaagacggagtctcgctctgtcctccaggctgggaggagtgcagtgggcacgatctcagctcactgcaacctcggcctcccagtttcaagcgattcttctgcctcagcctcctgagtagctgggactgcaggtgcatgccaccacacccagctaattttttaatttttagtagagatgggattttgccacgttgtccagcctggtctcgaactcctggcctcaagtgatcagccctcctcagcctcccaaagtgctggcattacaggcatgagtcactgcgcccagcctgttgggtttttttggaaaaaaaccaaaaacaacaaatcatcatcctttcctttaaaatgttttttttttttaagaaacaattttcccacaaacggtctgatttaactccatgaaatcctctatttagactgccttaaagtgaaataactgttggtgaaccataacgacattttaccagctgtgtagtgattagtccaaatatgtctcaagaagttagcaccaagcattctcatccatttaaacttgatgctagggctattttgcaaaacttaaaaagatgcgatcttgtacatatttctgtaacctgagctgaaaacccaaataacaatcattgacatactttagggctattgtttcaggtgggggtgtatacatcccaggggcgtggagatgatcaatccattgaggaagtattaagatgattatttgtatttaatctcatccttttaaatttctatttttgtgtgttttataatgtacataatatattgtacaattgtacacttctattatttataaataaacatttattggtgcattaaaaaaaaaaaaaaaaaaaattcactgaccatcattttacaacatgataactggnaccctgacattacccaacttaatcncctgatcacacatcccccttt

SEQ ID NO: 312645 - DNA, 3516 bp, Homo sapiens
agctggcgacggcggcggcagcggcagaggtggcggcggcgtgtccgtgagagtggcgtgggggcggggaggagaggcggcggcggcagtgtccaagctacgccactcgggctggggcgttgggagcgggagtgcagagcgtggtcgtggcggcggcggtgagaagagcgaggcggaggagggggtgccatggccgggcagcagttccagtacgatgacagtgggaacaccttcttctacttcctcacctccttcgtggggctcatcgtgatcccggcgacatactacctctggccccgagatcagaatgccggaaaatagttctgcttgcaggatgggcattgttcttattccttgcatataaagtttccaaaacagaccgagaataccaagaatacaatccttatgaagtattaaatttggatcctggagccacagtagcagaaattaaaaaacaatatcgtttgctgtcacttaaatatcatccagataaaggaggtgatgaggttatgttcatgaggatagcaaaagcttatgctgctttaacggatgaagagtcccggaaaaattgggaagaatttggaaatccagatgggcctcaagccacaagctttggaattgccctgccagcttggatagttgaccagaaaaattcaattctggttttacttgtatatggattggcatttatggttatccttccagttgttgtgggctcttggtggtatcgctcaatacgctatagtggagaccagattctaatacgcacaacacagatttatacatactttgtttataaaacccgaaatatggatatgaaacgtcttatcatggttttggctggagcttctgaatttgatcctcagtataataaagatgccacaagcagaccaacggataatattctaataccacagctaatcagagaaattggcagcattaatttaaagaagaatgagcctccacttacctgcccatatagcctgaaggccagagttcttttactgtctcatcttgctagaatgaaaattcctgagacccttgaagaagatcagcaattcatgctaaaaaagtgtcctgccctacttcaagaaatggttaatgtaatctgccaactaatagtaatggcccggaaccgtgaagaaagggagtttcgtgctccaactttggcatccctagaaaactgcatgaagctttctcagatggccgttcagggacttcagcaatttaagtctccccttctgcagctccctcatattgaagaggacaatcttagacgggtttctaatcataagaagtataaaattaaaactatccaggatttggtgagtttaaaagaatcagatcgtcacactctactgcacttccttgaagatgaaaaatatgaagaggttatggctgtccttgggagttttccatatgtgaccatggatataaaatcacaggtgttagatgatgaagatagcaacaacatcacagtaggatccttagttacagtgttggttaagttgacaaggcaaacaatggctgaagtatttgaaaaggagcagtccatctgtgctgcagaggaacagccagcagaagatgggcagggtgaaactaacaagaacaggacaaaaggaggatggcaacagaagagtaaaggacccaagaaaactgctaaatcaaaaaaaaagaaacctttaaaaaaaaaacctacacctgtgctattaccacagtcaaagcaacagaaacaaaagcaggcaaatggagtcgttgggaatgaagctgcagtaaaggaagatgaagaagaagtttcagataagggcagtgattctgaagaagaagaaaccaatagagattcccaaagtgagaaagatgatggtagtgacagagactctgatagagagcaagatgaaaaacaaaacaaagatgatgaagcagagtggcaagaattacaacaaagcatacagcgaaaagagagagctctattggaaaccaaatcaaaaataacacatcctgtgtatagcctttactttcctgaggaaaaacaagaatggtggtggctttacattgcagataggaaggagcagacattaatatccatgccatatcatgtgtgtacgctgaaagatacagaggaggtagagctgaagtttcctgcaccaggcaagcctggaaattatcagtatactgtgtttctgagatcagactcctatatgggtttggatcagattaaaccattgaagttggaagttcatgaggctaagcctgtgccagaaaatcacccacagtgggatacagcaatagagggggatgaagaccaggaggacagtgagggctttgaagatagctttgaggaagaagaggaggaagaagaagatgatgactaagcagtactctgaatggaccacagtgtttgcacatatttgcaattttttgctgttttggaagtgtatcataaaccagaaacagtacagaactgatgttgagggaggtgtagtttttttactctagaaatgggtgcataatataactaggcagtggcggtgccttggtacaacctgaaaaatgttaaggcttattgaaacctttcaagtaggggatggtacatttatttcatctgcaaatgataataaatcctttgttattataactgtccagaagtgtgggctatgtattatctgatcagtctatggtcccagtaaaagtaaagatgcaggaaacacagtctgtaaatgagcgacttttctttgttcagctttagttttagcaaacaccacaaatatgttttaagtaacatcgctcaagtttaagtaacatcgctcaagttgataatctcttgataagctctgttgttgacattttgcagtgatacaacagctccactcatagatttaaacttttatttttacttatcttggtcataagttggcattctctcacattccacatgatatagagggctacgttttggaattttccttttcttaattgcccagagttatcagacagattataaaaatggcttttaatggcttaaaccatttctaaacctctatcttagcagatcaatgcaggatctaattcttttgataagttctagctctaaaagtgatagtgggactgtatgttttctgatactggtggcttatgttattaaaccttttttaaaaaaggttcactctaaaagctgaactacatccttagttttcagtctacttgactctatcaggagctttttaaggaaagtaagtataacatgcaaaggaagctttttttgtattcattttggactcctgtcaataaaaatagaagtttgttgactcgtaaaaaaaaccacaaaaaaaaaaaaaatggggggcggcccgggcccgaaaaaaattttaaaacactcggtgggggcggggccccctagtaagtcaccggggccaagtggtccaaggaaaccgggccgacagggtgggtctcccccaaaaacgcggggacggcggtggacacaccaaggggcggggccgggtccacagggccgggcaa

SEQ ID NO: 312646 - DNA, 3251 bp, Homo sapiens
agctggcgacggcggcggcagcggcagaggtggcggcggcgtgtccgtgagagtggcgtgggggcggggaggagaggcggcggcggcagtgtccaagctacgccactcgggctggggcgttgggagcgggagtgcagagcgtggtcgtggcggcggcggtgagaagagcgaggcggaggagggggtgccatggccgggcagcagttccagtacgatgacagtgggaacaccttcttctacttcctcacctccttcgtggggctcatcgtgatcccggcgacatactacctctggccccgagatcagaatgccgagcaaattcgattaaagaatatcagaaaagtatatggaaggtgtatgtggtatcgtttacggttattaaaaccccagccaaatattattcctacagtaaagaaaatagttctgcttgcaggatgggcattgttcttattccttgcatataaagtttccaaaacagaccgagaataccaagaatacaatccttatgaagtattaaatttggatcctggagccacagtagcagaaattaaaaaacaatatcgtttgctgtcacttaaatatcatccagataaaggaggtgatgaggttatgttcatgaggatagcaaaagcttatgctgctttaacggatgaagagtcccggaaaaattgggaagaatttggaaatccagatgggcctcaagccacaagctttggaattgccctgccagcttggatagttgaccagaaaaattcaattctggttttacttgtatatggattggcatttatggttatccttccagttgttgtgggctcttggtggtatcgctcaatacgctatagtggagaccagattctaatacgcacaacacagatttatacatactttgtttataaaacccgaaatatggatatgaaacgtcttatcatggttttggctggagcttctgaatttgatcctcagtataataaagatgccacaagcagaccaacggataatattctaataccacagctaatcagagaaattggcagcattaatttaaagaagaatgagcctccacttacctgcccatatagcctgaaggccagagttcttttactgtctcatcttgctagaatgaaaattcctgagacccttgaagaagatcagcaattcatgctaaaaaagtgtcctgccctacttcaagaaatggttaatgtaatctgccaactaatagtaatggcccggaaccgtgaagaaagggagtttcgtgctccaactttggcatccctagaaaactgcatgaagctttctcagatggccgttcagggacttcagcaatttaagtctccccttctgcagctccctcatattgaagaggacaatcttagacgggtttctaatcataagaagtataaaattaaaactatccaggatttggtgagtttaaaagaatcagatcgtcacactctactgcacttccttgaagatgaaaaatatgaagaggttatggctgtccttgggagttttccatatgtgaccatggatataaaatcacaggtgttagatgatgaagatagcaacaacatcacagtaggatccttagttacagtgttggttaagttgacaaggcaaacaatggctgaagtatttgaaaaggagcagtccatctgtgctgcagaggaacagccagcagaagatgggcagggtgaaactaacaagaacaggacaaaaggaggatggcaacagaagagtaaaggacccaagaaaactgctaaatcaaaaaaaaagaaacctttaaaaaaaaaacctacacctgtgctattaccacagtcaaagcaacagaaacaaaagcaggcaaatggagtcgttgggaatgaagctgcagtaaaggaagatgaagaagaagtttcagataagggcagtgattctgaagaagaagaaaccaatagagattcccaaagtgagaaagatgatggtagtgacagagactctgatagagagcaagatgaaaaacaaaacaaagatgatgaagcagagtggcaagaattacaacaaagcatacagcgaaaagagagagctctattggaaaccaaatcaaaaataacacatcctgtgtatagcctttactttcctgaggaaaaacaagaatggtggtggctttacattgcagataggaaggagcagacattaatatccatgccatatcatgtgtgtacgctgaaagatacagaggaggtagagctgaagtttcctgcaccaggcaagcctggaaattatcagtatactgtgtttctgagatcagactcctatatgggtttggatcagattaaaccattgaagttggaagttcatgaggctaagcctgtgccagaaaatcacccacagtgggatacagcaatagagggggatgaagaccaggaggacagtgagggctttgaagatagctttgaggaagaagaggaggaagaagaagatgatgactaagcagtactctgaatggaccacagtgtttgcacatatttgcaattttttgctgttttggaagtgtatcataaaccagaaacagtacagaactgatgttgagggaggtgtagtttttttactctagaaatgggtgcataatataactaggcagtggcggtgccttggtacaacctgaaaaatgttaaggcttattgaaacctttcaagtaggggatggtacatttatttcatctgcaaatgataataaatcctttgttattataactgtccagaagtgtgggctatgtattatctgatcagtctatggtcccagtaaaagtaaagatgcaggaaacacagtctgtaaatgagcgacttttctttgttcagctttagttttagcaaacaccacaaatatgttttaagtaacatcgctcaagtttaagtaacatcgctcaagttgataatctcttgataagctctgttgttgacattttgcagtgatacaacagctccactcatagatttaaacttttatttttacttatcttggtcataagttggcattctctcacattccacatgatatagagggctacgttttggaattttccttttcttaattgcccagagttatcagacagattataaaaatggcttttaatggcttaaaccatttctaaacctctatcttagcagatcaatgcaggatctaattcttttgataagttctagctctaaaagtgatagtgggactgtatgttttctgatacgttttgagggatcctctagacagcctca

SEQ ID NO: 312647 - DNA, 4780 bp, Homo sapiens
  misc_feature (4734)..(4734): n is a, c, g, or t
  misc_feature (4759)..(4759): n is a, c, g, or t
gcgcaactggagaagaaaaaaaagaaaaagatagaaaaaagaaaaagtttcagaagagcagaagtaaacacaaaaaacataagtcctcttcttcctcatcttcctcctcctcctcctcttcctctactgagacttcagaaagcagtagtgagagtgagagtaacaataaagaaaaaaaaatacaaaggaagaaaagaaagaaaaacaagtgttcagggcataagggcagtgattctgaagaagaagaaaccaatagagattcccaaagtgagaaagatgatggtagtgacagagactctgatagagagcaagatgaaaaacaaaacaaagatgatgaagcagagtggcaagaattacaacaaagcatacagcgaaaagagagagctctattggaaaccaaatcaaaaataacacatcctgtgtatagcctttactttcctgaggaaaaacaagaatggtggtggctttacattgcagataggaaggagcagacattaatatccatgccatatcatgtgtgtacgctgaaagatacagaggaggtagagctgaagtttcctgcaccaggcaagcctggaaattatcagtatactgtgtttctgagatcagactcctatatgggtttggatcagattaaaccattgaagttggaagttcatgaggctaagcctgtgccagaaaatcacccacagtgggatacagcaatagagggggatgaagaccaggaggacagtgagggctttgaagatagctttgaggaagaagaggaggaagaagaagatgatgactaagcagtactctgaatggaccacagtgtttgcacatatttgcaattttttgctgttttggaagtgtatcataaaccagaaacagtacagaactgatgttgagggaggtgtagtttttttactctagaaatgggtgcataatataactaggcagtggcggtgccttggtacaacctgaaaaatgttaaggcttattgaaacctttcaagtaggggatggtacatttatttcatctgcaaatgataataaatcctttgttattataactgtccagaagtgtgggctatgtattatctgatcagtctatggtcccagtaaaagtaaagatgcaggaaacacagtctgtaaatgagcgacttttctttgttcagctttagttttagcaaacaccacaaatatgttttaagtaacatcgctcaagtttaagtaacatcgctcaagttgataatctcttgataagctctgttgttgacattttgcagtgatacaacagctccactcatagatttaaacttttatttttacttatcttggtcataagttggcattctctcacattccacatgatatagagggctacgttttggaattttccttttcttaattgcccagagttatcagacagattataaaaatggcttttaatggcttaaaccatttctaaacctctatcttagcagatcaatgcaggatctaattcttttgataagttctagctctaaaagtgatagtgggactgtatgttttctgatactggtggcttatgttattaaaccttttttaaaaaaggttcactctaaaagctgaactacatccttagttttcagtctacttgactctatcaggagctttttaaggaaagtaagtataacatgcaaaggaagctttttttgtattcattttggactcctgtcaataaaaatagaagtttgttgactcgttttatgtttcaatggtgtgtgtctttttactatcaggacataaatagggcaatccacttctttatttttcaactaaagattgaatagtattgtacattactgctaaagtgactgctatttctgtatactgtagaaaaacccaggagtgagagggatttcccctcatagtacaactggaaggatagtgcttgtaaagagtagagatgtgtacatgatgaatcattgagggagggtggatatttttattcctagatatggaggaaacataagtctgtagtattataaaactgattgtaataattctttcctatcaaaatctccataggtcaaaatattgttggaatactaaaatttgcaaccttgtttactttaaaaggttgccactttcagtgcagaatactaccggcatcttgttactgcaatagttggaaataaaatgtgaaaattagcaaaaccatgcatggttttttggttctaaatttaagatgtaatatttcctataaaagggtgaaagcagtttctttctctataacctcaatcaccagtttagtgagagcctttcttggcaggcaggaggcagtgtcaccgaggatttttttcatttacttcattgtacaagtaggagggtgggtttaattttcaaatcaggttctgctgtgaagcaccagtgtcttgaggcagctactgattacctaagtgtggtggcagggggtaagccagctggtgtcaagtgaaaggagggattagagaaaacaggtgtggcacaaaggcaaggaaactgagcagacaagacagaacaatgtgtagaatgcatatttcctagttttcttgaaagatttcaagaaaagttttttttttttctagtggctactttgccttaaagaggctttataagttcattcacacagctggcttctctggttttaagattctggagaggatgataacctagtaacaccgcagtgcttaaaaaaaaaaaaaaaactaccatcaccagaaaattccaccagtttgttttccttttctctttgtgtgatgtgtatgtacttcccaactaagtaaaataaaatttcctctagtgagtgctttaggtaacctctttccatatggcagtagtgaaagaactgagccttcagttgatagttcttctctctccagcaagtcgctaaactccacatcccttcgtttttcctctggaatgagaataacaaactatcctagtttgcatttaatctaatggaaacttgagcaaagtttcaattttcttcctataaagaaactgacattttgtcaacaattgatgagcctatagatcatacagtgtataggaagtgaaattgaaacagttaaattatgtgatatttttctctaattggtaaagtacctatttattttagcattataatatttgattgaggccctgaggtgttaatatctcaatctcagagttagatgttcatgtcctttttgaattttttaaacatttttcataattttttttttaagttagggagcacattgagtgaagttctctgtgtagaacaataccttctgctctgcttctcccagctttcactgagggctggaaaaggacaggcctgtccagctgtactgtcccactgtgtatggggaagctcaggctctggtggaagcagggggcatggatgtcaaacaactgatgtggaaacagggagggagagatataatgaggctctctaggcatgttatttttgaccacaagttttgttcagtttgcttcagccaatccaaaccatatactagagtgttctgtagtcacaattcttatttcaaatgtaattcagcaccttacataatttttgagaggttgtcattcatcacatatttactgagtttctatgtgccaggctctgtgactggatactggagctatcaaaatgaaaaaaatagtgttaagaactcactcgctggtgttagagcaggtagatgagtggcaatccatttaaatccatttgccttggctattatttggaatgcctttttttttttttaagtctatctactgtaggcagaagaattatttctttaggggctagctgtttattttgctggcctttttttctctctttctctttttcttcttaagacggagtctcgctctgtcctccaggctgggaggagtgcagtgggcacgatctcagctcactgcaacctcggcctcccagtttcaagcgattcttctgcctcagcctcctgagtagctgggactgcaggtgcatgccaccacacccagctaattttttaatttttagtagagatgggattttgccacgttgtccagcctggtctcgaactcctggcctcaagtgatcagccctcctcagcctcccaaagtgctggcattacaggcatgagtcactgcgcccagcctgttgggtttttttggaaaaaaaccaaaaacaacaaatcatcatcctttcctttaaaatgttttttttttttaagaaacaattttcccacaaacggtctgatttaactccatgaaatcctctatttagactgccttaaagtgaaataactgttggtgaaccataacgacattttaccagctgtgtagtgattagtccaaatatgtctcaagaagttagcaccaagcattctcatccatttaaacttgatgctagggctattttgcaaaacttaaaaagatgcgatcttgtacatatttctgtaacctgagctgaaaacccaaataacaatcattgacatactttagggctattgtttcaggtgggggtgtatacatcccaggggcgtggagatgatcaatccattgaggaagtattaagatgattatttgtatttaatctcatccttttaaatttctatttttgtgtgttttataatgtacataatatattgtacaattgtacacttctattatttataaataaacatttattggtgcattaaaaaaaaaaaaaaaaaaaattcactgaccatcattttacaacatgataactggnaccctgacattacccaacttaatcncctgatcacacatcccccttt

SEQ ID NO: 312648 - DNA, 2491 bp, Homo sapiens
agctggcgacggcggcggcagcggcagaggtggcggcggcgtgtccgtgagagtggcgtgggggcggggaggagaggcggcggcggcagtgtccaagctacgccactcgggctggggcgttgggagcgggagtgcagagcgtggtcgtggcggcggcggtgagaagagcgaggcggaggagggggtgccatggccgggcagcagttccagtacgatgacagtgggaacaccttcttctacttcctcacctccttcgtggggctcatcgtgatcccggcgacatactacctctggccccgagatcagaatgccgagcaaattcgattaaagaatatcagaaaagtatatggaaggtgtatgtggtatcgtttacggttattaaaaccccagccaaatattattcctacagtaaagaaaatagttctgcttgcaggatgggcattgttcttattccttgcatataaagtttccaaaacagaccgagaataccaagaatacaatccttatgaagtattaaatttggatcctggagccacagtagcagaaattaaaaaacaatatcgtttgctgtcacttaaatatcatccagataaaggaggtgatgaggttatgttcatgaggatagcaaaagcttatgctgctttaacggatgaagagtcccggaaaaattgggaagaatttggaaatccagatgggcctcaagccacaagctttggaattgccctgccagcttggatagttgaccagaaaaattcaattctggttttacttgtatatggattggcatttatggttatccttccagttgttgtgggctcttggtggtatcgctcaatacgctatagtggagaccagattctaatacgcacaacacagatttatacatactttgtttataaaacccgaaatatggatatgaaacgtcttatcatggttttggctggagcttctgaatttgatcctcagtataataaagatgccacaagcagaccaacggataatattctaataccacagctaatcagagaaattggcagcattaatttaaagaagaatgagcctccacttacctgcccatatagcctgaaggccagagttcttttactgtctcatcttgctagaatgaaaattcctgagacccttgaagaagatcagcaattcatgctaaaaaagtgtcctgccctacttcaagaaatggttaatgtaatctgccaactaatagtaatggcccggaaccgtgaagaaagggagtttcgtgctccaactttggcatccctagaaaactgcatgaagctttctcagatggccgttcagggacttcagcaatttaagtctccccttctgcagctccctcatattgaagaggacaatcttagacgggtttctaatcataagaagtataaaattaaaactatccaggatttggtgagtttaaaagaatcagatcgtcacactctactgcacttccttgaagatgaaaaatatgaagaggttatggctgtccttgggagttttccatatgtgaccatggatataaaatcacaggtgttagatgatgaagatagcaacaacatcacagtaggatccttagttacagtgttggttaagttgacaaggcaaacaatggctgaagtatttgaaaaggagcagtccatctgtgctgcagaggaacagccagcagaagatgggcagggtgaaactaacaagaacaggacaaaaggaggatggcaacagaagagtaaaggacccaagaaaactgctaaatcaaaaaaaaagaaacctttaaaaaaaaaacctacacctgtgctattaccacagtcaaagcaacagaaacaaaagcaggcaaatggagtcgttgggaatgaagctgcagtaaaggaagatgaagaagaagtttcagataagggcagtgattctgaagaagaagaaaccaatagagattcccaaagtgagaaagatgatggtagtgacagagactctgatagagagcaagatgaaaaacaaaacaaagatgatgaagcagagtggcaagaattacaacaaagcatacagcgaaaagagagagctctattggaaaccaaatcaaaaataacacatcctgtgtatagcctttactttcctgaggaaaaacaagaatggtggtggctttacattgcagataggaaggagcagacattaatatccatgccatatcatgtgtgtacgctgaaagatacagaggaggtagagctgaagtttcctgcaccaggcaagcctggaaattatcagtatactgtgtttctgagatcagactcctatatgggtttggatcagattaaaccattgaaggacgtcctaatagacgatcggccagtcacaagcttaagtcgctgtgcacgatcgactctagaagcatcgggcgattgccagacgggggcagcaacaccaagaggacagcaagggtcttgatgatagcatgaaggaaaatgagaagggagaatacgaggaagtg

SEQ ID NO: 312649 - DNA, 1750 bp, Homo sapiens
agctggcgacggcggcggcagcggcagaggtggcggcggcgtgtccgtgagagtggcgtgggggcggggaggagaggcggcggcggcagtgtccaagctacgccactcgggctggggcgttgggagcgggagtgcagagcgtggtcgtggcggcggcggtgagaagagcgaggcggaggagggggtgccatggccgggcagcagttccagtacgatgacagtgggaacaccttcttctacttcctcacctccttcgtggggctcatcgtgatcccggcgacatactacctctggccccgagatcagaatgccgagcaaattcgattaaagaatatcagaaaagtatatggaaggtgtatgtggtatcgtttacggttattaaaaccccagccaaatattattcctacagtaaagaaaatagttctgcttgcaggatgggcattgttcttattccttgcatataaagtttccaaaacagaccgagaataccaagaatacaatccttatgaagtattaaatttggatcctggagccacagtagcagaaattaaaaaacaatatcgtttgctgtcacttaaatatcatccagataaaggaggtgatgaggttatgttcatgaggatagcaaaagcttatgctgctttaacggatgaagagtcccggaaaaattgggaagaatttggaaatccagatgggcctcaagccacaagctttggaattgccctgccagcttggatagttgaccagaaaaattcaattctggttttacttgtatatggattggcatttatggttatccttccagttgttgtgggctcttggtggtatcgctcaatacgctatagtggagaccagattctaatacgcacaacacagatttatacatactttgtttataaaacccgaaatatggatatgaaacgtcttatcatggttttggctggagcttctgaatttgatcctcagtataataaagatgccacaagcagaccaacggataatattctaataccacagctaatcagagaaattggcagcattaatttaaagaagaatgagcctccacttacctgcccatatagcctgaaggccagagttcttttactgtctcatcttgctagaatgaaaattcctgagacccttgaagaagatcagcaattcatgctaaaaaagtgtcctgccctacttcaagaaatggttaatgtaatctgccaactaatagtaatggcccggaaccgtgaagaaagggagtttcgtgctccaactttggcatccctagaaaactgcatgaagctttctcagatggccgttcagggacttcagcaatttaagtctccccttctgcagctccctcatattgaagaggacaatcttagacgggtttctaatcataagaagtataaaattaaaactatccaggatttggtgagtttaaaagaatcagatcgtcacactctactgcacttccttgaagatgaaaaatatgaagaggttatggctgtccttgggagttttccatatgtgaccatggatataaaatcacaggtgttagatgatgaagatagcaacaacatcacagtaggatccttagttacagtgttggttaagttgacaaggcaaacaatggctgaagtatttgaaaaggagcagtccatctgtgctgcagaggaacagccagcagaagatgggcagggtgaaactaacaagaacaggtccagggcagaggaccaacgtctacgcggccgcgaat

SEQ ID NO: 312650 - DNA, 621 bp, Homo sapiens
agagagactcgtgccgaattcggcagagccccaatgagaccaatgaaatcgccaatgccaactcccgtcagcagatccggaagctcatcaaagatgggctgatcatccgcaagcctgtgacggtccattcccgggctcgatgccggaaaaacaccttggcccgccggaagggcaggcacatgggcataggtaagcggaagggtacagccaatgcccgaatgccagagaaggtcacatggatgaggagaatgaggattttgcgccggctgctcagaagataccgtgaatctaagaagatcgatcgccacatgtatcacagcctgtacctgaaggtgaaggggaatgtgttcaaaaacaagcggattctcatggaacacatccacaagctgaaggcagacaaggcccgcaagaagctcctggctgaccaggctgaggcccgcaggtctaagaccaaggaagcacgcaagcgccgtgaagagcgcctccaggccaagaaggaggagatcatcaagactttatccaaggaggaagagaccaagaaataaaacctcccactttgtctgtacatactggcctctgtgattacatagatcagccattaaaataaaacaagccttaatg

SEQ ID NO: 312651 - DNA, 795 bp, Homo sapiens
ggcagataatgggaggagccgggcccgagcgagctctttcctttcgctgctgcggccgcagccatgagtatgctcaggcttcagaagaggctcgcctctagtgtcctccgctgtggcaagaagaaggtctggttagaccccaatgagaccaatgaaatcgccaatgccaactcccgtcagcagatccggaagctcatcaaagatgggctgatcatccgcaagcctgtgacggtccattcccgggctcgatgccggaaaaacaccttggcccgccggaagggcaggcacatgggcataggtaagcggaagggtacagccaatgcccgaatgccagagaaggtcacatggatgaggagaatgaggattttgcgccggctgctcagaagataccgtgaatctaagaagatcgatcgccacatgtatcacagcctgtacctgaaggtgaaggggaatgtgttcaaaaacaagcggattctcatggaacacatccacaagctgaaggcagacaaggcccgcaagaagctcctggctgaccaggctgaggcccgcaggtctaagaccaaggaagcacgcaagcgccgtgaagagcgcctccaggccaagaaggaggagatcatcaagactttatccaaggaggaagagaccaagaaataaaacctcccactttgtctgtacatactggcctctgtgattacatagatcagccattaaaataaaacaagccttaatgaaaaaaaacaatgccttatcatatatgtaaaacccagcccatgaccctaaaaggggcctctagac

SEQ ID NO: 312652 - DNA, 730 bp, Homo sapiens
ggcagataatgggaggagccgggcccgagcgagctctttcctttcgctgctgcggccgcagccatgagtatgctcaggcttcagaagaggctcgcctctagtgtcctccgctgtggcaagaagaaggtctggttagaccccaatgagaccaatgaaatcgccaatgccaactcccgtcagcagatccggaagctcatcaaagatgggctgatcatccgcaagcctgtgacggtccattcccgggctcgatgccggaaaaacaccttggcccgccggaagggcaggcacatgggcataggtaagcggaagggtacagccaatgcccgaatgccagagaaggtcacatggatgaggagaatgaggattttgcgccggctgctcagaagataccgtgaatctaagaagatcgatcgccacatgtatcacagcctgtacctgaaggtgaaggggaatgtgttcaaaaacaagcggattctcatggaacacatccacaagctgaaggcagacaaggcccgcaagaagctcctggctgaccaggctgaggcccgcaggtctaagaccaaggaagcacgcaagcgccgtgaagagcgcctccaggccaagaaggaggagatcatcaagactttatccaaggaggaagagaccaagaaataaaacctcccactttgtctgtacatactggcctctgtgattacatagatcagccattaaaataaaacaagccttaatg

SEQ ID NO: 312653 - DNA, 784 bp, Homo sapiens
ggcagataatgggaggagccgggcccgagcgagctctttcctttcgctgctgcggccgcagccatgagtatgctcaggcttcagaagaggctcgcctctagtgtcctccgctgtggcaagaagaaggtctggttagaccccaatgagaccaatgaaatcgccaatgccaactcccgtcagcagatccggaagctcatcaaagatgggctgatcatccgcaagcctgtgacggtccattcccgggctcgatgccggaaaaacaccttggcccgccggaagggcaggcacatgggcataggtaagcggaagggtacagccaatgcccgaatgccagagaaggtcacatggatgaggagaatgaggattttgcgccggctgctcagaagataccgtgaatctaagaagatcgatcgccacatgtatcacagcctgtacctgaaggtgaaggggaatgtgttcaaaaacaagcggattctcatggaacacatccacaagctgaaggcagacaaggcccgcaagaagctcctggctgaccaggctgaggcccgcaggtctaagaccaaggaagcacgcaagcgccgtgaagagcgcctccaggccaagaaggaggagatcatcaagactttatccaaggaggaagagaccaagaaataaaacctcccactttgtctgtacatactggcctctgtgattacatagatcagccattaaaataaaacaagccttaatgaaaaaaaaaaaacccgggccacagtcggggcgggcaagggttgaatggctggca

SEQ ID NO: 312654 - DNA, 718 bp, Homo sapiens
atccttaattaaattaatccccccccgcctttcgctgctgcggccgcagccatgagtatgctcaggcttcagaagaggctcgcctctagtgtcctccgctgtggcaagaagaaggtctggttagaccccaatgagaccaatgaaatcgccaatgccaactcccgtcagcagatccggaagctcatcaaagatgggctgatcatccgcaagcctgtgacggtccattcccgggctcgatgccggaaaaacaccttggcccgccggaagggcaggcacatgggcataggtaagcggaagggtacagccaatgcccgaatgccagagaaggtcacatggatgaggagaatgaggattttgcgccggctgctcagaagataccgtgaatctaagaagatcgatcgccacatgtatcacagcctgtacctgaaggtgaaggggaatgtgttcaaaaacaagcggattctcatggaacacatccacaagctgaaggcagacaaggcccgcaagaagctcctggctgaccaggctgaggcccgcaggtctaagaccaaggaagcacgcaagcgccgtgaagagcgcctccaggccaagaaggaggagatcatcaagactttatccaaggaggaagagaccaagaaataaaacctcccactttgtctgtacatactggcctctgtgattacatagatcagccattaaaataaaacaagccttaatg

SEQ ID NO: 312655 - DNA, 604 bp, Homo sapiens
ttcattggtctcattggggtctaaccagaccttcttcttgccaactcccgtcagcagatccggaagctcatcaaagatgggctgatcatccgcaagcctgtgacggtccattcccgggctcgatgccggaaaaacaccttggcccgccggaagggcaggcacatgggcataggtaagcggaagggtacagccaatgcccgaatgccagagaaggtcacatggatgaggagaatgaggattttgcgccggctgctcagaagataccgtgaatctaagaagatcgatcgccacatgtatcacagcctgtacctgaaggtgaaggggaatgtgttcaaaaacaagcggattctcatggaacacatccacaagctgaaggcagacaaggcccgcaagaagctcctggctgaccaggctgaggcccgcaggtctaagaccaaggaagcacgcaagcgccgtgaagagcgcctccaggccaagaaggaggagatcatcaagactttatccaaggaggaagagaccaagaaataaaacctcccactttgtctgtacatactggcctctgtgattacatagatcagccattaaaataaaacaagccttaatg

SEQ ID NO: 312656 - DNA, 866 bp, Homo sapiens
  misc_feature (855)..(855): n is a, c, g, or t
  misc_feature (859)..(859): n is a, c, g, or t
atccttaattaaattaatccccccccgcctttcgctgctgcggccgcagccatgagtatgctcaggcttcagaagaggctcgcctctagtgtcctccgctgtggcaagaagaaggtctggttagaccccaatgagaccaatgaaatcgccaatgccaactcccgtcagcagatccggaagctcatcaaagatgggctgatcatccgcaagcctgtgacggtccattcccgggctcgatgccggaaaaacaccttggcccgccggaagggcaggcacatgggcataggtaagcggaagggtacagccaatgcccgaatgccagagaaggtcacatggatgaggagaatgaggattttgcgccggctgctcagaagataccgtgaatctaagaagatcgatcgccacatgtatcacagcctgtacctgaaggtgaaggggaatgtgttcaaaaacaagcggattctcatggaacacatccacaagctgaaggcagacaaggcccgcaagaagctcctggctgaccaggctgaggcccgcaggtctaagaccaaggaagcacgcaagcgccgtgaagagcgcctccaggccaagaaggaggagatcatcaagactttatccaaggaggaagagaccaagaaataaaacctcccactttgtctgtacatactggcctctgtgattacatagatcagccattaaaataaaacaagccttaatgaaaaaaaaaaaaaaaaaaaaaaaaaaaaagcgggggttttttggggggggggaaaaggggtataaagggcgggatagtgtgttcggacccgtttttggaagggggaaatgggggcccaaagggggggataatgaagnggtngataaag

SEQ ID NO: 312657 - DNA, 1160 bp, Homo sapiens
aggatccttaataaattaatccccccccccccgctttcctttcgctgctgcggccgcagccatgagtatgctcaggcttcagaagaggctcgcctctagtgtcctccgctgtggcaagaagaaggtctggttagaccccaatgagaccaatgaaatcgccaatgccaactcccgtcagcagatccggaagctcatcaaagatgggctgatcatccgcaagcctgtgacggtccattcccgggctcgatgccggaaaaacaccttggcccgccggaagggcaggcacatgggcataggtaagcggaagggtacagccaatgcccgaatgccagagaaggtcacatggatgaggagaatgaggattttgcgccggctgctcagaagataccgtgaatctaagaagatcgatcgccacatgtatcacagcctgtacctgaaggtgaaggggaatgtgttcaaaaacaagcggattctcatggaacacatccacaagctgaaggcagacaaggcccgcaagaagctcctggctgaccaggctgaggcccgcaggtctaagaccaaggaagcacgcaagcgccgtgaagagcgcctccaggccaagaaggaggagatcatcaagactttatccaaggaggaagagaccaagaaataaaacctcccactttgtctgtacatactggcctctgtgattacatagatcagccattaaaataaaacaagccttaatgaaaaaaaaaaaaaaaaaaaaaattgcagttccacttgccccaattttattttagactggacaggtttaaccctgggggcccaattcggaataatttggccaaataccccttattggggcggctttaaaaataacggggcggggtttaaaaaagggcgttccgaaaaaaaccgggggttacccaaattaatggctttggaaaaaattcccattttgccaaagtgggaaataaccaatgggcccacaacgtgagcctttaccaaaaagggcgaactcttaaggggcattgggaatataaaggcttaaactttttttaaaaaccccgttaaattttttggaaacaaggctcttttttaaaccaaagggcaaaatcggggaaaatccttaaaaaccaataaaaagccccaaaacgttcagagggcgtcccttttaa

SEQ ID NO: 312658 - DNA, 391 bp, Homo sapiens
  misc_feature (14)..(14): n is a, c, g, or t
  misc_feature (18)..(18): n is a, c, g, or t
ctcggtaccccgcngatnaggccgattttgcgccggctgctcagaagataccgtgaatctaagaagatcgatcgccacatgtatcacagcctgtacctgaaggtgaaggggaatgtgttcaaaaacaagcggattctcatggaacacatccacaagctgaaggcagacaaggcccgcaagaagctcctggctgaccaggctgaggcccgcaggtctaagaccaaggaagcacgcaagcgccgtgaagagcgcctccaggccaagaaggaggagatcatcaagactttatccaaggaggaagagaccaagaaataaaacctcccactttgtctgtacatactggcctctgtgattacatagatcagccattaaaataaaacaagccttaatg

SEQ ID NO: 312659 - DNA, 373 bp, Homo sapiens
  misc_feature (5)..(5): n is a, c, g, or t
  misc_feature (15)..(15): n is a, c, g, or t
  misc_feature (19)..(19): n is a, c, g, or t
  misc_feature (37)..(38): n is a, c, g, or t
  misc_feature (47)..(47): n is a, c, g, or t
  misc_feature (53)..(53): n is a, c, g, or t
  misc_feature (62)..(62): n is a, c, g, or t
gcganctaccctagngganccttcgggctgcattaanncgttacgangatcgntcgccacangtatcacagcctgtacctgaaggtgaaggggaatgtgttcaaaaacaagcggattctcatggaacacatccacaagctgaaggcagacaaggcccgcaagaagctcctggctgaccaggctgaggcccgcaggtctaagaccaaggaagcacgcaagcgccgtgaagagcgcctccaggccaagaaggaggagatcatcaagactttatccaaggaggaagagaccaagaaataaaacctcccactttgtctgtacatactggcctctgtgattacatagatcagccattaaaataaaacaagccttaatg

SEQ ID NO: 312660 - DNA, 322 bp, Homo sapiens
  misc_feature (17)..(17): n is a, c, g, or t
  misc_feature (20)..(20): n is a, c, g, or t
  misc_feature (23)..(23): n is a, c, g, or t
gactactactactatanggntgntagaagacgacagaaggggaatgtgttcaaaaacaagcggattctcatggaacacatccacaagctgaaggcagacaaggcccgcaagaagctcctggctgaccaggctgaggcccgcaggtctaagaccaaggaagcacgcaagcgccgtgaagagcgcctccaggccaagaaggaggagatcatcaagactttatccaaggaggaagagaccaagaaataaaacctcccactttgtctgtacatactggcctctgtgattacatagatcagccattaaaataaaacaagccttaatg

SEQ ID NO: 312661 - DNA, 319 bp, Homo sapiens
gcggccgcctactactactactactgctcgaattcaagcttctaacgatgtacggggaggattctcatggaacacatccacaagctgaaggcagacaaggcccgcaagaagctcctggctgaccaggctgaggcccgcaggtctaagaccaaggaagcacgcaagcgccgtgaagagcgcctccaggccaagaaggaggagatcatcaagactttatccaaggaggaagagaccaagaaataaaacctcccactttgtctgtacatactggcctctgtgattacatagatcagccattaaaataaaacaagccttaatg

SEQ ID NO: 312662 - DNA, 923 bp, Homo sapiens
aaagtaccctgtgcccctcccctcttcaaggggtctacatggcaactgtgaggaggggagattcagtgtggtgggggactgagcagccatgagtatgctcaggcttcagaagaggctcgcctctagtgtcctccgctgtggcaagaagaaggtctggttagaccccaatgagaccaatgaaatcgccaatgccaactcccgtcagcagatccggaagctcatcaaagatgggctgatcatccgcaagcctgtgacggtccattcccgggctcgatgccggaaaaacaccttggcccgccggaagggcaggcacatgggcataggtaagcggaagggtacagccaatgcccgaatgccagagaaggtcacatggatgaggagaatgaggattttgcgccggctgctcagaagataccgtgaatctaagaagatcgatcgccacatgtatcacagcctgtacctgaaggtgaaggggaatgtgttcaaaaacaagcggattctcatggaacacatccacaagctgaaggcagacaaggcccgcaagaagctcctggctgaccaggctgaggcccgcaggtctaagaccaaggaagcacgcaagcgccgtgaagagcgcctccaggccaagaaggaggagatcatcaagactttatccaaggaggaagagaccgggtttgtctgagtaccatacgttggccctcttgtggatttaccatacgatccagcccattgaaacaattaaaagcaaggcgttaaaataaaggacaaaccatgcgaaatccccgaaggggcatctaaattttcggggggttgggggaaaaaagacaggcgtcactgaaaatgggcgcactctggcacaaggggggtcctgagccccagagtttttggcacacacaagggcggaaacctcgcgccggtctcca

SEQ ID NO: 312663 - DNA, 249 bp, Homo sapiens
atcgatcgagctcggcccatgttcagataggccgcaagaagctcctggctgaccaggctgaggcccgcaggtctaagaccaaggaagcacgcaagcgccgtgaagagcgcctccaggccaagaaggaggagatcatcaagactttatccaaggaggaagagaccaagaaataaaacctcccactttgtctgtacatactggcctctgtgattacatagatcagccattaaaataaaacaagccttaatg

SEQ ID NO: 312664 - DNA, 454 bp, Homo sapiens
  misc_feature (412)..(412): n is a, c, g, or t
gcggccgctactactactaaattcgcggccgcgtcgacggattttgcgccggctgctcagaagataccgtgaatctaagaagatcgatcgccacatgtatcacagcctgtacctgaaggtgaaggggaatgtgttcaaaaacaagcggattctcatggaacacatccacaagctgaaggcagacaaggcccgcaagaagctcctggctgaccaggctgaggcccgcaggtctaagaccaaggaagcacgcaagcgccgtgaagagcgcctccaggccaagaaggaggagatcatcaagactttatccaaggaggaagagaccaagaaataaaacctcccactttgtctgtacatactggcctctgtgattacatagatcagccattaaaataaaacaagccttaatgaaaanaaagtcgacgcggccgcgaatttagtagtagtaggcggccgc

SEQ ID NO: 312665 - DNA, 272 bp, Homo sapiens
  misc_feature (17)..(19): n is a, c, g, or t
  misc_feature (25)..(25): n is a, c, g, or t
  misc_feature (34)..(34): n is a, c, g, or t
tgccgcggtttctctannngactcncccgcagantaggcatgcgcagataaggcccgcaagaagctcctggctgaccaggctgaggcccgcaggtctaagaccaaggaagcacgcaagcgccgtgaagagcgcctccaggccaagaaggaggagatcatcaagactttatccaaggaggaagagaccaagaaataaaacctcccactttgtctgtacatactggcctctgtgattacatagatcagccattaaaataaaacaagccttaatg

SEQ ID NO: 312666 - DNA, 242 bp, Homo sapiens
taatcgagctcggcccgcttataggccgcagaagctcctggctgaccaggctgaggcccgcaggtctaagaccaaggaagcacgcaagcgccgtgaagagcgcctccaggccaagaaggaggagatcatcaagactttatccaaggaggaagagaccaagaaataaaacctcccactttgtctgtacatactggcctctgtgattacatagatcagccattaaaataaaacaagccttaatg

SEQ ID NO: 312667 - DNA, 391 bp, Homo sapiens
  misc_feature (21)..(21): n is a, c, g, or t
  misc_feature (37)..(37): n is a, c, g, or t
  misc_feature (64)..(64): n is a, c, g, or t
  misc_feature (99)..(99): n is a, c, g, or t
gggaatttttaaaagtcagantttcctaagccctctnagctgattggttatttccctatgaatncctacacatggttatccccccctacttgagataanctaaatataaaccagctacttgatgtaactgagaatttgtgtggatatttatttaaacaaatgtgtaatttggcccgcaagaagctcctggctgaccaggctgaggcccgcaggtctaagaccaaggaagcacgcaagcgccgtgaagagcgcctccaggccaagaaggaggagatcatcaagactttatccaaggaggaagagaccaagaaataaaacctcccactttgtctgtacatactggcctctgtgattacatagatcagccattaaaataaaacaagccttaatg

SEQ ID NO: 312668 - DNA, 226 bp, Homo sapiens
ctgaggtgactctagaggtccccggctgaccaggctgaggcccgcaggtctaagaccaaggaagcacgcaagcgccgtgaagagcgcctccaggccaagaaggaggagatcatcaagactttatccaaggaggaagagaccaagaaataaaacctcccactttgtctgtacatactggcctctgtgattacatagatcagccattaaaataaaacaagccttaatg

SEQ ID NO: 312669 - DNA, 294 bp, Homo sapiens
  misc_feature (17)..(19): n is a, c, g, or t
  misc_feature (25)..(25): n is a, c, g, or t
  misc_feature (34)..(34): n is a, c, g, or t
tgccgcggtttctctannngactcncccgcagantaggcatgcgcagataaggcccgcaagaagctcctggctgaccaggctgaggcccgcaggtctaagaccaaggaagcacgcaagcgccgtgaagagcgcctccaggccaagaaggaggagatcatcaagactttatccaaggaggaagagaccaagaaataaaacctcccactttgtctgtacatactggcctctgtgattacatagatcagccattaaaataaaacaagccttaatgctgcggggtacctctctgcttc

SEQ ID NO: 312670 - DNA, 618 bp, Homo sapiens
aaagtaccctgtgcccctcccctcttcaaggggtctacatggcaactgtgaggaggggagattcagtgtggtgggggactgagcagccatgagtatgctcaggcttcagaagaggctcgcctctagtgtcctccgctgtggcaagaagaaggtctggttagaccccaatgagaccaatgaaatcgccaatgccaactcccgtcagcagatccggaagctcatcaaagatgggctgatcatccgcaagcctgtgacggtccattcccgggctcgatgccggaaaaacaccttggcccgccggaagggcaggcacatgggcatagcggaagggtacagccaatgcccgaataccttcaactgagaaatgtcattgagcgactccaccctcagctactgacccgtgcccccggcacctcggtttctgctttcgaagactctgctgccatccgttctcccagtcccaagggtccacgatgtacaaagtcatttcggccagtaggtgtgcagacccctccccgccacgatcgtcgctgtgcttggtgtgtaggaccctaggctccccgcccaccctctgcctggtcgcgctcttcagtcccacgaggagcttgacacgtccta

SEQ ID NO: 312671 - DNA, 629 bp, Homo sapiens
ggcagataatgggaggagccgggcccgagcgagctctttcctttcgctgctgcggccgcagccatgagtatgctcaggcttcagaagaggctcgcctctagtgtcctccgctgtggcaagaagaaggtctggttagaccccaatgagaccaatgaaatcgccaatgccaactcccgtcagcagatccggaagctcatcaaagatgggctgatcatccgcaagcctgtgacggtccattcccgggctcgatgccggaaaaacaccttggcccgccggaagggcaggcacatgggcataggtaagcggaagggtacagccaatgcccgaatgccagagaaggtcacatggatgaggagaatgaggattttgcgccggctgctcagaagataccgtgaatctaagaagatcgatcgccacatgtatcacagcctgtacctgaaggtgaaggggaatgtgttcaaaaacaagcggattctcatggaacacatccacaagctgaaggcagacaaggcccgcaagaagctcctggctgaccaggctgaggcccgcaggtctaagaccaaggaagcacggcctctaaaaaagcgctcttaggccattaaaccttcccattttggtctggcaatacg

SEQ ID NO: 312672 - DNA, 903 bp, Homo sapiens
tgtctcatcttgagcctgtttcttactccttgatatttgatgtgttttctgcctgtgtgcaaatcagaaagttggtgctggtattggaattgagagtatccctggtaggaggtcacatttactaagtccctacctacactatgccaaggattctgtactttctagtttcagaatgatcgaaggaagctccttacaacgtgctgtgttgccttggtgcactgcctgttacacccacattctgcatgaagtgaatggggaattattgctgtatttgtgcttcctttaaaattgagtaaacgaaagaacttacgtagttgggatcatcatctggaaaatggaagtaatgctacttaaaatgaggttgtgaggattaaatgagttaaggaccctgacttgaaactatattcacttggtgtacttatacacagtgggcctgggtagtggcccgttcctaactcatcttctccacaggtaagcggaagggtacagccaatgcccgaatgccagagaaggtcacatggatgaggagaatgaggattttgcgccggctgctcagaagataccgtgaatctaagaagatcgatcgccacatgtatcacagcctgtacctgaaggtgaaggggaatgtgttcaaaaacaagcggattctcatggaacacatccacaagctgaaggcagacaaggcccgcaagaagctcctggctgaccaggctgaggcccgcaggtctaagaccaaggaagcacgcaagcgccgtgaagagcgcctccaggccaagaaggaggagatcatcaagactttatccaaggaggaagagaccaagaaataaaacctcccactttgtctgtacatactggcctctgtgattacatagatcagccattaaaataaaacaagccttaatg

SEQ ID NO: 312673 - DNA, 435 bp, Homo sapiens
tctgtcttaggaatacagctgttcccttagaggcacccactcctctgtcctgtacacacccactcttcctgtctcgtagggactagaggttagttgaagcaggagcctttggtgggcccagcaactcattccagaagctgactaggctcaaagggagaggtctggggatgtgcttctgtctccctagcatctcatctcttcccaaactgacccgtcttttctcttccctgaccagtgaccaggctgaggcccgcaggtctaagaccaaggaagcacgcaagcgccgtgaagagcgcctccaggccaagaaggaggagatcatcaagactttatccaaggaggaagagaccaagaaataaaacctcccactttgtctgtacatactggcctctgtgattacatagatcagccattaaaataaaacaagccttaatg

SEQ ID NO: 312674 - DNA, 144 bp, Homo sapiens
ctcccactttgtctgtacatactgggaggttttatttcttggtctcttcctccttggataagaaataaaacctcccactttgtctgtacatactggcctctgtgattacatagatcagccattaaaataaaacaagccttaatg

SEQ ID NO: 312675 - DNA, 130 bp, Homo sapiens
cctcagcctggtcagcccagagcttcttgcgggccttatctgcgcaagaaataaaacctcccactttgtctgtacatactggcctctgtgattacatagatcagccattaaaataaaacaagccttaatg

SEQ ID NO: 312676 - DNA, 199 bp, Homo sapiens
gcagaagggtgagtctagagtgatcccagcgcaggataggccaagcgccgtgaagagcgcctccaggccaagaaggaggagatcatcaagactttatccaaggaggaagagaccaagaaataaaacctcccactttgtctgtacatactggcctctgtgattacatagatcagccattaaaataaaacaagccttaatg

SEQ ID NO: 312677 - DNA, 240 bp, Homo sapiens
cttgttttattttaatggctgatctatgtaatcacaagagtgaccaggctgaggcccgcaggtctaagaccaaggaagcacgcaagcgccgtgaagagcgcctccaggccaagaaggaggagatcatcaagactttatccaaggaggaagagaccaagaaataaaacctcccactttgtctgtacatactggcctctgtgattacatagatcagccattaaaataaaacaagccttaatg

SEQ ID NO: 312678 - DNA, 334 bp, Homo sapiens
aacatgcgaacggactgatctatgtatcacagcctgtacctgaaggtgaaggggaatgtgttcaaaaacaagcggattctcatggaacacatccacaagctgaaggcagacaaggcccgcaagaagctcctggctgaccaggctgaggcccgcaggtctaagaccaaggaagcacgcaagcgccgtgaagagcgcctccaggccaagaaggaggagatcatcaagactttatccaaggaggaagagaccaagaaataaaacctcccactttgtctgtacatactggcctctgtgattacatagatcagccattaaaataaaacaagccttaatg

SEQ ID NO: 312679 - DNA, 516 bp, Homo sapiens
tagaggatccccgcagactatggcagttcatggttgcatggtgacttgatgacccatagtcaaatgttcggtctccaccaaagcctagtaacaggccaggagctgtctcaagaggaaagcagttatctgcagaagatggcaggccttgctccaaaatcctagaggcctccacggtgattcatctatgggggcctgccaaaggctccaaagggcatccttatctgcgtggcaaataaggcccgcaagaagctcctggctgaccaggctgaggcccgcaggtctaagaccaaggaagcacgcaagcgccgtgaagagcgcctccaggccaagaaggaggagatcatcaagactttatccaaggaggaagagaccggtcttgctattgttgcccagagctgaactcacaacacctgagtctcaagatgatcctccacacctacagcctctcaagatagctgggattacagcgctggtattacctcgaagtcacgttgctccattaaaacatcatatgcc

SEQ ID NO: 312680 - DNA, 314 bp, Homo sapiens
tgcgcagataaggcaggaaactttattgaataatcttttctttggggtagagaagttgagaaaccaaagcgtatccaggtcagagaggagagagatccgacaggaagagaagagcgcagataggccgcaagaagctcctggctgaccaggctgaggcccgcaggtctaagaccaaggaagcacgcaagcgccgtgaagagcgcctccaggccaagaaggcacaagggttttacaagcaagaacgatgccaaggaacaagcgaccacagagaatagaacgtctcacgttgtactgacatagaggcctgcgtgatt

SEQ ID NO: 312681 - DNA, 255 bp, Homo sapiens
tatctagaggatccgggtactgaggcggtatcgtctcatggtcatacctgtgccatgaccaggctgaggcccgcaggtctaagaccaaggaagcacgcaagcgccgtgaagagcgcctccaggccaagaaggaggagatcatcaagactttatccaaggaggaagagaccaagaaataaaacctcccactttgtctgtacatactggcctctgtgattacatagatcagccattaaaataaaacaagccttaatg

SEQ ID NO: 312682 - DNA, 263 bp, Homo sapiens
cagtgttgccctgggtgatctagaggatccctgcgcacataggggtagcagaagctccgtggctgaccaggctgaggcccgcaggtctaagaccaaggaagcacgcaagcgccgtgaagagcgcctccaggccaagaaggaggagatcatcaagactttatccaaggaggaagagaccaagaaataaaacctcccactttgtctgtacatactggcctctgtgattacatagatcagccattaaaataaaacaagccttaatg

SEQ ID NO: 312683 - DNA, 428 bp, Homo sapiens
tgaggttactctagaggaccccgcggataggcatgaaggaggagatcatcaagactttatccaaggaggaagagaccaagaaataaaacctcccacttgtgtctgtacatactggcctctgtgattacatagatcagccattaaaataaaacaagccttatctgcgcggattctcatggaacacatccacaagctgaaggcagacaaggcccgcaagaagctcctggctgaccaggctgaggcccgcaggtctaagaccaaggaagcacgcaagcgccgtgaagagcgcctccaggccaagaaggaggagatcatcaagactttatccaaggaggaagagaccaagaaataaaacctcccactttgtctgtacatactggcctctgtgattacatagatcagccattaaaataaaacaagccttaatg

SEQ ID NO: 312684 - DNA, 406 bp, Homo sapiens
gcagacgctacaactacaaaatacgcggccgtcagacggattttgcgccggctgctcagaagataccgtgaatctaagaagatcgatcgccacatgtatcacagcctgtacctgaaggtgaaggggaatgtgttcaaaaacaagcggattctcatggaacacatccacaagctgaaggcagacaaggcccgcaagaagctcctggctgaccaggctgaggcccgcaggtctaagaccaaggaagcacgcaagcgccgtgaagagcgcctccaggccaagaaggaggagatcatcaagactttatccaaggaggaagagaccaagaaataaaacctcccactttgtctgtacatactggcctctgtgattacatagatcagccattaaaataaaacaagccttaatg

SEQ ID NO: 312685 - DNA, 801 bp, Homo sapiens
ggcagataatgggaggagccgggcccgagcgagctctttcctttcgctgctgcggccgcagccatgagtatgctcaggcttcagaagaggctcgcctctagtgtcctccgctgtggcaagaagaaggtctggttagaccccaatgagaccaatgaaatcgccaatgccaactcccgtcagcagatccggaagctcatcaaagatgggctgatcatccgcaagcctgtgacggtccattcccgggctcgatgccggaaaaacaccttggcccgccggaagggcaggcacatgggcataggtaagcggaagggtacagccaatgcccgaatgccagagaaggtcacatggatgaggagaatgaggattttgcgccggctgctcagaagataccgtgaatctaagaagatcgatcgccacatgtatcacagcctgtacctgaaggtgaaggggaatgtgttcaaaaacaagcggattctcatggaacacatccacaagctgaaggcagacaaggcccgcaagaagctcctggctgaccaggctgaggcccgcaggtctaagaccaaggaagcacgcaagcgccgtgaagagcgcctccaggccaagaaggaggagatcatcaagactttatccaaggaggaagagaccaagaaataaaacctcccactttgtctgtacatactggcctctgtgattacatagatcagccattaaaataaaacaagccttaatgaaaaaaaaactggccgcggttacaacgtcggactgggaaccctggcgtcccactaatggcttgcccccttt

SEQ ID NO: 312686 - DNA, 832 bp, Homo sapiens
  misc_feature (153)..(153): n is a, c, g, or t
  misc_feature (202)..(202): n is a, c, g, or t
  misc_feature (214)..(214): n is a, c, g, or t
  misc_feature (246)..(246): n is a, c, g, or t
agcgggaggtcttgccttgcgctgctgctgccgctgccgtgatgtagtgctcatggttgtcagcatacgacggacgtcgctggtcataggtgtgcctcacgccatggtgggcaacagaagtaacggtctgggttagcaccccactacatgagnatcgcatgatgaccggtacgtcacactggcaacaagcttccgtctcggncacgcactccgngtaaccgctgcatccatacatgtactgcgtgnctgcattgcagtcacggcaacgccactgttgcacgggatcgcacttgccgcgtggactgcgcagtgcgcagcgatcacgagcatgcattgtgtccgcgccacgggaaaatggtgcggggcagcgctgcggacgagtaggtaacgcggaaggggtacagtgcgacgtcgcgacatgcccgagagggtcacattgcatcaggagaatgaggatcatgcgctcgtggtgctctggtaaccagtacctgtgaactctaaagaaagatcgatcggcacatgtatcacagcctgtacctgaaggtgaaggggaatgtgttcaaaaacaagcggattctcatggaacacatccacaagctgaaggcagacaaggcccgcaagaagctcctggctgaccaggctgaggcccgcaggtctaagaccaaggaagcacgcaagcgccgtgaagagcgcctccaggccaagaaggaggagatcatcaagactttatccaaggaggaagagaccaagaaataaaacctcccactttgtctgtacatactggcctctgtgattacatagatcagccattaaaataaaacaagccttaatg

SEQ ID NO: 312687 - DNA, 406 bp, Homo sapiens
  misc_feature (1)..(1): n is a, c, g, or t
natttcgccccctctctccctcctcccctcgccctcgggattttgcgccggctgctcagaagataccgtgaatctaagaagatcgatcgccacatgtatcacagcctgtacctgaaggtgaaggggaatgtgttcaaaaacaagcggattctcatggaacacatccacaagctgaaggcagacaaggcccgcaagaagctcctggctgaccaggctgaggcccgcaggtctaagaccaaggaagcacgcaagcgccgtgaagagcgcctccaggccaagaaggaggagatcatcaagactttatccaaggaggaagagaccaagaaataaaacctcccactttgtctgtacatactggcctctgtgattacatagatcagccattaaaataaaacaagccttaatg

SEQ ID NO: 312688 - DNA, 780 bp, Homo sapiens
tctaatcatgttttctgtgtgtgcatgagtatgctcaggcttcagaagaggctcgcctctagtgtcctccgctgtggcaagaagaaggtctggttagaccccaatgagaccaatgaaatcgccaatgccaactcccgtcagcagatccggaagctcatcaaagatgggctgatcatccgcaagcctgtgacggtccattcccgggctcgatgccggaaaaacaccttggcccgccggaagggcaggcacatgggcataggtaagcggaagggtacagccaatgcccgaatgccagagaaggtcacatggatgaggagaatgaggattttgcgccggctgctcagaagataccgtgaatctaagaagatcgatcgccacatgtatcacagcctgtacctgaaggtgaaggggaatgtgttcaaaaacaagcggattctcatggaacacatccacaagctgaaggcagacaaggcccgcaagaagctcctggctgaccaggctgaggcccgcaggtctaagaccaaggaagcacgcaagcgccgtgaagagcgcctccaggccaagaaggaggagatcatcaagactttatccaaggaggaagagaccaagaaataaaacctcccactttgtctgtacatactggcctctgtgattacatagatcagccattaaaataaaacaagccttaatgagccaacacaccaccaacaaccccccggcgcccattttccggtgcgcacaaacaccgctccacacacggcgcgccggcccacgcccgca

SEQ ID NO: 312689 - DNA, 631 bp, Homo sapiens
cagtcacgaggccgacgattcgtctggattatgacctggcccgcggactgacagaaatccaccaatgccaactcccgtcagcagatccggaagctcatcaaagatgggctgatcatccgcaagcctgtgacggtccattcccgggctcgatgccggaaaaacaccttggcccgccggaagggcaggcacatgggcataggtaagcggaagggtacagccaatgcccgaatgccagagaaggtcacatggatgaggagaatgaggattttgcgccggctgctcagaagataccgtgaatctaagaagatcgatcgccacatgtatcacagcctgtacctgaaggtgaaggggaatgtgttcaaaaacaagcggattctcatggaacacatccacaagctgaaggcagacaaggcccgcaagaagctcctggctgaccaggctgaggcccgcaggtctaagaccaaggaagcacgcaagcgccgtgaagagcgcctccaggccaagaaggaggagatcatcaagactttatccaaggaggaagagaccaagaaataaaacctcccactttgtctgtacatactggcctctgtgattacatagatcagccattaaaataaaacaagccttaatg

SEQ ID NO: 312690 - DNA, 226 bp, Homo sapiens
tgcgcagattaggcccgcagactggctgaccaggctgaggcccgcaggtctaagaccaaggaagcacgcaagcgccgtgaagagcgcctccaggccaagaaggaggagatcatcaagactttatccaaggaggaagagaccaagaaataaaacctcccactttgtctgtacatactggcctctgtgattacatagatcagccattaaaataaaacaagccttaatg

SEQ ID NO: 312691 - DNA, 191 bp, Homo sapiens
tcggtctacttgtttctcggctctacttgtatcacagcctgtacctgaaggtgaaggggaatgtgttcaaaaacaagcggattctcatggaacacatccacaagctgaaggcagacaaggtagagccgcagagacacaggtagagccgcagagacaagggtagagccagagagacaaggtagcagccagag

SEQ ID NO: 312692 - DNA, 735 bp, Homo sapiens
actcccgacccggggaggtagtgacgaaaaaaaaaaaaaaaaagaaaaaaaaaaaagcggccgcagccatgagtatgctcaggcttcagaagaggctcgcctctagtgtcctccgctgtggcaagaagaaggtctggttagaccccaatgagaccaatgaaatcgccaatgccaactcccgtcagcagatccggaagctcatcaaagatgggctgatcatccgcaagcctgtgacggtccattcccgggctcgatgccggaaaaacaccttggcccgccggaagggcaggcacatgggcataggtaagcggaagggtacagccaatgcccgaatgccagagaaggtcacatggatgaggagaatgaggattttgcgccggctgctcagaagataccgtgaatctaagaagatcgatcgccacatgtatcacagcctgtacctgaaggtgaaggggaatgtgttcaaaaacaagcggattctcatggaacacatccacaagctgaaggcagacaaggcccgcaagaagctcctggctgaccaggctgaggcccgcaggtctaagaccaaggaagcacgcaagcgccgtgaagagcgcctccaggccaagaaggaggagatcatcaagactttatccaaggaggaagagaccaagaaataaaacctcccactttgtctgtacatactggcctctgtgattacatagatcagccattaaaataaaacaagccttaatg

SEQ ID NO: 312693 - DNA, 711 bp, Homo sapiens
  misc_feature (12)..(12): n is a, c, g, or t
tccccccattcnccttgaagcctttcgctgctgcggccgcagccatgagtatgctcaggcttcagaagaggctcgcctctagtgtcctccgctgtggcaagaagaaggtctggttagaccccaatgagaccaatgaaatcgccaatgccaactcccgtcagcagatccggaagctcatcaaagatgggctgatcatccgcaagcctgtgacggtccattcccgggctcgatgccggaaaaacaccttggcccgccggaagggcaggcacatgggcataggtaagcggaagggtacagccaatgcccgaatgccagagaaggtcacatggatgaggagaatgaggattttgcgccggctgctcagaagataccgtgaatctaagaagatcgatcgccacatgtatcacagcctgtacctgaaggtgaaggggaatgtgttcaaaaacaagcggattctcatggaacacatccacaagctgaaggcagacaaggcccgcaagaagctcctggctgaccaggctgaggcccgcaggtctaagaccaaggaagcacgcaagcgccgtgaagagcgcctccaggccaagaaggaggagatcatcaagactttatccaaggaggaagagaccaagaaataaaacctcccactttgtctgtacatactggcctctgtgattacatagatcagccattaaaataaaacaagccttaatg

SEQ ID NO: 312694 - DNA, 842 bp, Homo sapiens
  misc_feature (1)..(2): n is a, c, g, or t
  misc_feature (20)..(20): n is a, c, g, or t
  misc_feature (37)..(37): n is a, c, g, or t
nnaatccagtgaatgaagcntcttatgatggcaaatncagcttcctattgataggacatagtgaaagtgggtacaacgtagtacgtgtcgtgtagtacgatatctagtgatgagtttgctaatacaatgccagtcaggccacctacggtgaagacacttgacccactcgagtgggtcagttatgctcaggcttcagaagaggctcgcctctagtgtcctccgctgtggcaagaagaaggtctggttagaccccaatgagaccaatgaaatcgccaatgccaactcccgtcagcagatccggaagctcatcaaagatgggctgatcatccgcaagcctgtgacggtccattcccgggctcgatgccggaaaaacaccttggcccgccggaagggcaggcacatgggcataggtaagcggaagggtacagccaatgcccgaatgccagagaaggtcacatggatgaggagaatgaggattttgcgccggctgctcagaagataccgtgaatctaagaagatcgatcgccacatgtatcacagcctgtacctgaaggtgaaggggaatgtgttcaaaaacaagcggattctcatggaacacatccacaagctgaaggcagacaaggcccgcaagaagctcctggctgaccaggctgaggcccgcaggtctaagaccaaggaagcacgcaagcgccgtgaagagcgcctccaggccaagaaggaggagatcatcaagactttatccaaggaggaagagaccaagaaataaaacctcccactttgtctgtacatactggcctctgtgattacatagatcagccattaaaataaaacaagccttaatg

SEQ ID NO: 312695 - DNA, 581 bp, Homo sapiens
  misc_feature (8)..(8): n is a, c, g, or t
  misc_feature (11)..(12): n is a, c, g, or t
  misc_feature (19)..(19): n is a, c, g, or t
ccgctacnacnncaaggtnatctcccgtcagcagatccggaagctcatcaaagatgggctgatcatccgcaagcctgtgacggtccattcccgggctcgatgccggaaaaacaccttggcccgccggaagggcaggcacatgggcataggtaagcggaagggtacagccaatgcccgaatgccagagaaggtcacatggatgaggagaatgaggattttgcgccggctgctcagaagataccgtgaatctaagaagatcgatcgccacatgtatcacagcctgtacctgaaggtgaaggggaatgtgttcaaaaacaagcggattctcatggaacacatccacaagctgaaggcagacaaggcccgcaagaagctcctggctgaccaggctgaggcccgcaggtctaagaccaaggaagcacgcaagcgccgtgaagagcgcctccaggccaagaaggaggagatcatcaagactttatccaaggaggaagagaccaagaaataaaacctcccactttgtctgtacatactggcctctgtgattacatagatcagccattaaaataaaacaagccttaatg

SEQ ID NO: 312696 - DNA, 662 bp, Homo sapiens
ttcattggtctcattggggtctaaccagaccttcttcttgccaactcccgaggacactagaggcgagcctcttctgaagcctgagcatactcatggctgcggccgcagtcagcagatccggaagctcatcaaagatgggctgatcatccgcaagcctgtgacggtccattcccgggctcgatgccggaaaaacaccttggcccgccggaagggcaggcacatgggcataggtaagcggaagggtacagccaatgcccgaatgccagagaaggtcacatggatgaggagaatgaggattttgcgccggctgctcagaagataccgtgaatctaagaagatcgatcgccacatgtatcacagcctgtacctgaaggtgaaggggaatgtgttcaaaaacaagcggattctcatggaacacatccacaagctgaaggcagacaaggcccgcaagaagctcctggctgaccaggctgaggcccgcaggtctaagaccaaggaagcacgcaagcgccgtgaagagcgcctccaggccaagaaggaggagatcatcaagactttatccaaggaggaagagaccaagaaataaaacctcccactttgtctgtacatactggcctctgtgattacatagatcagccattaaaataaaacaagccttaatg

SEQ ID NO: 312697 - DNA, 575 bp, Homo sapiens
  misc_feature (19)..(19): n is a, c, g, or t
caaagaattcggcacgagncgtcagcagatccggaagctcatcaaagatgggctgatcatccgcaagcctgtgacggtccattcccgggctcgatgccggaaaaacaccttggcccgccggaagggcaggcacatgggcataggtaagcggaagggtacagccaatgcccgaatgccagagaaggtcacatggatgaggagaatgaggattttgcgccggctgctcagaagataccgtgaatctaagaagatcgatcgccacatgtatcacagcctgtacctgaaggtgaaggggaatgtgttcaaaaacaagcggattctcatggaacacatccacaagctgaaggcagacaaggcccgcaagaagctcctggctgaccaggctgaggcccgcaggtctaagaccaaggaagcacgcaagcgccgtgaagagcgcctccaggccaagaaggaggagatcatcaagactttatccaaggaggaagagaccaagaaataaaacctcccactttgtctgtacatactggcctctgtgattacatagatcagccattaaaataaaacaagccttaatg

SEQ ID NO: 312698 - DNA, 498 bp, Homo sapiens
atgtcgaggtgactctaccaggatcttctgtgctttgggacggcggaagggcaggcacatgggcatgtaagcggaagggtacagccaatgcccgaatgccagagaaggtcacatggatgaggagaatgaggattttgcgccggctgctcagaagataccgtgaatctaagaagatcgatcgccacatgtatcacagcctgtacctgaaggtgaaggggaatgtgttcaaaaacaagcggattctcatggaacacatccacaagctgaaggcagacaaggcccgcaagaagctcctggctgaccaggctgaggcccgcaggtctaagaccaaggaagcacgcaagcgccgtgaagagcgcctccaggccaagaaggaggagatcatcaagactttatccaaggaggaagagaccaagaaataaaacctcccactttgtctgtacatactggcctctgtgattacatagatcagccattaaaataaaacaagccttaatg

SEQ ID NO: 312699 - DNA, 976 bp, Homo sapiens
tggattcccactcatcttgactcagagtgcttttagggctgcttcctcctgaaggaacatccttctgtgagccttgcttttcctcctgtaggctggcagaggacagtggagcagccaacacacaaaactaccgtttgtgcatggctaaagaccggggtgattttatagcatcctgggcatttcacatccatgaagtaggaattggggctctgcaccaggcgtttcttcttgtgtttcctgttctcctcttctggagagggatgaaggagatcctttgccagaggcatgttctcgtgtgcgtaggtcgctcgtgccgaattcggcacgagtttcgctgctgcggccgcagccatgagtatgctcaggcttcagaagaggctcgcctctagtgtcctccgctgtggcaagaagaaggtctggttagaccccaatgagaccaatgaaatcgccaatgccaactcccgtcagcagatccggaagctcatcaaagatgggctgatcatccgcaagcctgtgacggtccattcccgggctcgatgccggagtaagcggaagggtacagccaatgcccgaatgccagagaaggtcacatggatgaggagaatgaggattttgcgccggctgctcagaagataccgtgaatctaagaagatcgatcgccacatgtatcacagcctgtacctgaaggtgaaggggaatgtgttcaaaaacaagcggattctcatggaacacatccacaagctgaaggcagacaaggcccgcaagaagctcctggctgaccaggctgaggcccgcaggtctaagaccaaggaagcacgcaagcgccgtgaagagcgcctccaggccaagaaggaggagatcatcaagactttatccaaggaggaagagaccaagaaataaaacctcccactttgtctgtacatactggcctctgtgattacatagatcagccattaaaataaaacaagccttaatg

SEQ ID NO: 312700 - DNA, 476 bp, Homo sapiens
atcagctcggtccggcttctggaccttctcaggcacatgggcatgtaagcggaagggtacagccaatgcccgaatgccagagaaggtcacatggatgaggagaatgaggattttgcgccggctgctcagaagataccgtgaatctaagaagatcgatcgccacatgtatcacagcctgtacctgaaggtgaaggggaatgtgttcaaaaacaagcggattctcatggaacacatccacaagctgaaggcagacaaggcccgcaagaagctcctggctgaccaggctgaggcccgcaggtctaagaccaaggaagcacgcaagcgccgtgaagagcgcctccaggccaagaaggaggagatcatcaagactttatccaaggaggaagagaccaagaaataaaacctcccactttgtctgtacatactggcctctgtgattacatagatcagccattaaaataaaacaagccttaatg

SEQ ID NO: 312701 - DNA, 999 bp, Homo sapiens
atccttaattaaattaatccccccccgcctttcgctgctgcggccgcagccatgagtatgctcaggcttcagaagaggctcgcctctagtgtcctccgctgtggcaagaagaaggtctggttagaccccaatgagaccaatgaaatcgccaatgccaactcccgtcagcagatccggaagctcatcaaagatgggctgatcatccgcaagcctgtgacggtccattcccgggctcgatgccggaaaaacaccttggcccgccggaagggcaggcacatgggcataggtaagcggaagggtacagccaatgcccgaatgccagagaaggtcacatggatgaggagaatgaggattttgcgccggctgctcagaagataccgtgaatctaagaagatcgatcgccacatgtatcacagcctgtacctgaaggtgaaggggaatgtgttcaaaaacaagcggattctcatggaacacatccacaagctgaaggcagacaaggcccgcaagaagctcctggctgaccaggctgaggcccgcaggtctaagaccaaggaagcacgcaagcgccgtgaagagcgcctccaggccaagaaggaggagatcatcaagactttatccaaggaggaagagaccaagaaataaaacctcccactttgtctgtacatactggcctctgtgattacatagatcagccattaaaataaaacaagccttaatgaaaaaaaaaaaaaaaaaaaaaaaaaaaaaaaaaaaaaaaaaaaaaaacaaaaaaaaaaaaaaaaaaaagcatttcggccgcctgggcccaatggattttagacccaagaaaatttatgcattccacctaatttaaaactaatttggccaatttgccctaaagggagtcgtattaaaattaactggccgaaatctaaaacgtcggaattggaaaaaccctggctgtaccaaacttaatagccttgtagaaataccctttttgccagttggcgtaatacctga

SEQ ID NO: 312702 - DNA, 782 bp, Homo sapiens
aggatccttaataaattaatccccccccccccgctttcctttcgctgctgcggccgcagccatgagtatgctcaggcttcagaagaggctcgcctctagtgtcctccgctgtggcaagaagaaggtctggttagaccccaatgagaccaatgaaatcgccaatgccaactcccgtcagcagatccggaagctcatcaaagatgggctgatcatccgcaagcctgtgacggtccattcccgggctcgatgccggaaaaacaccttggcccgccggaagggcaggcacatgggcataggtaagcggaagggtacagccaatgcccgaatgccagagaaggtcacatggatgaggagaatgaggattttgcgccggctgctcagaagataccgtgaatctaagaagatcgatcgccacatgtatcacagcctgtacctgaaggtgaaggggaatgtgttcaaaaacaagcggattctcatggaacacatccacaagctgaaggcagacaaggcccgcaagaagctcctggctgaccaggctgaggcccgcaggtctaagaccaaggaagcacgcaagcgccgtgaagagcgcctccaggccaagaaggaggagatcatcaagactttatccaaggaggaagagaccaagaaataaaacctcccactttgtctgtacatactggcctctgtgattacatagatcagccattaaaataaaacaagccttaatgaaaaaaaaaaaacccgggccacagtcggggcgggcaagggttgaatggctggca

SEQ ID NO: 312703 - DNA, 1249 bp, Homo sapiens
  misc_feature (751)..(751): n is a, c, g, or t
aggatccttaataaattaatccccccccccccgctttcctttcgctgctgcggccgcagccatgagtatgctcaggcttcagaagaggctcgcctctagtgtcctccgctgtggcaagaagaaggtctggttagaccccaatgagaccaatgaaatcgccaatgccaactcccgtcagcagatccggaagctcatcaaagatgggctgatcatccgcaagcctgtgacggtccattcccgggctcgatgccggaaaaacaccttggcccgccggaagggcaggcacatgggcataggtaagcggaagggtacagccaatgcccgaatgccagagaaggtcacatggatgaggagaatgaggattttgcgccggctgctcagaagataccgtgaatctaagaagatcgatcgccacatgtatcacagcctgtacctgaaggtgaaggggaatgtgttcaaaaacaagcggattctcatggaacacatccacaagctgaaggcagacaaggcccgcaagaagctcctggctgaccaggctgaggcccgcaggtctaagaccaaggaagcacgcaagcgccgtgaagagcgcctccaggccaagaaggaggagatcatcaagactttatccaaggaggaagagaccaagaaataaaacctcccactttgtctgtacatactggcctctgtgattacatagatcagccattaaaataaaacaagccttaatgaaaaaaaaaaaaaaaaaaaaaanaaaaaaaaaaaaaaaaaaaaaaaaaaaaaaaaaaaaaaaaaaaaaaaaaaaaaaaaaaaaaaaaaaaaaaaaaaaaaaaaaaaaaaaattgcagttccacttgccccaattttattttagactggacaggtttaaccctgggggcccaattcggaataatttggccaaataccccttattggggcggctttaaaaataacggggcggggtttaaaaaagggcgttccgaaaaaaaccgggggttacccaaattaatggctttggaaaaaattcccattttgccaaagtgggaaataaccaatgggcccacaacgtgagcctttaccaaaaagggcgaactcttaaggggcattgggaatataaaggcttaaactttttttaaaaaccccgttaaattttttggaaacaaggctcttttttaaaccaaagggcaaaatcggggaaaatccttaaaaaccaataaaaagccccaaaacgttcagagggcgtcccttttaa

SEQ ID NO: 312704 - DNA, 1383 bp, Homo sapiens
  misc_feature (26)..(26): n is a, c, g, or t
ctagtagaggctgggtttgaatcggncgaggcgcagccatgagtatgctcaggcttcagaagaggctcgcctctagtgtcctccgctgtggcaagaagaaggtctggttagaccccaatgagaccaatgaaatcgccaatgccaactcccgtcagcagatccggaagctcatcaaagatgggctgatcatccgcaagcctgtgacggtccattcccgggctcgatgccggaaaaacaccttggcccgccggaagggcaggcacatgggcataggtaagcggaagggtacagccaatgcccgaatgccagagaaggtcacatggatgaggagaatgaggattttgcgccggctgctcagaagataccgtgaatctaagaagatcgatcgccacatgtatcacagcctgtacctgaaggtgaaggggaatgtgttcaaaaacaagcggattctcatggaacacatccacaagctgaaggcagacaaggcccgcaagaagctcctggctgaccaggctgaggcccgcaggtctaagaccaaggaagcacgcaagcgccgtgaagagcgcctccaggccaagaaggaggagatcatcaagactttatccaaggaggaagagaccaagaaataaaacctcccactttgtctgtacatactggcctctgtgattacatagatcagccattaaaataaaacaagccttaatgaaaaaaaaaaaaaaaaaacaaaaaaaaaaaaaaaaaaaaggcgggggttttttggggggggggaaaaaaggggtgggaaaagagagggggccaggggggaagggttcgggagaccccacagtctttttgtgttcgcacagggggggagcaaatctcttggcgacggcgcccccccaataaggaagaggagagcgaagataattaactatctaagagatagaccgccgagggagaatccaccgttgttttataatgagctccgtgcgcgagtaacgagccacatacaaccaagctagcaagcagcagacgcaacagacagccacgacaaaccaacagaaccaagaagcgacacacaactgcacaaggcaaaaccaaatagtaatgcaagaaagcaaccagacgcacacagaggaggcaccaacaggaacacacatacagatcggcacgaaccaaaacctcgaggcaaatcaatccgacacccaaacccacacgaatgcgtagacaaaacacgcacacaagagcaggaacaaacagaggacgcgacaacagacgataggaagaagggaaggcagcaagaaagcagcaacagcaaccaaccggaaccagacgaaagagcagaagaaagaagagcgattgacgacacgatgacgccagaaaacacacgcaacagagagcgag

SEQ ID NO: 312705 - DNA, 1029 bp, Homo sapiens
  misc_feature (26)..(26): n is a, c, g, or t
  misc_feature (757)..(757): n is a, c, g, or t
ctagtagaggctgggtttgaatcggncgaggcgcagccatgagtatgctcaggcttcagaagaggctcgcctctagtgtcctccgctgtggcaagaagaaggtctggttagaccccaatgagaccaatgaaatcgccaatgccaactcccgtcagcagatccggaagctcatcaaagatgggctgatcatccgcaagcctgtgacggtccattcccgggctcgatgccggaaaaacaccttggcccgccggaagggcaggcacatgggcataggtaagcggaagggtacagccaatgcccgaatgccagagaaggtcacatggatgaggagaatgaggattttgcgccggctgctcagaagataccgtgaatctaagaagatcgatcgccacatgtatcacagcctgtacctgaaggtgaaggggaatgtgttcaaaaacaagcggattctcatggaacacatccacaagctgaaggcagacaaggcccgcaagaagctcctggctgaccaggctgaggcccgcaggtctaagaccaaggaagcacgcaagcgccgtgaagagcgcctccaggccaagaaggaggagatcatcaagactttatccaaggaggaagagaccaagaaataaaacctcccactttgtctgtacatactggcctctgtgattacatagatcagccattaaaataaaacaagccttaatgaaaaaaaaaaaaaaaaaacaaaaaaaaaaaaaaaaaaaaggggggggggggncaaaaatttcccccgggggggcccaaagttaacggggaacccgaggtttcgtgtgggaccaaagggggccccaatagggagagggaatataaacgaaggagagggggggattacacagggcgggcgtggagaaacggacgggggatctgggagaggagcctacctgtgggggcgacctattgtgccacacccacagagttacgccgaaggaacataatcttcgggtattgggtcacacgcgaatgttgggaaagtcgtaggatagtaaatag

SEQ ID NO: 312706 - DNA, 767 bp, Homo sapiens
aggatccttaataaattaatccccccccccccgctttcctttcgctgctgcggccgcagccatgagtatgctcaggcttcagaagaggctcgcctctagtgtcctccgctgtggcaagaagaaggtctggttagaccccaatgagaccaatgaaatcgccaatgccaactcccgtcagcagatccggaagctcatcaaagatgggctgatcatccgcaagcctgtgacggtccattcccgggctcgatgccggaaaaacaccttggcccgccggaagggcaggcacatgggcataggtaagcggaagggtacagccaatgcccgaatgccagagaaggtcacatggatgaggagaatgaggattttgcgccggctgctcagaagataccgtgaatctaagaagatcgatcgccacatgtatcacagcctgtacctgaaggtgaaggggaatgtgttcaaaaacaagcggattctcatggaacacatccacaagctgaaggcagacaaggcccgcaagaagctcctggctgaccaggctgaggcccgcaggtctaagaccaaggaagcacgcaagcgccgtgaagagcgcctccaggccaagaaggaggagatcatcaagactttatccaaggaggaagagaccaagaaataaaacctcccactttgtctgtacatactggcctctgtgattacatagatcagccattaaaataaaacaagccttaatgcaagcctatctgcgcatggggatccttagatcgacctca

SEQ ID NO: 312707 - DNA, 1279 bp, Homo sapiens
aggatccttaataaattaatccccccccccccgctttcctttcgctgctgcggccgcagccatgagtatgctcaggcttcagaagaggctcgcctctagtgtcctccgctgtggcaagaagaaggtctggttagaccccaatgagaccaatgaaatcgccaatgccaactcccgtcagcagatccggaagctcatcaaagatgggctgatcatccgcaagcctgtgacggtccattcccgggctcgatgccggaaaaacaccttggcccgccggaagggcaggcacatgggcataggtaagcggaagggtacagccaatgcccgaatgccagagaaggtcacatggatgaggagaatgaggattttgcgccggctgctcagaagataccgtgaatctaagaagatcgatcgccacatgtatcacagcctgtacctgaaggtgaaggggaatgtgttcaaaaacaagcggattctcatggaacacatccacaagctgaaggcagacaaggcccgcaagaagctcctggctgaccaggctgaggcccgcaggtctaagaccaaggaagcacgcaagcgccgtgaagagcgcctccaggccaagaaggaggagatcatcaagactttatccaaggaggaagagaccaagaaataaaacctcccactttgtctgtacatactggcctctgtgattacatagatcagccattaaaataaaacaagccttaatgaaaacaacacaaacaaaaaaacaacacaacaccaaactcggggcaactaacaagcgggcgagcggcggcacacacgcgcgcaacaaaaaagggcaccggggaccaactccaaggaaccacagaccacaagctcccgtctgcacaacccgcgcccaacaacaagacgcacaccaacaaagagagaacacaaaaaaccccacaccccaccaggaacaaccgagaaaaacgacacaccgacaccgacacaccccacagtacaccccaccaccaaaagaagcaacaaaccagcagcaaaacaacaaaaagaatcaataaaacagataaacaacaaaaaacataaagatccacacaccaaatatacacaacaaaacagacacgacccacgttaaaacaaaaaccataataacgcaccaaactcagttattcaagaatccagttccaaacatccaaacacaacaccagtgacaatcaatctaatcaaacaaaacaaaacgcgactaaacacacaaaagatagaagaactacaaagagaacgaccaccaaaaaaataa

SEQ ID NO: 312708 - DNA, 1115 bp, Homo sapiens
aggatccttaataaattaatccccccccccccgctttcctttcgctgctgcggccgcagccatgagtatgctcaggcttcagaagaggctcgcctctagtgtcctccgctgtggcaagaagaaggtctggttagaccccaatgagaccaatgaaatcgccaatgccaactcccgtcagcagatccggaagctcatcaaagatgggctgatcatccgcaagcctgtgacggtccattcccgggctcgatgccggaaaaacaccttggcccgccggaagggcaggcacatgggcataggtaagcggaagggtacagccaatgcccgaatgccagagaaggtcacatggatgaggagaatgaggattttgcgccggctgctcagaagataccgtgaatctaagaagatcgatcgccacatgtatcacagcctgtacctgaaggtgaaggggaatgtgttcaaaaacaagcggattctcatggaacacatccacaagctgaaggcagacaaggcccgcaagaagctcctggctgaccaggctgaggcccgcaggtctaagaccaaggaagcacgcaagcgccgtgaagagcgcctccaggccaagaaggaggagatcatcaagactttatccaaggaggaagagaccaagaaataaaacctcccactttgtctgtacatactggcctctgtgattacatagatcagccattaaaataaaacaagccttaatgaaaaaaaaaaaaaaaaaaaaaaaaaaaaaaaaaaaaaaaaaaaaaaaaaaaaaaaacaaaaaaaaaaaaaaaaaaaagggggctttgggggggggggaaaaagggaaagagagagcagcagagcggtgtaataaaacgtagggtcatagaacaacccccttttttgagcaagaagggggcatgataattcggggcgggccccaaaataggggggcgcagtataaaatttctaagaaacgagcgggtctcccccttgtgatttatcgcggctcaaagaaatcccctcaagcaacaccgtactcaccaagacgactcaccgtcgataacgcgctacactacacacatacaagcaatagaccaaaccgccaccacaacaacacaccccgt

SEQ ID NO: 312709 - DNA, 1054 bp, Homo sapiens
  misc_feature (782)..(782): n is a, c, g, or t
aggatccttaataaattaatccccccccccccgctttcctttcgctgctgcggccgcagccatgagtatgctcaggcttcagaagaggctcgcctctagtgtcctccgctgtggcaagaagaaggtctggttagaccccaatgagaccaatgaaatcgccaatgccaactcccgtcagcagatccggaagctcatcaaagatgggctgatcatccgcaagcctgtgacggtccattcccgggctcgatgccggaaaaacaccttggcccgccggaagggcaggcacatgggcataggtaagcggaagggtacagccaatgcccgaatgccagagaaggtcacatggatgaggagaatgaggattttgcgccggctgctcagaagataccgtgaatctaagaagatcgatcgccacatgtatcacagcctgtacctgaaggtgaaggggaatgtgttcaaaaacaagcggattctcatggaacacatccacaagctgaaggcagacaaggcccgcaagaagctcctggctgaccaggctgaggcccgcaggtctaagaccaaggaagcacgcaagcgccgtgaagagcgcctccaggccaagaaggaggagatcatcaagactttatccaaggaggaagagaccaagaaataaaacctcccactttgtctgtacatactggcctctgtgattacatagatcagccattaaaataaaacaagccttaatgaaaaaaaaaaaaaaaaaaacaaaaaaaaaaaaaaaaaaaaaagggggggggggncaaaaatttcccccgggggggcccaaagttaacggggaacccgaggtttcgtgtgggaccaaagggggccccaatagggagagggaatataaacgaaggagagggggggattacacagggcgggcgtggagaaacggacgggggatctgggagaggagcctacctgtgggggcgacctattgtgccacacccacagagttacgccgaaggaacataatcttcgggtattgggtcacacgcgaatgttgggaaagtcgtaggatagtaaatag

SEQ ID NO: 312710 - DNA, 355 bp, Homo sapiens
  misc_feature (14)..(14): n is a, c, g, or t
  misc_feature (18)..(18): n is a, c, g, or t
ctcggtaccccgcngatnaggcctaagaagatcgatcgccacatgtatcacagcctgtacctgaaggtgaaggggaatgtgttcaaaaacaagcggattctcatggaacacatccacaagctgaaggcagacaaggcccgcaagaagctcctggctgaccaggctgaggcccgcaggtctaagaccaaggaagcacgcaagcgccgtgaagagcgcctccaggccaagaaggaggagatcatcaagactttatccaaggaggaagagaccaagaaataaaacctcccactttgtctgtacatactggcctctgtgattacatagatcagccattaaaataaaacaagccttaatg

SEQ ID NO: 312711 - DNA, 1142 bp, Homo sapiens
  misc_feature (644)..(644): n is a, c, g, or t
agagagactcgtgccgaattcggcagagccccaatgagaccaatgaaatcgccaatgccaactcccgtcagcagatccggaagctcatcaaagatgggctgatcatccgcaagcctgtgacggtccattcccgggctcgatgccggaaaaacaccttggcccgccggaagggcaggcacatgggcataggtaagcggaagggtacagccaatgcccgaatgccagagaaggtcacatggatgaggagaatgaggattttgcgccggctgctcagaagataccgtgaatctaagaagatcgatcgccacatgtatcacagcctgtacctgaaggtgaaggggaatgtgttcaaaaacaagcggattctcatggaacacatccacaagctgaaggcagacaaggcccgcaagaagctcctggctgaccaggctgaggcccgcaggtctaagaccaaggaagcacgcaagcgccgtgaagagcgcctccaggccaagaaggaggagatcatcaagactttatccaaggaggaagagaccaagaaataaaacctcccactttgtctgtacatactggcctctgtgattacatagatcagccattaaaataaaacaagccttaatgaaaaaaaaaaaaaaaaaaaaaanaaaaaaaaaaaaaaaaaaaaaaaaaaaaaaaaaaaaaaaaaaaaaaaaaaaaaaaaaaaaaaaaaaaaaaaaaaaaaaaaaaaaaaaattgcagttccacttgccccaattttattttagactggacaggtttaaccctgggggcccaattcggaataatttggccaaataccccttattggggcggctttaaaaataacggggcggggtttaaaaaagggcgttccgaaaaaaaccgggggttacccaaattaatggctttggaaaaaattcccattttgccaaagtgggaaataaccaatgggcccacaacgtgagcctttaccaaaaagggcgaactcttaaggggcattgggaatataaaggcttaaactttttttaaaaaccccgttaaattttttggaaacaaggctcttttttaaaccaaagggcaaaatcggggaaaatccttaaaaaccaataaaaagccccaaaacgttcagagggcgtcccttttaa

SEQ ID NO: 312712 - DNA, 928 bp, Homo sapiens
  misc_feature (656)..(656): n is a, c, g, or t
ttcattggtctcattggggtctaaccagaccttcttcttgccaactcccgtcagcagatccggaagctcatcaaagatgggctgatcatccgcaagcctgtgacggtccattcccgggctcgatgccggaaaaacaccttggcccgccggaagggcaggcacatgggcataggtaagcggaagggtacagccaatgcccgaatgccagagaaggtcacatggatgaggagaatgaggattttgcgccggctgctcagaagataccgtgaatctaagaagatcgatcgccacatgtatcacagcctgtacctgaaggtgaaggggaatgtgttcaaaaacaagcggattctcatggaacacatccacaagctgaaggcagacaaggcccgcaagaagctcctggctgaccaggctgaggcccgcaggtctaagaccaaggaagcacgcaagcgccgtgaagagcgcctccaggccaagaaggaggagatcatcaagactttatccaaggaggaagagaccaagaaataaaacctcccactttgtctgtacatactggcctctgtgattacatagatcagccattaaaataaaacaagccttaatgaaaaaaaaaaaaaaaaaacaaaaaaaaaaaaaaaaaaaaggggggggggggncaaaaatttcccccgggggggcccaaagttaacggggaacccgaggtttcgtgtgggaccaaagggggccccaatagggagagggaatataaacgaaggagagggggggattacacagggcgggcgtggagaaacggacgggggatctgggagaggagcctacctgtgggggcgacctattgtgccacacccacagagttacgccgaaggaacataatcttcgggtattgggtcacacgcgaatgttgggaaagtcgtaggatagtaaatag

SEQ ID NO: 312713 - DNA, 680 bp, Homo sapiens
atccttaattaaattaatccccccccgcctttcgctgctgcggccgcagccatgagtatgctcaggcttcagaagaggctcgcctctagtgtcctccgctgtggcaagaagaaggtctggttagaccccaatgagaccaatgaaatcgccaatgccaactcccgtcagcagatccggaagctcatcaaagatgggctgatcatccgcaagcctgtgacggtccattcccgggctcgatgccggaaaaacaccttggcccgccggaagggcaggcacatgggcataggtaagcggaagggtacagccaatgcccgaatgccagagaaggtcacatggatgaggagaatgaggattttgcgccggctgctcagaagataccgtgaatctaagaagatcgatcgccacatgtatcacagcctgtacctgaaggtgaaggggaatgtgttcaaaaacaagcggattctcatggaacacatccacaagctgaaggcagacaaggcccgcaagaagctcctggctgaccaggctgaggcccgcaggtctaagaccaaggaagcacgcaagcgccgtgaagagcgcctccaggccaagaaggaagaaataaaacctcccactttgtctgtacatactggcctctgtgattacatagatcagccattaaaataaaacaagccttaatg

SEQ ID NO: 312714 - DNA, 642 bp, Homo sapiens
atccttaattaaattaatccccccccgcctttcgctgctgcggccgcagccatgagtatgctcaggcttcagaagaggctcgcctctagtgtcctccgctgtggcaagaagaaggtctggttagaccccaatgagaccaatgaaatcgccaatgccaactcccgtcagcagatccggaagctcatcaaagatgggctgatcatccgcaagcctgtgacggtccattcccgggctcgatgccggaaaaacaccttggcccgccggaagggcaggcacatgggcataggtaagcggaagggtacagccaatgcccgaatgccagagaaggtcacatggatgaggagaatgaggattttgcgccggctgctcagaagataccgtgaatctaagaagatcgatcgccacatgtatcacagcctgtacctgaaggtgaaggggaatgtgttcaaaaacaagcggattctcatggaacacatccacaagctgaaggcagacaaggcccgcaagaagctcctggctgaccaggctgaggcccgcaggtctatcctcctgtgacaccttccccaccctgccagccaaagtgtccacccaagagcaagtaacggcttcaggattcatcaggagcatgagaggataaggata

SEQ ID NO: 312715 - DNA, 794 bp, Homo sapiens
gcggccgctactactactaaattcgcggccgcgtcgacggattttgcgccggctgctcagaagataccgtgaatctaagaagatcgatcgccacatgtatcacagcctgtacctgaaggtgaaggggaatgtgttcaaaaacaagcggattctcatggaacacatccacaagctgaaggcagacaaggcccgcaagaagctcctggctgaccaggctgaggcccgcaggtctaagaccaaggaagcacgcaagcgccgtgaagagcgcctccaggccaagaaggaggagatcatcaagactttatccaaggaggaagagaccaagaaataaaacctcccactttgtctgtacatactggcctctgtgattacatagatcagccattaaaataaaacaagccttaatgaaaaaaaaaaaaaaaaaaaaaaaaaaaaaaaaaaaaaaaaaaaaaaaaaaaaaaaacaaaaaaaaaaaaaaaaaaaagggggctttgggggggggggaaaaagggaaagagagagcagcagagcggtgtaataaaacgtagggtcatagaacaacccccttttttgagcaagaagggggcatgataattcggggcgggccccaaaataggggggcgcagtataaaatttctaagaaacgagcgggtctcccccttgtgatttatcgcggctcaaagaaatcccctcaagcaacaccgtactcaccaagacgactcaccgtcgataacgcgctacactacacacatacaagcaatagaccaaaccgccaccacaacaacacaccccgt

SEQ ID NO: 312716 - DNA, 880 bp, Homo sapiens
  misc_feature (382)..(382): n is a, c, g, or t
gcggccgcctactactactactactgctcgaattcaagcttctaacgatgtacggggaggattctcatggaacacatccacaagctgaaggcagacaaggcccgcaagaagctcctggctgaccaggctgaggcccgcaggtctaagaccaaggaagcacgcaagcgccgtgaagagcgcctccaggccaagaaggaggagatcatcaagactttatccaaggaggaagagaccaagaaataaaacctcccactttgtctgtacatactggcctctgtgattacatagatcagccattaaaataaaacaagccttaatgaaaaaaaaaaaaaaaaaacaaaaaaaaaaaaaaaaaaaagaaaaaaaaaaaaaaaaaaaaaanaaaaaaaaaaaaaaaaaaaaaaaaaaaaaaaaaaaaaaaaaaaaaaaaaaaaaaaaaaaaaaaaaaaaaaaaaaaaaaaaaaaaaaaattgcagttccacttgccccaattttattttagactggacaggtttaaccctgggggcccaattcggaataatttggccaaataccccttattggggcggctttaaaaataacggggcggggtttaaaaaagggcgttccgaaaaaaaccgggggttacccaaattaatggctttggaaaaaattcccattttgccaaagtgggaaataaccaatgggcccacaacgtgagcctttaccaaaaagggcgaactcttaaggggcattgggaatataaaggcttaaactttttttaaaaaccccgttaaattttttggaaacaaggctcttttttaaaccaaagggcaaaatcggggaaaatccttaaaaaccaataaaaagccccaaaacgttcagagggcgtcccttttaa

SEQ ID NO: 312717 - DNA, 339 bp, Homo sapiens
  misc_feature (17)..(19): n is a, c, g, or t
  misc_feature (25)..(25): n is a, c, g, or t
  misc_feature (34)..(34): n is a, c, g, or t
tgccgcggtttctctannngactcncccgcagantaggcatgcgcagataaggcccgcaagaagctcctggctgaccaggctgaggcccgcaggtctaagaccaaggaagcacgcaagcgccgtgaagagcgcctccaggccaagaaggaggagatcatcaagactttatccaaggaggaagagaccaagaaataaaacctcccactttgtctgtacatactggcctctgtgattacatagatcagccattaaaataaaacaagccttaatgcctctgtgattacatagatcagccattaaaataaaacaagccttatctgcgcagtgcctaatctgcg

SEQ ID NO: 312718 - DNA, 331 bp, Homo sapiens
  misc_feature (17)..(19): n is a, c, g, or t
  misc_feature (25)..(25): n is a, c, g, or t
  misc_feature (34)..(34): n is a, c, g, or t
tgccgcggtttctctannngactcncccgcagantaggcatgcgcagataaggcccgcaagaagctcctggctgaccaggctgaggcccgcaggtctaagaccaaggaagcacgcaagcgccgtgaagagcgcctccaggccaagaaggaggagatcatcaagactttatccaaggaggaagagaccggtcttgctattgttgcccagagctgaactcacaacacctgagtctcaagatgatcctccacacctacagcctctcaagatagctgggattacagcgctggtattacctcgaagtcacgttgctccattaaaacatcatatgcc

SEQ ID NO: 312719 - DNA, 325 bp, Homo sapiens
cagccatgggtagggagcctttctaagaaagtttttctattctggtctttctttttttccctgtatgtcatcaggatagcccaacagtttatttgccaggcaagttctatctaggaactgcacacaaaaaagtcatggtttaggaagtaattcatgcagcaataggagaaaagaaaggaagctacaagcttagtgaccttgggtggaggaacagctcacaaggcagcctctgatccatcaccaaccagcatctcttcactccgtgtaccctgcaggtatcacagcctgtacctgaaggtgaaggggaatgtgttcaaaaacaagc

SEQ ID NO: 312720 - DNA, 858 bp, Homo sapiens
atgagcccagaaattcaagaccggcctgggcaacatagggagactgtctcaaagacaaagggtatttctcacaacctctgtttgtgaaggaaaaagaaaagatagaggttttttgggtttttgaaggcaagaaataagttccagtgtttccatcctttttgagaccgtggggccaagaatgtgagcagtgtctctggcctggcctatttggactctgtgatgtgcttgggccccagttgactgaccaggtgcattatgctttcccaggtcagcagatccggaagctcatcaaagatgggctgatcatccgcaagcctgtgacggtccattcccgggctcgatgccggaaaaacaccttggcccgccggaagggcaggcacatgggcataggtaagtgtggtcatcttctccttaagaaatgataggtgctggcatctatgctgaaatatattcaggatctaagcactctgtctcatcttgagcctgtttcttactccttgatatttgatgtgttttctgcctgtgtgcaaatcagaaagttggtgctggtattggaattgagagtatccctggtaggaggtcacatttactaagtccctacctacactatgccaaggattctgtactttctagtttcagaatgatcgaaggaagctccttacaacgtgctgtgttgccttggtgcactgcctgttacacccacattctgcatgaagtgaatggggaattattgctgtatttgtgcttcctttaaaattgagtaaacgaaagaacttacgtagttgggatcatcatctggaaaatggaagtaatgctacttaaaatgaggttgtgaggattaaatgagttaaggaccct

SEQ ID NO: 312721 - DNA, 728 bp, Homo sapiens
aggatccttaataaattaatccccccccccccgctttcctttcgctgctgcggccgcagccatgagtatgctcaggcttcagaagaggctcgcctctagtgtcctccgctgtggcaagaagaaggtctggttagaccccaatgagaccaatgaaatcgccaatgccaactcccgtcagcagatccggaagctcatcaaagatgggctgatcatccgcaagcctgtgacggtccattcccgggctcgatgccggaaaaacaccttggcccgccggaagggcaggcacatgggcataggtaagcggaagggtacagccaatgcccgaatgccagagaaggtcacatggatgaggagaatgaggattttgcgccggctgctcagaagataccgtgaatctaagaagatcgatcgccacatgtatcacagcctgtacctgaaggtgaaggggaatgtgttcaaaaacaagcggattctcatggaacacatccacaagctgaaggcagacaaggcccgcaagaagctcctggctgaccaggctgaggcccgcaggtctaagaccaaggaagcacgcaagcgccgtgaagagcgcctccaggccaagaaggaggagatcatcaagactttatccaaggaggaagagaccaagaaataaaacctcccactttgtctgtacatactggcctctgtgattacatagatcagccattaaaataaaacaagccttaatg

SEQ ID NO: 312722 - DNA, 717 bp, Homo sapiens
aagtgagcgtagtgcgagccggttggtgtaattcggccgaggcgcagccatgaggtatgctcaggcttcagaagaggctcgcctctagtgtcctccgctgtggcaagaagaaggtctggttagaccccaatgagaccaatgaaatcgccaatgccaactcccgtcagcagatccggaagctcatcaaagatgggctgatcatccgcaagcctgtgacggtccattcccgggctcgatgccggaaaaacaccttggcccgccggaagggcaggcacatgggcataggtaagcggaagggtacagccaatgcccgaatgccagagaaggtcacatggatgaggagaatgaggattttgcgccggctgctcagaagataccgtgaatctaagaagatcgatcgccacatgtatcacagcctgtacctgaaggtgaaggggaatgtgttcaaaaacaagcggattctcatggaacacatccacaagctgaaggcagacaaggcccgcaagaagctcctggctgaccaggctgaggcccgcaggtctaagaccaaggaagcacgcaagcgccgtgaagagcgcctccaggccaagaaggaggagatcatcaagactttatccaaggaggaagagaccaagaaataaaacctcccactttgtctgtacatactggcctctgtgattacatagatcagccattaaaataaaacaagccttaatg

SEQ ID NO: 312723 - DNA, 864 bp, Homo sapiens
  misc_feature (26)..(26): n is a, c, g, or t
  misc_feature (853)..(853): n is a, c, g, or t
  misc_feature (857)..(857): n is a, c, g, or t
ctagtagaggctgggtttgaatcggncgaggcgcagccatgagtatgctcaggcttcagaagaggctcgcctctagtgtcctccgctgtggcaagaagaaggtctggttagaccccaatgagaccaatgaaatcgccaatgccaactcccgtcagcagatccggaagctcatcaaagatgggctgatcatccgcaagcctgtgacggtccattcccgggctcgatgccggaaaaacaccttggcccgccggaagggcaggcacatgggcataggtaagcggaagggtacagccaatgcccgaatgccagagaaggtcacatggatgaggagaatgaggattttgcgccggctgctcagaagataccgtgaatctaagaagatcgatcgccacatgtatcacagcctgtacctgaaggtgaaggggaatgtgttcaaaaacaagcggattctcatggaacacatccacaagctgaaggcagacaaggcccgcaagaagctcctggctgaccaggctgaggcccgcaggtctaagaccaaggaagcacgcaagcgccgtgaagagcgcctccaggccaagaaggaggagatcatcaagactttatccaaggaggaagagaccaagaaataaaacctcccactttgtctgtacatactggcctctgtgattacatagatcagccattaaaataaaacaagccttaatgaaaaaaaaaaaaaaaaaacaaaaaaaaaaaaaaaaaaaaggcgggggttttttggggggggggaaaaggggtataaagggcgggatagtgtgttcggacccgtttttggaagggggaaatgggggcccaaagggggggataatgaagnggtngataaag

SEQ ID NO: 312724 - DNA, 816 bp, Homo sapiens
  misc_feature (706)..(706): n is a, c, g, or t
  misc_feature (709)..(709): n is a, c, g, or t
cgcttgcagaaatgcgcgccgagcccgcagccatgagtatgctcaggcttcagaagaggctcgcctctagtgtcctccgctgtggcaagaagaaggtctggttagaccccaatgagaccaatgaaatcgccaatgccaactcccgtcagcagatccggaagctcatcaaagatgggctgatcatccgcaagcctgtgacggtccattcccgggctcgatgccggaaaaacaccttggcccgccggaagggcaggcacatgggcataggtaagcggaagggtacagccaatgcccgaatgccagagaaggtcacatggatgaggagaatgaggattttgcgccggctgctcagaagataccgtgaatctaagaagatcgatcgccacatgtatcacagcctgtacctgaaggtgaaggggaatgtgttcaaaaacaagcggattctcatggaacacatccacaagctgaaggcagacaaggcccgcaagaagctcctggctgaccaggctgaggcccgcaggtctaagaccaaggaagcacgcaagcgccgtgaagagcgcctccaggccaagaaggaggagatcatcaagactttatccaaggaggaagagaccaagaaataaaacctcccactttgtctgtacatactggcctctgtgattacatagatcagccattaaaataaaacaagccttaatgtaacacnttngtgtgtgtgtggttggtttgtttggtttttgttgttgttgttggtgttgggtgttgtgggtgtggtgcgtgggatgtgtggggggttgttgtggggtgtgtcgttga

SEQ ID NO: 312725 - DNA, 322 bp, Homo sapiens
gcggccgctactactactaaattcgcggccgcgtcgacggggaatgtgttcaaaaacaagcggattctcatggaacacatccacaagctgaaggcagacaaggcccgcaagaagctcctggctgaccaggctgaggcccgcaggtctaagaccaaggaagcacgcaagcgccgtgaagagcgcctccaggccaagaaggaggagatcatcaagactttatccaaggaggaagagaccaagaaataaaacctcccactttgtctgtacatactggcctctgtgattacatagatcagccattaaaataaaacaagccttaatg

SEQ ID NO: 312726 - DNA, 1001 bp, Homo sapiens
agcgggctgacatatcgtagcccgcagtggcagtcaccttgtgtctctcgtgtacccaagcaagatcagcctgctagctgtccgtcgcgactgctgagacaaccaagatgggtctgctacgtactcacatgtagcatacacatgcagatcgccaatgccaactcccgtcagcagatccggaagctcatcaaagatgggctgatcatccgcaagcctgtgacggtccattcccgggctcgatgccggaaaaacaccttggcccgccggaagggcaggcacatgggcataggtaagcggaagggtacagccaatgcccgaatgccagagaaggtcacatggatgaggagaatgaggattttgcgccggctgctcagaagataccgtgaatctaagaagatcgatcgccacatgtatcacagcctgtacctgaaggtgaaggggaatgtgttcaaaaacaagcggattctcatggaacacatccacaagctgaaggcagacaaggcccgcaagaagctcctggctgaccaggctgaggcccgcaggtctaagaccaaggaagcacgcaagcgccgtgaagagcgcctccaggccaagaaggaggagatcatcaagactttatccaaggaggaagagaccaagaaataaaacctcccactttgtctgtacatactggcctctgtgattacatagatcagccattaaaataaaacaagccttaatgaaaaaaaaaaataaaagaacttgcggaactaagttctcacagcgagcggacaaatatggcaagtgaaagttatccaagacaggaggaatttggccgctaagggcatcttcaaggctgaacctgaatgagtttcttaaactcgggaaaactggtctacagagtggctactcgtgaagttgcgtgtccaagtttactccaacccgtgacgacgattccttttctttaagccaccaaaaacaccagaatgttcttgggcaaacagggccggcgaatcgggaaa

SEQ ID NO: 312727 - DNA, 284 bp, Homo sapiens
gtgttcggcgcggttcccccagctgtctctggctgaaccggcgctctcgcctccctgccgaacacagcgtgagaagctcctggctgaccaggctgaggcccgcaggtctaagaccaaggaagcacgcaagcgccgtgaagagcgcctccaggccaagaaggaggagatcatcaagactttatccaaggaggaagagaccaagaaataaaacctcccactttgtctgtacatactggcctctgtgattacatagatcagccattaaaataaaacaagccttaatg

SEQ ID NO: 312728 - DNA, 398 bp, Homo sapiens
  misc_feature (11)..(11): n is a, c, g, or t
  misc_feature (23)..(23): n is a, c, g, or t
  misc_feature (194)..(194): n is a, c, g, or t
  misc_feature (198)..(198): n is a, c, g, or t
cccgggctgcnggaaattcggcncgaggtttatttgggattttgaaatgcaacaaaaattttccgatcactcatctagctgaaaaagaaatggtagttactggaattagtaaacacttttatcttgagttactttttaatgaacactgctcattacaactttacaaaccaaaagtagttactggaattagtaanaccnacccccgaattcggcacgaggatcatcaagactttatccaaggaggaagagaccaagaaataaaacctccttcttggcctggaggcgctcttcacggcgcttgcgtgcttccttgaagaaataaaacctcccactttgtctgtacatactggcctctgtgattacatagatcagccattaaaataaaacaagccttaatg

SEQ ID NO: 312729 - DNA, 658 bp, Homo sapiens
tcggtaccacctcgttattcatcggcaccagtgtcgtcagcagagagaggaagcacaggctcaaggttggtagtgaagtcaggttcggggtgcatagtattgtggctattcatcggcacctcgctattcatcggcacccggattctcatggaacacatccacaagctgaaggcagacaaggcccgcaagaagctcctggctgaccaggctgaggcccgcaggtctaagaccaaggaagcacgcaagcgccgtgaagagcgcctccaggccaagaaggaggagatcatcaagactttatccaaggaggaagagaccaagaaataaaacctcccactttgtctgtacatactggcctctgtgattacatagatcagccattaaaataaaacaagccttaatgaaaaaaaaaaaaaaaaaaaaaaaaaaaaaaaaaaaaaaaaaaaaaaaaaaaacccgggggggctctatatatggggggggggagagaaaagagggggaaaaaaaggcgacgaaggggcgaaaaacgggggtcccgagagccacagttttcttgggacaaggggggagaaaacctcgggaggggctccccatatgagagggaggcggcgagataataatgtcgagaataaccgcgagggtgaaacccgggaataaaacg

SEQ ID NO: 312730 - DNA, 692 bp, Homo sapiens
cggacgcgtgggtcgacccacgcgtccggctatgctcaggcttcagaagaggctcgcctctagtgtcctccgctgtggcaagaagaaggtctggttagaccccaatgagaccaatgaaatcgccaatgccaactcccgtcagcagatccggaagctcatcaaagatgggctgatcatccgcaagcctgtgacggtccattcccgggctcgatgccggaaaaacaccttggcccgccggaagggcaggcacatgggcataggtaagcggaagggtacagccaatgcccgaatgccagagaaggtcacatggatgaggagaatgaggattttgcgccggctgctcagaagataccgtgaatctaagaagatcgatcgccacatgtatcacagcctgtacctgaaggtgaaggggaatgtgttcaaaaacaagcggattctcatggaacacatccacaagctgaaggcagacaaggcccgcaagaagctcctggctgaccaggctgaggcccgcaggtctaagaccaaggaagcacgcaagcgccgtgaagagcgcctccaggccaagaaggaggagatcatcaagactttatccaaggaggaagagaccaagaaataaaacctcccactttgtctgtacatactggcctctgtgattacatagatcagccattaaaataaaacaagccttaatg

SEQ ID NO: 312731 - DNA, 283 bp, Homo sapiens
cgcggcccgcgcgcgacgacagggattctcatggaacacatccacaagctgaaggcagacaaggcccgcaagaagctcctggctgaccaggctgaggcccgcaggtctaagaccaaggaagcacgcaagcgccgtgaagagcgcctccaggccaagaaggaggagatcatcaagactttatccaaggaggaagagaccaagaaataaaacctcccactttgtctgtacatactggcctctgtgattacatagatcagccattaaaataaaacaagccttaatg

SEQ ID NO: 312732 - DNA, 1018 bp, Homo sapiens
tggattcccactcatcttgactcagagtgcttttagggctgcttcctcctgaaggaacatccttctgtgagccttgcttttcctcctgtaggctggcagaggacagtggagcagccaacacacaaaactaccgtttgtgcatggctaaagaccggggtgattttatagcatcctgggcatttcacatccatgaagtaggaattggggctctgcaccaggcgtttcttcttgtgtttcctgttctcctcttctggagagggatgaaggagatcctttgccagaggcatgttctcgtgtgcgtaggtcgctcgtgccgaattcggcacgagtttcgctgctgcggccgcagccatgagtatgctcaggcttcagaagaggctcgcctctagtgtcctccgctgtggcaagaagaaggtctggttagaccccaatgagaccaatgaaatcgccaatgccaactcccgtcagcagatccggaagctcatcaaagatgggctgatcatccgcaagcctgtgacggtccattcccgggctcgatgccggaaaaacaccttggcccgccggaagggcaggcacatgggcataggtaagcggaagggtacagccaatgcccgaatgccagagaaggtcacatggatgaggagaatgaggattttgcgccggctgctcagaagataccgtgaatctaagaagatcgatcgccacatgtatcacagcctgtacctgaaggtgaaggggaatgtgttcaaaaacaagcggattctcatggaacacatccacaagctgaaggcagacaaggcccgcaagaagctcctggctgaccaggctgaggcccgcaggtctaagaccaaggaagcacgcaagcgccgtgaagagcgcctccaggccaagaaggaggagatcatcaagactttatccaaggaggaagagaccaagaaataaaacctcccactttgtctgtacatactggcctctgtgattacatagatcagccattaaaataaaacaagccttaatg

SEQ ID NO: 312733 - DNA, 755 bp, Homo sapiens
aaagtaccctgtgcccctcccctcttcaaggggtctacatggcaactgtgaggaggggagattcagtgtggtgggggactgagcagccatgagtatgctcaggcttcagaagaggctcgcctctagtgtcctccgctgtggcaagaagaaggtctggttagaccccaatgagaccaatgaaatcgccaatgccaactcccgtcagcagatccggaagctcatcaaagatgggctgatcatccgcaagcctgtgacggtccattcccgggctcgatgccggaaaaacaccttggcccgccggaagggcaggcacatgggcataggtaagcggaagggtacagccaatgcccgaatgccagagaaggtcacatggatgaggagaatgaggattttgcgccggctgctcagaagataccgtgaatctaagaagatcgatcgccacatgtatcacagcctgtacctgaaggtgaaggggaatgtgttcaaaaacaagcggattctcatggaacacatccacaagctgaaggcagacaaggcccgcaagaagctcctggctgaccaggctgaggcccgcaggtctaagaccaaggaagcacgcaagcgccgtgaagagcgcctccaggccaagaaggaggagatcatcaagactttatccaaggaggaagagaccaagaaataaaacctcccactttgtctgtacatactggcctctgtgattacatagatcagccattaaaataaaacaagccttaatg

SEQ ID NO: 312734 - DNA, 721 bp, Homo sapiens
agcgggctgacatatcgtagcccgcagtggcagtcaccttgtgtctctcgtgtacccaagcaagatcagcctgctagctgtccgtcgcgactgctgagacaaccaagatgggtctgctacgtactcacatgtagcatacacatgcagatcgccaatgccaactcccgtcagcagatccggaagctcatcaaagatgggctgatcatccgcaagcctgtgacggtccattcccgggctcgatgccggaaaaacaccttggcccgccggaagggcaggcacatgggcataggtaagcggaagggtacagccaatgcccgaatgccagagaaggtcacatggatgaggagaatgaggattttgcgccggctgctcagaagataccgtgaatctaagaagatcgatcgccacatgtatcacagcctgtacctgaaggtgaaggggaatgtgttcaaaaacaagcggattctcatggaacacatccacaagctgaaggcagacaaggcccgcaagaagctcctggctgaccaggctgaggcccgcaggtctaagaccaaggaagcacgcaagcgccgtgaagagcgcctccaggccaagaaggaggagatcatcaagactttatccaaggaggaagagaccaagaaataaaacctcccactttgtctgtacatactggcctctgtgattacatagatcagccattaaaataaaacaagccttaatg

SEQ ID NO: 312735 - DNA, 1031 bp, Homo sapiens
  misc_feature (759)..(759): n is a, c, g, or t
atccttaattaaattaatccccccccgcctttcgctgctgcggccgcagccatgagtatgctcaggcttcagaagaggctcgcctctagtgtcctccgctgtggcaagaagaaggtctggttagaccccaatgagaccaatgaaatcgccaatgccaactcccgtcagcagatccggaagctcatcaaagatgggctgatcatccgcaagcctgtgacggtccattcccgggctcgatgccggaaaaacaccttggcccgccggaagggcaggcacatgggcataggtaagcggaagggtacagccaatgcccgaatgccagagaaggtcacatggatgaggagaatgaggattttgcgccggctgctcagaagataccgtgaatctaagaagatcgatcgccacatgtatcacagcctgtacctgaaggtgaaggggaatgtgttcaaaaacaagcggattctcatggaacacatccacaagctgaaggcagacaaggcccgcaagaagctcctggctgaccaggctgaggcccgcaggtctaagaccaaggaagcacgcaagcgccgtgaagagcgcctccaggccaagaaggaggagatcatcaagactttatccaaggaggaagagaccaagaaataaaacctcccactttgtctgtacatactggcctctgtgattacatagatcagccattaaaataaaacaagccttaatgaaaaaaaaaaaaaaaaaaaaaaaaaaaaagggggggggggncaaaaatttcccccgggggggcccaaagttaacggggaacccgaggtttcgtgtgggaccaaagggggccccaatagggagagggaatataaacgaaggagagggggggattacacagggcgggcgtggagaaacggacgggggatctgggagaggagcctacctgtgggggcgacctattgtgccacacccacagagttacgccgaaggaacataatcttcgggtattgggtcacacgcgaatgttgggaaagtcgtaggatagtaaatag

SEQ ID NO: 312736 - DNA, 793 bp, Homo sapiens
aggatccttaataaattaatccccccccccccgctttcctttcgctgctgcggccgcagccatgagtatgctcaggcttcagaagaggctcgcctctagtgtcctccgctgtggcaagaagaaggtctggttagaccccaatgagaccaatgaaatcgccaatgccaactcccgtcagcagatccggaagctcatcaaagatgggctgatcatccgcaagcctgtgacggtccattcccgggctcgatgccggaaaaacaccttggcccgccggaagggcaggcacatgggcataggtaagcggaagggtacagccaatgcccgaatgccagagaaggtcacatggatgaggagaatgaggattttgcgccggctgctcagaagataccgtgaatctaagaagatcgatcgccacatgtatcacagcctgtacctgaaggtgaaggggaatgtgttcaaaaacaagcggattctcatggaacacatccacaagctgaaggcagacaaggcccgcaagaagctcctggctgaccaggctgaggcccgcaggtctaagaccaaggaagcacgcaagcgccgtgaagagcgcctccaggccaagaaggaggagatcatcaagactttatccaaggaggaagagaccaagaaataaaacctcccactttgtctgtacatactggcctctgtgattacatagatcagccattaaaataaaacaagccttaatgaaaaaaaacaatgccttatcatatatgtaaaacccagcccatgaccctaaaaggggcctctagac

SEQ ID NO: 312737 - DNA, 771 bp, Homo sapiens
  misc_feature (739)..(740): n is a, c, g, or t
  misc_feature (749)..(749): n is a, c, g, or t
aggatccttaataaattaatccccccccccccgctttcctttcgctgctgcggccgcagccatgagtatgctcaggcttcagaagaggctcgcctctagtgtcctccgctgtggcaagaagaaggtctggttagaccccaatgagaccaatgaaatcgccaatgccaactcccgtcagcagatccggaagctcatcaaagatgggctgatcatccgcaagcctgtgacggtccattcccgggctcgatgccggaaaaacaccttggcccgccggaagggcaggcacatgggcataggtaagcggaagggtacagccaatgcccgaatgccagagaaggtcacatggatgaggagaatgaggattttgcgccggctgctcagaagataccgtgaatctaagaagatcgatcgccacatgtatcacagcctgtacctgaaggtgaaggggaatgtgttcaaaaacaagcggattctcatggaacacatccacaagctgaaggcagacaaggcccgcaagaagctcctggctgaccaggctgaggcccgcaggtctaagaccaaggaagcacgcaagcgccgtgaagagcgcctccaggccaagaaggaggagatcatcaagactttatccaaggaggaagagaccaagaaataaaacctcccactttgtctgtacatactggcctctgtgattacatagatcagccattaaaataaaacaagccttaatgaaaaaaaaaannaaaactcgngactagttctctctctctctcc

SEQ ID NO: 312738 - DNA, 845 bp, Homo sapiens
  misc_feature (735)..(735): n is a, c, g, or t
  misc_feature (738)..(738): n is a, c, g, or t
aggatccttaataaattaatccccccccccccgctttcctttcgctgctgcggccgcagccatgagtatgctcaggcttcagaagaggctcgcctctagtgtcctccgctgtggcaagaagaaggtctggttagaccccaatgagaccaatgaaatcgccaatgccaactcccgtcagcagatccggaagctcatcaaagatgggctgatcatccgcaagcctgtgacggtccattcccgggctcgatgccggaaaaacaccttggcccgccggaagggcaggcacatgggcataggtaagcggaagggtacagccaatgcccgaatgccagagaaggtcacatggatgaggagaatgaggattttgcgccggctgctcagaagataccgtgaatctaagaagatcgatcgccacatgtatcacagcctgtacctgaaggtgaaggggaatgtgttcaaaaacaagcggattctcatggaacacatccacaagctgaaggcagacaaggcccgcaagaagctcctggctgaccaggctgaggcccgcaggtctaagaccaaggaagcacgcaagcgccgtgaagagcgcctccaggccaagaaggaggagatcatcaagactttatccaaggaggaagagaccaagaaataaaacctcccactttgtctgtacatactggcctctgtgattacatagatcagccattaaaataaaacaagccttaatgtaacacnttngtgtgtgtgtggttggtttgtttggtttttgttgttgttgttggtgttgggtgttgtgggtgtggtgcgtgggatgtgtggggggttgttgtggggtgtgtcgttga

SEQ ID NO: 312739 - DNA, 1266 bp, Homo sapiens
  misc_feature (26)..(26): n is a, c, g, or t
  misc_feature (768)..(768): n is a, c, g, or t
ctagtagaggctgggtttgaatcggncgaggcgcagccatgagtatgctcaggcttcagaagaggctcgcctctagtgtcctccgctgtggcaagaagaaggtctggttagaccccaatgagaccaatgaaatcgccaatgccaactcccgtcagcagatccggaagctcatcaaagatgggctgatcatccgcaagcctgtgacggtccattcccgggctcgatgccggaaaaacaccttggcccgccggaagggcaggcacatgggcataggtaagcggaagggtacagccaatgcccgaatgccagagaaggtcacatggatgaggagaatgaggattttgcgccggctgctcagaagataccgtgaatctaagaagatcgatcgccacatgtatcacagcctgtacctgaaggtgaaggggaatgtgttcaaaaacaagcggattctcatggaacacatccacaagctgaaggcagacaaggcccgcaagaagctcctggctgaccaggctgaggcccgcaggtctaagaccaaggaagcacgcaagcgccgtgaagagcgcctccaggccaagaaggaggagatcatcaagactttatccaaggaggaagagaccaagaaataaaacctcccactttgtctgtacatactggcctctgtgattacatagatcagccattaaaataaaacaagccttaatgaaaaaaaaaaaaaaaaaacaaaaaaaaaaaaaaaaaaaagaaaaaaaaaaaaaaaaaaaaaanaaaaaaaaaaaaaaaaaaaaaaaaaaaaaaaaaaaaaaaaaaaaaaaaaaaaaaaaaaaaaaaaaaaaaaaaaaaaaaaaaaaaaaaattgcagttccacttgccccaattttattttagactggacaggtttaaccctgggggcccaattcggaataatttggccaaataccccttattggggcggctttaaaaataacggggcggggtttaaaaaagggcgttccgaaaaaaaccgggggttacccaaattaatggctttggaaaaaattcccattttgccaaagtgggaaataaccaatgggcccacaacgtgagcctttaccaaaaagggcgaactcttaaggggcattgggaatataaaggcttaaactttttttaaaaaccccgttaaattttttggaaacaaggctcttttttaaaccaaagggcaaaatcggggaaaatccttaaaaaccaataaaaagccccaaaacgttcagagggcgtcccttttaa

SEQ ID NO: 312740 - DNA, 1053 bp, Homo sapiens
  misc_feature (826)..(826): n is a, c, g, or t
aggatccttaataaattaatccccccccccccgctttcctttcgctgctgcggccgcagccatgagtatgctcaggcttcagaagaggctcgcctctagtgtcctccgctgtggcaagaagaaggtctggttagaccccaatgagaccaatgaaatcgccaatgccaactcccgtcagcagatccggaagctcatcaaagatgggctgatcatccgcaagcctgtgacggtccattcccgggctcgatgccggaaaaacaccttggcccgccggaagggcaggcacatgggcataggtaagcggaagggtacagccaatgcccgaatgccagagaaggtcacatggatgaggagaatgaggattttgcgccggctgctcagaagataccgtgaatctaagaagatcgatcgccacatgtatcacagcctgtacctgaaggtgaaggggaatgtgttcaaaaacaagcggattctcatggaacacatccacaagctgaaggcagacaaggcccgcaagaagctcctggctgaccaggctgaggcccgcaggtctaagaccaaggaagcacgcaagcgccgtgaagagcgcctccaggccaagaaggaggagatcatcaagactttatccaaggaggaagagaccaagaaataaaacctcccactttgtctgtacatactggcctctgtgattacatagatcagccattaaaataaaacaagccttaatgagaacaaaaaaacaaacaaaactcgggcggcacacagctgcggggcggagaaagaaggtcgagcaagggccagggtcaatgactgttccggacccgangtttgcggcacagggggaaactccccgggtcccacatggagccgacactcagcaacacgggcaacgtgatataagcagctatacacaacgaagaacactacgagcaccaccgtcgagcacagcacggcgacaccactctaaccgaaggtgcagcgtccaccccacacccgctccgacgcacctgaacgtgaccacacacacgtagacgacgactacgactaagacag

SEQ ID NO: 312741 - DNA, 775 bp, Homo sapiens
  misc_feature (733)..(733): n is a, c, g, or t
aggatccttaataaattaatccccccccccccgctttcctttcgctgctgcggccgcagccatgagtatgctcaggcttcagaagaggctcgcctctagtgtcctccgctgtggcaagaagaaggtctggttagaccccaatgagaccaatgaaatcgccaatgccaactcccgtcagcagatccggaagctcatcaaagatgggctgatcatccgcaagcctgtgacggtccattcccgggctcgatgccggaaaaacaccttggcccgccggaagggcaggcacatgggcataggtaagcggaagggtacagccaatgcccgaatgccagagaaggtcacatggatgaggagaatgaggattttgcgccggctgctcagaagataccgtgaatctaagaagatcgatcgccacatgtatcacagcctgtacctgaaggtgaaggggaatgtgttcaaaaacaagcggattctcatggaacacatccacaagctgaaggcagacaaggcccgcaagaagctcctggctgaccaggctgaggcccgcaggtctaagaccaaggaagcacgcaagcgccgtgaagagcgcctccaggccaagaaggaggagatcatcaagactttatccaaggaggaagagaccaagaaataaaacctcccactttgtctgtacatactggcctctgtgattacatagatcagccattaaaataaaacaagccttaatgaaaanaaagtcgacgcggccgcgaatttagtagtagtaggcggccgc

SEQ ID NO: 312742 - DNA, 1042 bp, Homo sapiens
aggatccttaataaattaatccccccccccccgctttcctttcgctgctgcggccgcagccatgagtatgctcaggcttcagaagaggctcgcctctagtgtcctccgctgtggcaagaagaaggtctggttagaccccaatgagaccaatgaaatcgccaatgccaactcccgtcagcagatccggaagctcatcaaagatgggctgatcatccgcaagcctgtgacggtccattcccgggctcgatgccggaaaaacaccttggcccgccggaagggcaggcacatgggcataggtaagcggaagggtacagccaatgcccgaatgccagagaaggtcacatggatgaggagaatgaggattttgcgccggctgctcagaagataccgtgaatctaagaagatcgatcgccacatgtatcacagcctgtacctgaaggtgaaggggaatgtgttcaaaaacaagcggattctcatggaacacatccacaagctgaaggcagacaaggcccgcaagaagctcctggctgaccaggctgaggcccgcaggtctaagaccaaggaagcacgcaagcgccgtgaagagcgcctccaggccaagaaggaggagatcatcaagactttatccaaggaggaagagaccaagaaataaaacctcccactttgtctgtacatactggcctctgtgattacatagatcagccattaaaataaaacaagccttaatgaaaaaaaaaaaaaaaaaaaaaaaaaaaaaaaaaaaaaaaaaaaaaaaaaaaaaaaaaaaaaaaaaaaaaaaaaaaaaaaacaaaaaaaaaaaaaaaaaaaagcatttcggccgcctgggcccaatggattttagacccaagaaaatttatgcattccacctaatttaaaactaatttggccaatttgccctaaagggagtcgtattaaaattaactggccgaaatctaaaacgtcggaattggaaaaaccctggctgtaccaaacttaatagccttgtagaaataccctttttgccagttggcgtaatacctga

SEQ ID NO: 312743 - DNA, 823 bp, Homo sapiens
  misc_feature (651)..(651): n is a, c, g, or t
atccttaattaaattaatccccccccgcctttcgctgctgcggccgcagccatgagtatgctcaggcttcagaagaggctcgcctctagtgtcctccgctgtggcaagaagaaggtctggttagaccccaatgagaccaatgaaatcgccaatgccaactcccgtcagcagatccggaagctcatcaaagatgggctgatcatccgcaagcctgtgacggtccattcccgggctcgatgccggaaaaacaccttggcccgccggaagggcaggcacatgggcataggtaagcggaagggtacagccaatgcccgaatgccagagaaggtcacatggatgaggagaatgaggattttgcgccggctgctcagaagataccgtgaatctaagaagatcgatcgccacatgtatcacagcctgtacctgaaggtgaaggggaatgtgttcaaaaacaagcggattctcatggaacacatccacaagctgaaggcagacaaggcccgcaagaagctcctggctgaccaggctgaggcccgcaggtctaagaccaaggaagcacgcaagcgccgtgaagagcgcctccaggccaagaaggagggaaggggggaaacggaattccaatttccaaaggaacttttttatttccaaagnggaaggggcgaaagggaagggaaaccccaaaaaggaaaaaaaattttaaaaaaaaaagccctttctccccccaaaaaccttttttggttccttgtacatactgggcctctgtgattacatagatcagccattaaaataaaacaagccttatctgcgcagtgcctaatctgcg

SEQ ID NO: 312744 - DNA, 957 bp, Homo sapiens
tggattcccactcatcttgactcagagtgcttttagggctgcttcctcctgaaggaacatccttctgtgagccttgcttttcctcctgtaggctggcagaggacagtggagcagccaacacacaaaactaccgtttgtgcatggctaaagaccggggtgattttatagcatcctgggcatttcacatccatgaagtaggaattggggctctgcaccaggcgtttcttcttgtgtttcctgttctcctcttctggagagggatgaaggagatcctttgccagaggcatgttctcgtgtgcgtaggtcgctcgtgccgaattcggcacgagtttcgctgctgcggccgcagccatgagtatgctcaggcttcagaagaggctcgcctctagtgtcctccgctgtggcaagaagaaggtctggttagaccccaatgagaccaatgaaatcgccaatgccaactcccgtcagcagatccggaagctcatcaaagatgggctgatcatccgcaagcctgtgacggtccattcccgggctcgatgccggaaaaacaccttggcccgccggaagggcaggcacatgggcataggtaagcggaagggtacagccaatgcccgaatgccagagaaggtcacatggatgaggagaatgaggattttgcgccggctgctcagaagataccgtgaatctaagaagatcgatcgccacatgtatcacagcctgtacctgaaggtgaaggggaatgtgttcaaaaacaagctgaccaggctgaggcccgcaggtctaagaccaaggaagcacgcaagcgccgtgaagagcgcctccaggccaagaaggaggagatcatcaagactttatccaaggaggaagagaccaagaaataaaacctcccactttgtctgtacatactggcctctgtgattacatagatcagccattaaaataaaacaagccttaatg

SEQ ID NO: 312745 - DNA, 272 bp, Homo sapiens
atcgatcgagctcggcccatgttcagataggccgcaagaagctcctggctgaccaggctgaggcccgcaggtctaagaccaaggaagcacgcaagcgccgtgaagagcgcctccaggccaagaaggaggagatcatcaagactttatccaaggaggaagagaccaagaaataaaacctcccactttgtctgtacatactggcctctgtgattacatagatcagccattaaaataaaacaagccttaatgaacatgggccgagctcgattgta

SEQ ID NO: 312746 - DNA, 3372 bp, Homo sapiens
cccttgcactgcctctggcacctggggcagccgcgcccgcggagttttccgcccggcgctgacggctgctgcgcccgcggctccccagtgccccgagtgccccgcgggccccgcgagcgggagtgggacccagccctaggcagaacccaggcgccgcgcccgggacgcccgcggagagagccactcccgcccacgtcccatttcgcccctcgcgtccggagtccccgtggccagatctaaccatgagctaccctggctatcccccgcccccaggtggctacccaccagctgcaccaggtggtggtccctggggaggtgctgcctaccctcctccgcccagcatgccccccatcgggctggataacgtggccacctatgcggggcagttcaaccaggactatctctcgggaatggcggccaacatgtctgggacatttggaggagccaacatgcccaacctgtaccctggggcccctggggctggctacccaccagtgccccctggcggctttgggcagcccccctctgcccagcagcctgttcctccctatgggatgtatccacccccaggaggaaacccaccctccaggatgccctcatatccgccatacccaggggcccctgtgccgggccagcccatgccaccccccggacagcagcccccaggggcctaccctgggcagccaccagtgacctaccctggtcagcctccagtgccactccctgggcagcagcagccagtgccgagctacccaggatacccggggtctgggactgtcacccccgctgtgcccccaacccagtttggaagccgaggcaccatcactgatgctcccggctttgaccccctgcgagatgccgaggtcctgcggaaggccatgaaaggcttcgggacggatgagcaggccatcattgactgcctggggagtcgctccaacaagcagcggcagcagatcctactttccttcaagacggcttacggcaaggatttgatcaaagatctgaaatctgaactgtcaggaaactttgagaagacaatcttggctctgatgaagaccccagtcctctttgacatttatgagataaaggaagccatcaagggggttggcactgatgaagcctgcctgattgagatcctcgcttcccgcagcaatgagcacatccgagaattaaacagagcctacaaagcagaattcaaaaagaccctggaagaggccattcgaagcgacacatcagggcacttccagcggctcctcatctctctctctcagggaaaccgtgatgaaagcacaaacgtggacatgtcactcgcccagagagatgcccaggagctgtatgcggccggggagaaccgcctgggaacagacgagtccaagttcaatgcggttctgtgctcccggagccgggcccacctggtagcagttttcaatgagtaccagagaatgacaggccgggacattgagaagagcatctgccgggagatgtccggggacctggaggagggcatgctggccgtggtgaaatgtctcaagaataccccagccttctttgcggagaggctcaacaaggccatgaggggggcaggaacaaaggaccggaccctgattcgcatcatggtgtctcgcagcgagaccgacctcctggacatcagatcagagtataagcggatgtacggcaagtcgctgtaccacgacatctcgggagatacttcaggggattaccggaagattctgctgaagatctgtggtggcaatgactgaacagtgactggtggctcacttctgcccacctgccggcaacaccagtgccaggaaaaggccaaaagaatgtctgtttctaacaaatccacaaatagccccgagattcaccgtcctagagcttaggcctgtcttccacccctcctgacccgtatagtgtgccacaggacctgggtcggtctagaactctctcaggatgccttttctaccccatccctcacagcctcttgctgctaaaatagatgtttcatttttctgactcatgcaatcattcccctttgcctgtggctaagacttggcttcatttcgtcatgtaattgtatatttttatttggaggcatattttcttttcttacagtcattgccagacagaggcatacaagtctgtttgctgcatacacatttctggtgagggcgactgggtgggtgaagcaccgtgtcctcgctgaggagagaaagggaggcgtgcctgagagggtagcctgtgcatctggtgagtgtgtcacgagctttgttactgccaaactcactcctttttagaaaaaacaaaaaaaaagggccagaaagtcattccttccatcttccttgcagaaaccacgagaacaaagccagttccctgtcagtgacagggcttcttgtaatttgtggtatgtgccttaaacctgaatgtctgtagccaaaacttgtttccacattaagagtcagccagctctggaatggtctggaaatgtcttcctggtaccaacttgttttcttctgcttgattctgccctgtggctcagaggtctggccttatcagccagtgaaagttcatgtaaccttacgtagagatttgtgtgcaggaaaccctgagcatacactagtttgcagggactcgtaaggacatgggaagggaggttcccgaaatccaggcaggaggcccagacacctgaaaggcaaagggatcttggttggttgcaggtgcagtgaagtccactgaaggtgtggtgcgaagaatgcagtccttcacccaggtcccaggagggaagaagggtgtgtgctaattcctggtgcccctcggcgggggccagagagaaggatggggacaacccagagagtcacaagaccagtgcctcccctcagggtgcctccaggctgaaaggggctcctggctctggtctctggggaccctgtgcccgttggttggtggtgtgagggaagagaatccataagagagtttctgagaattatggtgtcatgtccagaagctagagcttaccttgcatcaggggtctccacccactccttttccaacctcctgcgttgaggtttagaaaagagagaatcgactaggcactatggctcacgcctgtaatccaaggactttgggaagctgaggtgagaggatcacttgagctcaggagttcaagactagcctagccaacagcgagacccctgtctctactaaaaaatttggccaggcgtggtggctcacggctgtaatcccagcactttgggaggtgaggcgggcagatcacctgaggtcaggagttcgagacccagcctggccaacatggtgaaaccccatctctactaaaaatacaaaaattagccaggcatggtggcacattcctgt

SEQ ID NO: 312747 - DNA, 782 bp, Homo sapiens
cccttgcactgcctctggcacctggggcagccgcgcccgcggagttttccgcccggcgctgacggctgctgcgcccgcggctccccagtgccccgagtgccccgcgggccccgcgagcgggagtgggacccagccctaggcagaacccaggcgccgcgcccgggacgcccgcggagagagccactcccgcccacgtcccatttcgcccctcgcgtccggagtccccgtggccagatctaaccatgagctaccctggctatcccccgcccccaggtggctacccaccagctgcaccaggtggtggtccctggggaggtgctgcctaccctcctccgcccagcatgccccccatcgggctggataacgtggccacctatgcggggcagttcaaccaggactatctctcgggaatggctggccaacactgtctcgggacggtttggagggaggccagacagtgcccagaccttgtatccctggtggcccctgtggtgcttggcttaccctagcctacttgcctcccgtggcctggcttttggcgcacgtgcccaccgtcatggtccgcaagctatgccctagtatccgtcccctagttggaatcggtaatcccatgcgccgcaaagcgatggggaaagccgcgagcccgtgcccacgtgagttggccccttccaataagtacttgcctattagtcccaattgggggccctcccttggtgaaccctggggccttatagacccaatgccgatgcccacactggtgcaaatgtaattgacccacacat

SEQ ID NO: 312748 - DNA, 656 bp, Homo sapiens
caaaatacattctcagctgtgtggtctaacgctcaaattctgaactcacatgagccttgcaattgcaccatggggaccacgtcctcccaccttagactcagtagcatttgatgatggtgggcatgtcatcacaggaaactcactgtgtttccttggctgtatgaatgaagctgttgttagagaattagtgattctaggctgggcacagtggctcacgcctgtaatcccagcactttgggaggctgaggcaggtggatcatttgaggtcaggagttcgagaccagcctggccaacaaggtaaaaccctgtctctactaaaaatacaaaattagctgggcttgcctgtaatcccagctaattaggtaggctgcggcaggagaattgcttgaacccgggagacagaggttgcagtgagctgggatcacgccattccacttcagtcttggtgacagagtgagacttcgtctcaaaaaaaaaaagagagttaataattcattacagagtatctcctgcatgccagcaagctatggacatctggaagaagccacatgccttgccctcaagttgcttagggtggaaggaaatgattagaaatgagccaagccgagcctgcactcttagagtaagtgtagtggcctcagacagaggagagatcc

SEQ ID NO: 312749 - DNA, 3421 bp, Homo sapiens
cccttgcactgcctctggcacctggggcagccgcgcccgcggagttttccgcccggcgctgacggctgctgcgcccgcggctccccagtgccccgagtgccccgcgggccccgcgagcgggagtgggacccagccctaggcagaacccaggcgccgcgcccgggacgcccgcggagagagccactcccgcccacgtcccatttcgcccctcgcgtccggagtccccgtggccaggtgtgtgtctggggaagagacttacagaagtggagttgctgagtcaaagatctaaccatgagctaccctggctatcccccgcccccaggtggctacccaccagctgcaccaggtggtggtccctggggaggtgctgcctaccctcctccgcccagcatgccccccatcgggctggataacgtggccacctatgcggggcagttcaaccaggactatctctcgggaatggcggccaacatgtctgggacatttggaggagccaacatgcccaacctgtaccctggggcccctggggctggctacccaccagtgccccctggcggctttgggcagcccccctctgcccagcagcctgttcctccctatgggatgtatccacccccaggaggaaacccaccctccaggatgccctcatatccgccatacccaggggcccctgtgccgggccagcccatgccaccccccggacagcagcccccaggggcctaccctgggcagccaccagtgacctaccctggtcagcctccagtgccactccctgggcagcagcagccagtgccgagctacccaggatacccggggtctgggactgtcacccccgctgtgcccccaacccagtttggaagccgaggcaccatcactgatgctcccggctttgaccccctgcgagatgccgaggtcctgcggaaggccatgaaaggcttcgggacggatgagcaggccatcattgactgcctggggagtcgctccaacaagcagcggcagcagatcctactttccttcaagacggcttacggcaaggatttgatcaaagatctgaaatctgaactgtcaggaaactttgagaagacaatcttggctctgatgaagaccccagtcctctttgacatttatgagataaaggaagccatcaagggggttggcactgatgaagcctgcctgattgagatcctcgcttcccgcagcaatgagcacatccgagaattaaacagagcctacaaagcagaattcaaaaagaccctggaagaggccattcgaagcgacacatcagggcacttccagcggctcctcatctctctctctcagggaaaccgtgatgaaagcacaaacgtggacatgtcactcgcccagagagatgcccaggagctgtatgcggccggggagaaccgcctgggaacagacgagtccaagttcaatgcggttctgtgctcccggagccgggcccacctggtagcagttttcaatgagtaccagagaatgacaggccgggacattgagaagagcatctgccgggagatgtccggggacctggaggagggcatgctggccgtggtgaaatgtctcaagaataccccagccttctttgcggagaggctcaacaaggccatgaggggggcaggaacaaaggaccggaccctgattcgcatcatggtgtctcgcagcgagaccgacctcctggacatcagatcagagtataagcggatgtacggcaagtcgctgtaccacgacatctcgggagatacttcaggggattaccggaagattctgctgaagatctgtggtggcaatgactgaacagtgactggtggctcacttctgcccacctgccggcaacaccagtgccaggaaaaggccaaaagaatgtctgtttctaacaaatccacaaatagccccgagattcaccgtcctagagcttaggcctgtcttccacccctcctgacccgtatagtgtgccacaggacctgggtcggtctagaactctctcaggatgccttttctaccccatccctcacagcctcttgctgctaaaatagatgtttcatttttctgactcatgcaatcattcccctttgcctgtggctaagacttggcttcatttcgtcatgtaattgtatatttttatttggaggcatattttcttttcttacagtcattgccagacagaggcatacaagtctgtttgctgcatacacatttctggtgagggcgactgggtgggtgaagcaccgtgtcctcgctgaggagagaaagggaggcgtgcctgagagggtagcctgtgcatctggtgagtgtgtcacgagctttgttactgccaaactcactcctttttagaaaaaacaaaaaaaaagggccagaaagtcattccttccatcttccttgcagaaaccacgagaacaaagccagttccctgtcagtgacagggcttcttgtaatttgtggtatgtgccttaaacctgaatgtctgtagccaaaacttgtttccacattaagagtcagccagctctggaatggtctggaaatgtcttcctggtaccaacttgttttcttctgcttgattctgccctgtggctcagaggtctggccttatcagccagtgaaagttcatgtaaccttacgtagagatttgtgtgcaggaaaccctgagcatacactagtttgcagggactcgtaaggacatgggaagggaggttcccgaaatccaggcaggaggcccagacacctgaaaggcaaagggatcttggttggttgcaggtgcagtgaagtccactgaaggtgtggtgcgaagaatgcagtccttcacccaggtcccaggagggaagaagggtgtgtgctaattcctggtgcccctcggcgggggccagagagaaggatggggacaacccagagagtcacaagaccagtgcctcccctcagggtgcctccaggctgaaaggggctcctggctctggtctctggggaccctgtgcccgttggttggtggtgtgagggaagagaatccataagagagtttctgagaattatggtgtcatgtccagaagctagagcttaccttgcatcaggggtctccacccactccttttccaacctcctgcgttgaggtttagaaaagagagaatcgactaggcactatggctcacgcctgtaatccaaggactttgggaagctgaggtgagaggatcacttgagctcaggagttcaagactagcctagccaacagcgagacccctgtctctactaaaaaatttggccaggcgtggtggctcacggctgtaatcccagcactttgggaggtgaggcgggcagatcacctgaggtcaggagttcgagacccagcctggccaacatggtgaaaccccatctctactaaaaatacaaaaattagccaggcatggtggcacattcctgt

SEQ ID NO: 312750 - DNA, 3347 bp, Homo sapiens
aaccccattacggctaggtacgaggctgggtggtggacggctgctgcgcccgcggctccccagtgccccgagtgccccgcgggccccgcgagcgggagtgggacccagccctaggcagaacccaggcgccgcgcccgggacgcccgcggagagagccactcccgcccacgtcccatttcgcccctcgcgtccggagtccccgtggccagatctaaccatgagctaccctggctatcccccgcccccaggtggctacccaccagctgcaccaggtggtggtccctggggaggtgctgcctaccctcctccgcccagcatgccccccatcgggctggataacgtggccacctatgcggggcagttcaaccaggactatctctcgggaatggcggccaacatgtctgggacatttggaggagccaacatgcccaacctgtaccctggggcccctggggctggctacccaccagtgccccctggcggctttgggcagcccccctctgcccagcagcctgttcctccctatgggatgtatccacccccaggaggaaacccaccctccaggatgccctcatatccgccatacccaggggcccctgtgccgggccagcccatgccaccccccggacagcagcccccaggggcctaccctgggcagccaccagtgacctaccctggtcagcctccagtgccactccctgggcagcagcagccagtgccgagctacccaggatacccggggtctgggactgtcacccccgctgtgcccccaacccagtttggaagccgaggcaccatcactgatgctcccggctttgaccccctgcgagatgccgaggtcctgcggaaggccatgaaaggcttcgggacggatgagcaggccatcattgactgcctggggagtcgctccaacaagcagcggcagcagatcctactttccttcaagacggcttacggcaaggatttgatcaaagatctgaaatctgaactgtcaggaaactttgagaagacaatcttggctctgatgaagaccccagtcctctttgacatttatgagataaaggaagccatcaagggggttggcactgatgaagcctgcctgattgagatcctcgcttcccgcagcaatgagcacatccgagaattaaacagagcctacaaagcagaattcaaaaagaccctggaagaggccattcgaagcgacacatcagggcacttccagcggctcctcatctctctctctcagggaaaccgtgatgaaagcacaaacgtggacatgtcactcgcccagagagatgcccaggagctgtatgcggccggggagaaccgcctgggaacagacgagtccaagttcaatgcggttctgtgctcccggagccgggcccacctggtagcagttttcaatgagtaccagagaatgacaggccgggacattgagaagagcatctgccgggagatgtccggggacctggaggagggcatgctggccgtggtgaaatgtctcaagaataccccagccttctttgcggagaggctcaacaaggccatgaggggggcaggaacaaaggaccggaccctgattcgcatcatggtgtctcgcagcgagaccgacctcctggacatcagatcagagtataagcggatgtacggcaagtcgctgtaccacgacatctcgggagatacttcaggggattaccggaagattctgctgaagatctgtggtggcaatgactgaacagtgactggtggctcacttctgcccacctgccggcaacaccagtgccaggaaaaggccaaaagaatgtctgtttctaacaaatccacaaatagccccgagattcaccgtcctagagcttaggcctgtcttccacccctcctgacccgtatagtgtgccacaggacctgggtcggtctagaactctctcaggatgccttttctaccccatccctcacagcctcttgctgctaaaatagatgtttcatttttctgactcatgcaatcattcccctttgcctgtggctaagacttggcttcatttcgtcatgtaattgtatatttttatttggaggcatattttcttttcttacagtcattgccagacagaggcatacaagtctgtttgctgcatacacatttctggtgagggcgactgggtgggtgaagcaccgtgtcctcgctgaggagagaaagggaggcgtgcctgagagggtagcctgtgcatctggtgagtgtgtcacgagctttgttactgccaaactcactcctttttagaaaaaacaaaaaaaaagggccagaaagtcattccttccatcttccttgcagaaaccacgagaacaaagccagttccctgtcagtgacagggcttcttgtaatttgtggtatgtgccttaaacctgaatgtctgtagccaaaacttgtttccacattaagagtcagccagctctggaatggtctggaaatgtcttcctggtaccaacttgttttcttctgcttgattctgccctgtggctcagaggtctggccttatcagccagtgaaagttcatgtaaccttacgtagagatttgtgtgcaggaaaccctgagcatacactagtttgcagggactcgtaaggacatgggaagggaggttcccgaaatccaggcaggaggcccagacacctgaaaggcaaagggatcttggttggttgcaggtgcagtgaagtccactgaaggtgtggtgcgaagaatgcagtccttcacccaggtcccaggagggaagaagggtgtgtgctaattcctggtgcccctcggcgggggccagagagaaggatggggacaacccagagagtcacaagaccagtgcctcccctcagggtgcctccaggctgaaaggggctcctggctctggtctctggggaccctgtgcccgttggttggtggtgtgagggaagagaatccataagagagtttctgagaattatggtgtcatgtccagaagctagagcttaccttgcatcaggggtctccacccactccttttccaacctcctgcgttgaggtttagaaaagagagaatcgactaggcactatggctcacgcctgtaatccaaggactttgggaagctgaggtgagaggatcacttgagctcaggagttcaagactagcctagccaacagcgagacccctgtctctactaaaaaatttggccaggcgtggtggctcacggctgtaatcccagcactttgggaggtgaggcgggcagatcacctgaggtcaggagttcgagacccagcctggccaacatggtgaaaccccatctctactaaaaatacaaaaattagccaggcatggtggcacattcctgt

SEQ ID NO: 312751 - DNA, 3617 bp, Homo sapiens
cccttgcactgcctctggcacctggggcagccgcgcccgcggagttttccgcccggcgctgacggctgctgcgcccgcggctccccagtgccccgagtgccccgcgggccccgcgagcgggagtgggacccagccctaggcagaacccaggcgccgcgcccgggacgcccgcggagagagccactcccgcccacgtcccatttcgcccctcgcgtccggagtccccgtggccagggattattggacctgcctggtttaaactattgtcttagttaattttgtgctgctctaacaaaatatcacagactgagtaatttataagcaatagtagcttatttggctcacagttctggaggctgagaagatcgtgaggctgcatctggcaagggccttcttgctgcttcataacatggcagaagacatcatgcgggtgtgtgtctggggaagagacttacagaagtggagttgctgagtcaaagatctaaccatgagctaccctggctatcccccgcccccaggtggctacccaccagctgcaccaggtggtggtccctggggaggtgctgcctaccctcctccgcccagcatgccccccatcgggctggataacgtggccacctatgcggggcagttcaaccaggactatctctcgggaatggcggccaacatgtctgggacatttggaggagccaacatgcccaacctgtaccctggggcccctggggctggctacccaccagtgccccctggcggctttgggcagcccccctctgcccagcagcctgttcctccctatgggatgtatccacccccaggaggaaacccaccctccaggatgccctcatatccgccatacccaggggcccctgtgccgggccagcccatgccaccccccggacagcagcccccaggggcctaccctgggcagccaccagtgacctaccctggtcagcctccagtgccactccctgggcagcagcagccagtgccgagctacccaggatacccggggtctgggactgtcacccccgctgtgcccccaacccagtttggaagccgaggcaccatcactgatgctcccggctttgaccccctgcgagatgccgaggtcctgcggaaggccatgaaaggcttcgggacggatgagcaggccatcattgactgcctggggagtcgctccaacaagcagcggcagcagatcctactttccttcaagacggcttacggcaaggatttgatcaaagatctgaaatctgaactgtcaggaaactttgagaagacaatcttggctctgatgaagaccccagtcctctttgacatttatgagataaaggaagccatcaagggggttggcactgatgaagcctgcctgattgagatcctcgcttcccgcagcaatgagcacatccgagaattaaacagagcctacaaagcagaattcaaaaagaccctggaagaggccattcgaagcgacacatcagggcacttccagcggctcctcatctctctctctcagggaaaccgtgatgaaagcacaaacgtggacatgtcactcgcccagagagatgcccaggagctgtatgcggccggggagaaccgcctgggaacagacgagtccaagttcaatgcggttctgtgctcccggagccgggcccacctggtagcagttttcaatgagtaccagagaatgacaggccgggacattgagaagagcatctgccgggagatgtccggggacctggaggagggcatgctggccgtggtgaaatgtctcaagaataccccagccttctttgcggagaggctcaacaaggccatgaggggggcaggaacaaaggaccggaccctgattcgcatcatggtgtctcgcagcgagaccgacctcctggacatcagatcagagtataagcggatgtacggcaagtcgctgtaccacgacatctcgggagatacttcaggggattaccggaagattctgctgaagatctgtggtggcaatgactgaacagtgactggtggctcacttctgcccacctgccggcaacaccagtgccaggaaaaggccaaaagaatgtctgtttctaacaaatccacaaatagccccgagattcaccgtcctagagcttaggcctgtcttccacccctcctgacccgtatagtgtgccacaggacctgggtcggtctagaactctctcaggatgccttttctaccccatccctcacagcctcttgctgctaaaatagatgtttcatttttctgactcatgcaatcattcccctttgcctgtggctaagacttggcttcatttcgtcatgtaattgtatatttttatttggaggcatattttcttttcttacagtcattgccagacagaggcatacaagtctgtttgctgcatacacatttctggtgagggcgactgggtgggtgaagcaccgtgtcctcgctgaggagagaaagggaggcgtgcctgagagggtagcctgtgcatctggtgagtgtgtcacgagctttgttactgccaaactcactcctttttagaaaaaacaaaaaaaaagggccagaaagtcattccttccatcttccttgcagaaaccacgagaacaaagccagttccctgtcagtgacagggcttcttgtaatttgtggtatgtgccttaaacctgaatgtctgtagccaaaacttgtttccacattaagagtcagccagctctggaatggtctggaaatgtcttcctggtaccaacttgttttcttctgcttgattctgccctgtggctcagaggtctggccttatcagccagtgaaagttcatgtaaccttacgtagagatttgtgtgcaggaaaccctgagcatacactagtttgcagggactcgtaaggacatgggaagggaggttcccgaaatccaggcaggaggcccagacacctgaaaggcaaagggatcttggttggttgcaggtgcagtgaagtccactgaaggtgtggtgcgaagaatgcagtccttcacccaggtcccaggagggaagaagggtgtgtgctaattcctggtgcccctcggcgggggccagagagaaggatggggacaacccagagagtcacaagaccagtgcctcccctcagggtgcctccaggctgaaaggggctcctggctctggtctctggggaccctgtgcccgttggttggtggtgtgagggaagagaatccataagagagtttctgagaattatggtgtcatgtccagaagctagagcttaccttgcatcaggggtctccacccactccttttccaacctcctgcgttgaggtttagaaaagagagaatcgactaggcactatggctcacgcctgtaatccaaggactttgggaagctgaggtgagaggatcacttgagctcaggagttcaagactagcctagccaacagcgagacccctgtctctactaaaaaatttggccaggcgtggtggctcacggctgtaatcccagcactttgggaggtgaggcgggcagatcacctgaggtcaggagttcgagacccagcctggccaacatggtgaaaccccatctctactaaaaatacaaaaattagccaggcatggtggcacattcctgt

SEQ ID NO: 312752 - DNA, 3479 bp, Homo sapiens
aaccccattacggctaggtacgaggctgggtggtggacggctgctgcgcccgcggctccccagtgccccgagtgccccgcgggccccgcgagcgggagtgggacccagccctaggcagaacccaggcgccgcgcccgggacgcccgcggagagagccactcccgcccacgtcccatttcgcccctcgcgtccggagtccccgtggccagttctggaggctgagaagatcgtgaggctgcatctggcaagggccttcttgctgcttcataacatggcagaagacatcatgcgggtgtgtgtctggggaagagacttacagaagtggagttgctgagtcaaagatctaaccatgagctaccctggctatcccccgcccccaggtggctacccaccagctgcaccaggtggtggtccctggggaggtgctgcctaccctcctccgcccagcatgccccccatcgggctggataacgtggccacctatgcggggcagttcaaccaggactatctctcgggaatggcggccaacatgtctgggacatttggaggagccaacatgcccaacctgtaccctggggcccctggggctggctacccaccagtgccccctggcggctttgggcagcccccctctgcccagcagcctgttcctccctatgggatgtatccacccccaggaggaaacccaccctccaggatgccctcatatccgccatacccaggggcccctgtgccgggccagcccatgccaccccccggacagcagcccccaggggcctaccctgggcagccaccagtgacctaccctggtcagcctccagtgccactccctgggcagcagcagccagtgccgagctacccaggatacccggggtctgggactgtcacccccgctgtgcccccaacccagtttggaagccgaggcaccatcactgatgctcccggctttgaccccctgcgagatgccgaggtcctgcggaaggccatgaaaggcttcgggacggatgagcaggccatcattgactgcctggggagtcgctccaacaagcagcggcagcagatcctactttccttcaagacggcttacggcaaggatttgatcaaagatctgaaatctgaactgtcaggaaactttgagaagacaatcttggctctgatgaagaccccagtcctctttgacatttatgagataaaggaagccatcaagggggttggcactgatgaagcctgcctgattgagatcctcgcttcccgcagcaatgagcacatccgagaattaaacagagcctacaaagcagaattcaaaaagaccctggaagaggccattcgaagcgacacatcagggcacttccagcggctcctcatctctctctctcagggaaaccgtgatgaaagcacaaacgtggacatgtcactcgcccagagagatgcccaggagctgtatgcggccggggagaaccgcctgggaacagacgagtccaagttcaatgcggttctgtgctcccggagccgggcccacctggtagcagttttcaatgagtaccagagaatgacaggccgggacattgagaagagcatctgccgggagatgtccggggacctggaggagggcatgctggccgtggtgaaatgtctcaagaataccccagccttctttgcggagaggctcaacaaggccatgaggggggcaggaacaaaggaccggaccctgattcgcatcatggtgtctcgcagcgagaccgacctcctggacatcagatcagagtataagcggatgtacggcaagtcgctgtaccacgacatctcgggagatacttcaggggattaccggaagattctgctgaagatctgtggtggcaatgactgaacagtgactggtggctcacttctgcccacctgccggcaacaccagtgccaggaaaaggccaaaagaatgtctgtttctaacaaatccacaaatagccccgagattcaccgtcctagagcttaggcctgtcttccacccctcctgacccgtatagtgtgccacaggacctgggtcggtctagaactctctcaggatgccttttctaccccatccctcacagcctcttgctgctaaaatagatgtttcatttttctgactcatgcaatcattcccctttgcctgtggctaagacttggcttcatttcgtcatgtaattgtatatttttatttggaggcatattttcttttcttacagtcattgccagacagaggcatacaagtctgtttgctgcatacacatttctggtgagggcgactgggtgggtgaagcaccgtgtcctcgctgaggagagaaagggaggcgtgcctgagagggtagcctgtgcatctggtgagtgtgtcacgagctttgttactgccaaactcactcctttttagaaaaaacaaaaaaaaagggccagaaagtcattccttccatcttccttgcagaaaccacgagaacaaagccagttccctgtcagtgacagggcttcttgtaatttgtggtatgtgccttaaacctgaatgtctgtagccaaaacttgtttccacattaagagtcagccagctctggaatggtctggaaatgtcttcctggtaccaacttgttttcttctgcttgattctgccctgtggctcagaggtctggccttatcagccagtgaaagttcatgtaaccttacgtagagatttgtgtgcaggaaaccctgagcatacactagtttgcagggactcgtaaggacatgggaagggaggttcccgaaatccaggcaggaggcccagacacctgaaaggcaaagggatcttggttggttgcaggtgcagtgaagtccactgaaggtgtggtgcgaagaatgcagtccttcacccaggtcccaggagggaagaagggtgtgtgctaattcctggtgcccctcggcgggggccagagagaaggatggggacaacccagagagtcacaagaccagtgcctcccctcagggtgcctccaggctgaaaggggctcctggctctggtctctggggaccctgtgcccgttggttggtggtgtgagggaagagaatccataagagagtttctgagaattatggtgtcatgtccagaagctagagcttaccttgcatcaggggtctccacccactccttttccaacctcctgcgttgaggtttagaaaagagagaatcgactaggcactatggctcacgcctgtaatccaaggactttgggaagctgaggtgagaggatcacttgagctcaggagttcaagactagcctagccaacagcgagacccctgtctctactaaaaaatttggccaggcgtggtggctcacggctgtaatcccagcactttgggaggtgaggcgggcagatcacctgaggtcaggagttcgagacccagcctggccaacatggtgaaaccccatctctactaaaaatacaaaaattagccaggcatggtggcacattcctgt

SEQ ID NO: 312753 - DNA, 3599 bp, Homo sapiens
cccttgcactgcctctggcacctggggcagccgcgcccgcggagttttccgcccggcgctgacggctgctgcgcccgcggctccccagtgccccgagtgccccgcgggccccgcgagcgggagtgggacccagccctaggcagaacccaggcgccgcgcccgggacgcccgcggagagagccactcccgcccacgtcccatttcgcccctcgcgtccggagtccccgtggccaggtgtgtgtctggggaagagacttacagaagtggagttgctgagtcaaaggaacgatgattccataccttaccaggtccccttgcctgatgaaccagaggttggagaatgaagagagacaggggcctctgacttcccctgttgctggagggatggcaataaggacacaggaagataaatagacagacctggagtcctgagaatgaggcagtgcgtctctacctctgagatctaaccatgagctaccctggctatcccccgcccccaggtggctacccaccagctgcaccaggtggtggtccctggggaggtgctgcctaccctcctccgcccagcatgccccccatcgggctggataacgtggccacctatgcggggcagttcaaccaggactatctctcgggaatggcggccaacatgtctgggacatttggaggagccaacatgcccaacctgtaccctggggcccctggggctggctacccaccagtgccccctggcggctttgggcagcccccctctgcccagcagcctgttcctccctatgggatgtatccacccccaggaggaaacccaccctccaggatgccctcatatccgccatacccaggggcccctgtgccgggccagcccatgccaccccccggacagcagcccccaggggcctaccctgggcagccaccagtgacctaccctggtcagcctccagtgccactccctgggcagcagcagccagtgccgagctacccaggatacccggggtctgggactgtcacccccgctgtgcccccaacccagtttggaagccgaggcaccatcactgatgctcccggctttgaccccctgcgagatgccgaggtcctgcggaaggccatgaaaggcttcgggacggatgagcaggccatcattgactgcctggggagtcgctccaacaagcagcggcagcagatcctactttccttcaagacggcttacggcaaggatttgatcaaagatctgaaatctgaactgtcaggaaactttgagaagacaatcttggctctgatgaagaccccagtcctctttgacatttatgagataaaggaagccatcaagggggttggcactgatgaagcctgcctgattgagatcctcgcttcccgcagcaatgagcacatccgagaattaaacagagcctacaaagcagaattcaaaaagaccctggaagaggccattcgaagcgacacatcagggcacttccagcggctcctcatctctctctctcagggaaaccgtgatgaaagcacaaacgtggacatgtcactcgcccagagagatgcccaggagctgtatgcggccggggagaaccgcctgggaacagacgagtccaagttcaatgcggttctgtgctcccggagccgggcccacctggtagcagttttcaatgagtaccagagaatgacaggccgggacattgagaagagcatctgccgggagatgtccggggacctggaggagggcatgctggccgtggtgaaatgtctcaagaataccccagccttctttgcggagaggctcaacaaggccatgaggggggcaggaacaaaggaccggaccctgattcgcatcatggtgtctcgcagcgagaccgacctcctggacatcagatcagagtataagcggatgtacggcaagtcgctgtaccacgacatctcgggagatacttcaggggattaccggaagattctgctgaagatctgtggtggcaatgactgaacagtgactggtggctcacttctgcccacctgccggcaacaccagtgccaggaaaaggccaaaagaatgtctgtttctaacaaatccacaaatagccccgagattcaccgtcctagagcttaggcctgtcttccacccctcctgacccgtatagtgtgccacaggacctgggtcggtctagaactctctcaggatgccttttctaccccatccctcacagcctcttgctgctaaaatagatgtttcatttttctgactcatgcaatcattcccctttgcctgtggctaagacttggcttcatttcgtcatgtaattgtatatttttatttggaggcatattttcttttcttacagtcattgccagacagaggcatacaagtctgtttgctgcatacacatttctggtgagggcgactgggtgggtgaagcaccgtgtcctcgctgaggagagaaagggaggcgtgcctgagagggtagcctgtgcatctggtgagtgtgtcacgagctttgttactgccaaactcactcctttttagaaaaaacaaaaaaaaagggccagaaagtcattccttccatcttccttgcagaaaccacgagaacaaagccagttccctgtcagtgacagggcttcttgtaatttgtggtatgtgccttaaacctgaatgtctgtagccaaaacttgtttccacattaagagtcagccagctctggaatggtctggaaatgtcttcctggtaccaacttgttttcttctgcttgattctgccctgtggctcagaggtctggccttatcagccagtgaaagttcatgtaaccttacgtagagatttgtgtgcaggaaaccctgagcatacactagtttgcagggactcgtaaggacatgggaagggaggttcccgaaatccaggcaggaggcccagacacctgaaaggcaaagggatcttggttggttgcaggtgcagtgaagtccactgaaggtgtggtgcgaagaatgcagtccttcacccaggtcccaggagggaagaagggtgtgtgctaattcctggtgcccctcggcgggggccagagagaaggatggggacaacccagagagtcacaagaccagtgcctcccctcagggtgcctccaggctgaaaggggctcctggctctggtctctggggaccctgtgcccgttggttggtggtgtgagggaagagaatccataagagagtttctgagaattatggtgtcatgtccagaagctagagcttaccttgcatcaggggtctccacccactccttttccaacctcctgcgttgaggtttagaaaagagagaatcgactaggcactatggctcacgcctgtaatccaaggactttgggaagctgaggtgagaggatcacttgagctcaggagttcaagactagcctagccaacagcgagacccctgtctctactaaaaaatttggccaggcgtggtggctcacggctgtaatcccagcactttgggaggtgaggcgggcagatcacctgaggtcaggagttcgagacccagcctggccaacatggtgaaaccccatctctactaaaaatacaaaaattagccaggcatggtggcacattcctgt

SEQ ID NO: 312754 - DNA, 3290 bp, Homo sapiens
agtgaactggtctgcgacaagcagggcagatgcagcagtttcttctgcagggtcccagttgtggtggtggctgccctttcaagaagctgggtcccacgggccagcaggggctctcaggcagagcctgaatgtgctttcgtcttctcttccagatctaaccatgagctaccctggctatcccccgcccccaggtggctacccaccagctgcaccaggtggtggtccctggggaggtgctgcctaccctcctccgcccagcatgccccccatcgggctggataacgtggccacctatgcggggcagttcaaccaggactatctctcgggaatggcggccaacatgtctgggacatttggaggagccaacatgcccaacctgtaccctggggcccctggggctggctacccaccagtgccccctggcggctttgggcagcccccctctgcccagcagcctgttcctccctatgggatgtatccacccccaggaggaaacccaccctccaggatgccctcatatccgccatacccaggggcccctgtgccgggccagcccatgccaccccccggacagcagcccccaggggcctaccctgggcagccaccagtgacctaccctggtcagcctccagtgccactccctgggcagcagcagccagtgccgagctacccaggatacccggggtctgggactgtcacccccgctgtgcccccaacccagtttggaagccgaggcaccatcactgatgctcccggctttgaccccctgcgagatgccgaggtcctgcggaaggccatgaaaggcttcgggacggatgagcaggccatcattgactgcctggggagtcgctccaacaagcagcggcagcagatcctactttccttcaagacggcttacggcaaggatttgatcaaagatctgaaatctgaactgtcaggaaactttgagaagacaatcttggctctgatgaagaccccagtcctctttgacatttatgagataaaggaagccatcaagggggttggcactgatgaagcctgcctgattgagatcctcgcttcccgcagcaatgagcacatccgagaattaaacagagcctacaaagcagaattcaaaaagaccctggaagaggccattcgaagcgacacatcagggcacttccagcggctcctcatctctctctctcagggaaaccgtgatgaaagcacaaacgtggacatgtcactcgcccagagagatgcccaggagctgtatgcggccggggagaaccgcctgggaacagacgagtccaagttcaatgcggttctgtgctcccggagccgggcccacctggtagcagttttcaatgagtaccagagaatgacaggccgggacattgagaagagcatctgccgggagatgtccggggacctggaggagggcatgctggccgtggtgaaatgtctcaagaataccccagccttctttgcggagaggctcaacaaggccatgaggggggcaggaacaaaggaccggaccctgattcgcatcatggtgtctcgcagcgagaccgacctcctggacatcagatcagagtataagcggatgtacggcaagtcgctgtaccacgacatctcgggagatacttcaggggattaccggaagattctgctgaagatctgtggtggcaatgactgaacagtgactggtggctcacttctgcccacctgccggcaacaccagtgccaggaaaaggccaaaagaatgtctgtttctaacaaatccacaaatagccccgagattcaccgtcctagagcttaggcctgtcttccacccctcctgacccgtatagtgtgccacaggacctgggtcggtctagaactctctcaggatgccttttctaccccatccctcacagcctcttgctgctaaaatagatgtttcatttttctgactcatgcaatcattcccctttgcctgtggctaagacttggcttcatttcgtcatgtaattgtatatttttatttggaggcatattttcttttcttacagtcattgccagacagaggcatacaagtctgtttgctgcatacacatttctggtgagggcgactgggtgggtgaagcaccgtgtcctcgctgaggagagaaagggaggcgtgcctgagagggtagcctgtgcatctggtgagtgtgtcacgagctttgttactgccaaactcactcctttttagaaaaaacaaaaaaaaagggccagaaagtcattccttccatcttccttgcagaaaccacgagaacaaagccagttccctgtcagtgacagggcttcttgtaatttgtggtatgtgccttaaacctgaatgtctgtagccaaaacttgtttccacattaagagtcagccagctctggaatggtctggaaatgtcttcctggtaccaacttgttttcttctgcttgattctgccctgtggctcagaggtctggccttatcagccagtgaaagttcatgtaaccttacgtagagatttgtgtgcaggaaaccctgagcatacactagtttgcagggactcgtaaggacatgggaagggaggttcccgaaatccaggcaggaggcccagacacctgaaaggcaaagggatcttggttggttgcaggtgcagtgaagtccactgaaggtgtggtgcgaagaatgcagtccttcacccaggtcccaggagggaagaagggtgtgtgctaattcctggtgcccctcggcgggggccagagagaaggatggggacaacccagagagtcacaagaccagtgcctcccctcagggtgcctccaggctgaaaggggctcctggctctggtctctggggaccctgtgcccgttggttggtggtgtgagggaagagaatccataagagagtttctgagaattatggtgtcatgtccagaagctagagcttaccttgcatcaggggtctccacccactccttttccaacctcctgcgttgaggtttagaaaagagagaatcgactaggcactatggctcacgcctgtaatccaaggactttgggaagctgaggtgagaggatcacttgagctcaggagttcaagactagcctagccaacagcgagacccctgtctctactaaaaaatttggccaggcgtggtggctcacggctgtaatcccagcactttgggaggtgaggcgggcagatcacctgaggtcaggagttcgagacccagcctggccaacatggtgaaaccccatctctactaaaaatacaaaaattagccaggcatggtggcacattcctgt

SEQ ID NO: 312755 - DNA, 3006 bp, Homo sapiens
cccttgcactgcctctggcacctggggcagccgcgcccgcggagttttccgcccggcgctgacggctgctgcgcccgcggctccccagtgccccgagtgccggggcccctggggctggctacccaccagtgccccctggcggctttgggcagcccccctctgcccagcagcctgttcctccctatgggatgtatccacccccaggaggaaacccaccctccaggatgccctcatatccgccatacccaggggcccctgtgccgggccagcccatgccaccccccggacagcagcccccaggggcctaccctgggcagccaccagtgacctaccctggtcagcctccagtgccactccctgggcagcagcagccagtgccgagctacccaggatacccggggtctgggactgtcacccccgctgtgcccccaacccagtttggaagccgaggcaccatcactgatgctcccggctttgaccccctgcgagatgccgaggtcctgcggaaggccatgaaaggcttcgggacggatgagcaggccatcattgactgcctggggagtcgctccaacaagcagcggcagcagatcctactttccttcaagacggcttacggcaaggatttgatcaaagatctgaaatctgaactgtcaggaaactttgagaagacaatcttggctctgatgaagaccccagtcctctttgacatttatgagataaaggaagccatcaagggggttggcactgatgaagcctgcctgattgagatcctcgcttcccgcagcaatgagcacatccgagaattaaacagagcctacaaagcagaattcaaaaagaccctggaagaggccattcgaagcgacacatcagggcacttccagcggctcctcatctctctctctcagggaaaccgtgatgaaagcacaaacgtggacatgtcactcgcccagagagatgcccaggagctgtatgcggccggggagaaccgcctgggaacagacgagtccaagttcaatgcggttctgtgctcccggagccgggcccacctggtagcagttttcaatgagtaccagagaatgacaggccgggacattgagaagagcatctgccgggagatgtccggggacctggaggagggcatgctggccgtggtgaaatgtctcaagaataccccagccttctttgcggagaggctcaacaaggccatgaggggggcaggaacaaaggaccggaccctgattcgcatcatggtgtctcgcagcgagaccgacctcctggacatcagatcagagtataagcggatgtacggcaagtcgctgtaccacgacatctcgggagatacttcaggggattaccggaagattctgctgaagatctgtggtggcaatgactgaacagtgactggtggctcacttctgcccacctgccggcaacaccagtgccaggaaaaggccaaaagaatgtctgtttctaacaaatccacaaatagccccgagattcaccgtcctagagcttaggcctgtcttccacccctcctgacccgtatagtgtgccacaggacctgggtcggtctagaactctctcaggatgccttttctaccccatccctcacagcctcttgctgctaaaatagatgtttcatttttctgactcatgcaatcattcccctttgcctgtggctaagacttggcttcatttcgtcatgtaattgtatatttttatttggaggcatattttcttttcttacagtcattgccagacagaggcatacaagtctgtttgctgcatacacatttctggtgagggcgactgggtgggtgaagcaccgtgtcctcgctgaggagagaaagggaggcgtgcctgagagggtagcctgtgcatctggtgagtgtgtcacgagctttgttactgccaaactcactcctttttagaaaaaacaaaaaaaaagggccagaaagtcattccttccatcttccttgcagaaaccacgagaacaaagccagttccctgtcagtgacagggcttcttgtaatttgtggtatgtgccttaaacctgaatgtctgtagccaaaacttgtttccacattaagagtcagccagctctggaatggtctggaaatgtcttcctggtaccaacttgttttcttctgcttgattctgccctgtggctcagaggtctggccttatcagccagtgaaagttcatgtaaccttacgtagagatttgtgtgcaggaaaccctgagcatacactagtttgcagggactcgtaaggacatgggaagggaggttcccgaaatccaggcaggaggcccagacacctgaaaggcaaagggatcttggttggttgcaggtgcagtgaagtccactgaaggtgtggtgcgaagaatgcagtccttcacccaggtcccaggagggaagaagggtgtgtgctaattcctggtgcccctcggcgggggccagagagaaggatggggacaacccagagagtcacaagaccagtgcctcccctcagggtgcctccaggctgaaaggggctcctggctctggtctctggggaccctgtgcccgttggttggtggtgtgagggaagagaatccataagagagtttctgagaattatggtgtcatgtccagaagctagagcttaccttgcatcaggggtctccacccactccttttccaacctcctgcgttgaggtttagaaaagagagaatcgactaggcactatggctcacgcctgtaatccaaggactttgggaagctgaggtgagaggatcacttgagctcaggagttcaagactagcctagccaacagcgagacccctgtctctactaaaaaatttggccaggcgtggtggctcacggctgtaatcccagcactttgggaggtgaggcgggcagatcacctgaggtcaggagttcgagacccagcctggccaacatggtgaaaccccatctctactaaaaatacaaaaattagccaggcatggtggcacattcctgt

SEQ ID NO: 312756 - DNA, 3675 bp, Homo sapiens
acggcgagagtggggtcacgggggagatgcgcctctctcgctcctggcgccatctttggcgtgtcaacgaggtgttttccccggccgcgccccaaggggttgacctctccggcaagctcccggtccggaattccgcaatgtttccaagcccgcctcttctggtactccatgaaacctgatcccggtgggcccgctcgggagcacagaaccgcatggaactggactctctttcccagcgttctcccgcccgcatcacctcctggcatctatctggccgagtgacatgtccccgtttgtgctgtcatcacggttccctgagagagagagatgaggacccctgtaaggcgccctgatgtgtcgcttcgaatgccctcttccaggctctttttgaattctgcttttgatagctctgatttaattctcggatgtgctcattgtctgcgggaagcgaggatctcaaatcagcaggcttcatcagctaccaaccccggatgactggcgttcctgttatctcatcaaatctcaaagaggactggggtcttcatcagagccaagatcgtctctcgtccgacagtttcactgacagttcagatttcagcatctttgatctaaatcagttgccgtaacccgtctctgaaggaaagtaggatctactaccactgcttgttggagcgactcccccaggcaggtcaatgatggcctgctcatccgtcccgaagcctctcatggcccttccgcaggaccttcgggcatcatccggcagggggtcaaagaccgggagacatcagtgagtggtcgccatcggcttccaaactgggttgcggggcacatcgggggtgacagtcccagaccccgggtatcctggctagctcggcactgctgctccctccaggatgccctcatatccgccatacccaggggcccctgtgccgggccagcccatgccaccccccggacagcagcccccaggggcctaccctgggcagccaccagtgacctaccctggtcagcctccagtgccactccctgggcagcagcagccagtgccgagctacccaggatacccggggtctgggactgtcacccccgctgtgcccccaacccagtttggaagccgaggcaccatcactgatgctcccggctttgaccccctgcgagatgccgaggtcctgcggaaggccatgaaaggcttcgggacggatgagcaggccatcattgactgcctggggagtcgctccaacaagcagcggcagcagatcctactttccttcaagacggcttacggcaaggatttgatcaaagatctgaaatctgaactgtcaggaaactttgagaagacaatcttggctctgatgaagaccccagtcctctttgacatttatgagataaaggaagccatcaagggggttggcactgatgaagcctgcctgattgagatcctcgcttcccgcagcaatgagcacatccgagaattaaacagagcctacaaagcagaattcaaaaagaccctggaagaggccattcgaagcgacacatcagggcacttccagcggctcctcatctctctctctcagggaaaccgtgatgaaagcacaaacgtggacatgtcactcgcccagagagatgcccaggagctgtatgcggccggggagaaccgcctgggaacagacgagtccaagttcaatgcggttctgtgctcccggagccgggcccacctggtagcagttttcaatgagtaccagagaatgacaggccgggacattgagaagagcatctgccgggagatgtccggggacctggaggagggcatgctggccgtggtgaaatgtctcaagaataccccagccttctttgcggagaggctcaacaaggccatgaggggggcaggaacaaaggaccggaccctgattcgcatcatggtgtctcgcagcgagaccgacctcctggacatcagatcagagtataagcggatgtacggcaagtcgctgtaccacgacatctcgggagatacttcaggggattaccggaagattctgctgaagatctgtggtggcaatgactgaacagtgactggtggctcacttctgcccacctgccggcaacaccagtgccaggaaaaggccaaaagaatgtctgtttctaacaaatccacaaatagccccgagattcaccgtcctagagcttaggcctgtcttccacccctcctgacccgtatagtgtgccacaggacctgggtcggtctagaactctctcaggatgccttttctaccccatccctcacagcctcttgctgctaaaatagatgtttcatttttctgactcatgcaatcattcccctttgcctgtggctaagacttggcttcatttcgtcatgtaattgtatatttttatttggaggcatattttcttttcttacagtcattgccagacagaggcatacaagtctgtttgctgcatacacatttctggtgagggcgactgggtgggtgaagcaccgtgtcctcgctgaggagagaaagggaggcgtgcctgagagggtagcctgtgcatctggtgagtgtgtcacgagctttgttactgccaaactcactcctttttagaaaaaacaaaaaaaaagggccagaaagtcattccttccatcttccttgcagaaaccacgagaacaaagccagttccctgtcagtgacagggcttcttgtaatttgtggtatgtgccttaaacctgaatgtctgtagccaaaacttgtttccacattaagagtcagccagctctggaatggtctggaaatgtcttcctggtaccaacttgttttcttctgcttgattctgccctgtggctcagaggtctggccttatcagccagtgaaagttcatgtaaccttacgtagagatttgtgtgcaggaaaccctgagcatacactagtttgcagggactcgtaaggacatgggaagggaggttcccgaaatccaggcaggaggcccagacacctgaaaggcaaagggatcttggttggttgcaggtgcagtgaagtccactgaaggtgtggtgcgaagaatgcagtccttcacccaggtcccaggagggaagaagggtgtgtgctaattcctggtgcccctcggcgggggccagagagaaggatggggacaacccagagagtcacaagaccagtgcctcccctcagggtgcctccaggctgaaaggggctcctggctctggtctctggggaccctgtgcccgttggttggtggtgtgagggaagagaatccataagagagtttctgagaattatggtgtcatgtccagaagctagagcttaccttgcatcaggggtctccacccactccttttccaacctcctgcgttgaggtttagaaaagagagaatcgactaggcactatggctcacgcctgtaatccaaggactttgggaagctgaggtgagaggatcacttgagctcaggagttcaagactagcctagccaacagcgagacccctgtctctactaaaaaatttggccaggcgtggtggctcacggctgtaatcccagcactttgggaggtgaggcgggcagatcacctgaggtcaggagttcgagacccagcctggccaacatggtgaaaccccatctctactaaaaatacaaaaattagccaggcatggtggcacattcctgt

SEQ ID NO: 312757 - DNA, 2856 bp, Homo sapiens
cccttgcactgcctctggcacctggggcagccgcgcccgcggagttttccgcccggcgctgacggctgctgcgcccgcggctccccagtgccccgagtgccgcccctgtgccgggccagcccatgccaccccccggacagcagcccccaggggcctaccctgggcagccaccagtgacctaccctggtcagcctccagtgccactccctgggcagcagcagccagtgccgagctacccaggatacccggggtctgggactgtcacccccgctgtgcccccaacccagtttggaagccgaggcaccatcactgatgctcccggctttgaccccctgcgagatgccgaggtcctgcggaaggccatgaaaggcttcgggacggatgagcaggccatcattgactgcctggggagtcgctccaacaagcagcggcagcagatcctactttccttcaagacggcttacggcaaggatttgatcaaagatctgaaatctgaactgtcaggaaactttgagaagacaatcttggctctgatgaagaccccagtcctctttgacatttatgagataaaggaagccatcaagggggttggcactgatgaagcctgcctgattgagatcctcgcttcccgcagcaatgagcacatccgagaattaaacagagcctacaaagcagaattcaaaaagaccctggaagaggccattcgaagcgacacatcagggcacttccagcggctcctcatctctctctctcagggaaaccgtgatgaaagcacaaacgtggacatgtcactcgcccagagagatgcccaggagctgtatgcggccggggagaaccgcctgggaacagacgagtccaagttcaatgcggttctgtgctcccggagccgggcccacctggtagcagttttcaatgagtaccagagaatgacaggccgggacattgagaagagcatctgccgggagatgtccggggacctggaggagggcatgctggccgtggtgaaatgtctcaagaataccccagccttctttgcggagaggctcaacaaggccatgaggggggcaggaacaaaggaccggaccctgattcgcatcatggtgtctcgcagcgagaccgacctcctggacatcagatcagagtataagcggatgtacggcaagtcgctgtaccacgacatctcgggagatacttcaggggattaccggaagattctgctgaagatctgtggtggcaatgactgaacagtgactggtggctcacttctgcccacctgccggcaacaccagtgccaggaaaaggccaaaagaatgtctgtttctaacaaatccacaaatagccccgagattcaccgtcctagagcttaggcctgtcttccacccctcctgacccgtatagtgtgccacaggacctgggtcggtctagaactctctcaggatgccttttctaccccatccctcacagcctcttgctgctaaaatagatgtttcatttttctgactcatgcaatcattcccctttgcctgtggctaagacttggcttcatttcgtcatgtaattgtatatttttatttggaggcatattttcttttcttacagtcattgccagacagaggcatacaagtctgtttgctgcatacacatttctggtgagggcgactgggtgggtgaagcaccgtgtcctcgctgaggagagaaagggaggcgtgcctgagagggtagcctgtgcatctggtgagtgtgtcacgagctttgttactgccaaactcactcctttttagaaaaaacaaaaaaaaagggccagaaagtcattccttccatcttccttgcagaaaccacgagaacaaagccagttccctgtcagtgacagggcttcttgtaatttgtggtatgtgccttaaacctgaatgtctgtagccaaaacttgtttccacattaagagtcagccagctctggaatggtctggaaatgtcttcctggtaccaacttgttttcttctgcttgattctgccctgtggctcagaggtctggccttatcagccagtgaaagttcatgtaaccttacgtagagatttgtgtgcaggaaaccctgagcatacactagtttgcagggactcgtaaggacatgggaagggaggttcccgaaatccaggcaggaggcccagacacctgaaaggcaaagggatcttggttggttgcaggtgcagtgaagtccactgaaggtgtggtgcgaagaatgcagtccttcacccaggtcccaggagggaagaagggtgtgtgctaattcctggtgcccctcggcgggggccagagagaaggatggggacaacccagagagtcacaagaccagtgcctcccctcagggtgcctccaggctgaaaggggctcctggctctggtctctggggaccctgtgcccgttggttggtggtgtgagggaagagaatccataagagagtttctgagaattatggtgtcatgtccagaagctagagcttaccttgcatcaggggtctccacccactccttttccaacctcctgcgttgaggtttagaaaagagagaatcgactaggcactatggctcacgcctgtaatccaaggactttgggaagctgaggtgagaggatcacttgagctcaggagttcaagactagcctagccaacagcgagacccctgtctctactaaaaaatttggccaggcgtggtggctcacggctgtaatcccagcactttgggaggtgaggcgggcagatcacctgaggtcaggagttcgagacccagcctggccaacatggtgaaaccccatctctactaaaaatacaaaaattagccaggcatggtggcacattcctgt

SEQ ID NO: 312758 - DNA, 2641 bp, Homo sapiens
tgtatacggacacgcacacgaccgtctccatccccgagcggcccctttggcaaggaagacgaggcaggtctctttggaagccgaggcaccatcactgatgctcccggctttgaccccctgcgagatgccgaggtcctgcggaaggccatgaaaggcttcgggacggatgagcaggccatcattgactgcctggggagtcgctccaacaagcagcggcagcagatcctactttccttcaagacggcttacggcaaggatttgatcaaagatctgaaatctgaactgtcaggaaactttgagaagacaatcttggctctgatgaagaccccagtcctctttgacatttatgagataaaggaagccatcaagggggttggcactgatgaagcctgcctgattgagatcctcgcttcccgcagcaatgagcacatccgagaattaaacagagcctacaaagcagaattcaaaaagaccctggaagaggccattcgaagcgacacatcagggcacttccagcggctcctcatctctctctctcagggaaaccgtgatgaaagcacaaacgtggacatgtcactcgcccagagagatgcccaggagctgtatgcggccggggagaaccgcctgggaacagacgagtccaagttcaatgcggttctgtgctcccggagccgggcccacctggtagcagttttcaatgagtaccagagaatgacaggccgggacattgagaagagcatctgccgggagatgtccggggacctggaggagggcatgctggccgtggtgaaatgtctcaagaataccccagccttctttgcggagaggctcaacaaggccatgaggggggcaggaacaaaggaccggaccctgattcgcatcatggtgtctcgcagcgagaccgacctcctggacatcagatcagagtataagcggatgtacggcaagtcgctgtaccacgacatctcgggagatacttcaggggattaccggaagattctgctgaagatctgtggtggcaatgactgaacagtgactggtggctcacttctgcccacctgccggcaacaccagtgccaggaaaaggccaaaagaatgtctgtttctaacaaatccacaaatagccccgagattcaccgtcctagagcttaggcctgtcttccacccctcctgacccgtatagtgtgccacaggacctgggtcggtctagaactctctcaggatgccttttctaccccatccctcacagcctcttgctgctaaaatagatgtttcatttttctgactcatgcaatcattcccctttgcctgtggctaagacttggcttcatttcgtcatgtaattgtatatttttatttggaggcatattttcttttcttacagtcattgccagacagaggcatacaagtctgtttgctgcatacacatttctggtgagggcgactgggtgggtgaagcaccgtgtcctcgctgaggagagaaagggaggcgtgcctgagagggtagcctgtgcatctggtgagtgtgtcacgagctttgttactgccaaactcactcctttttagaaaaaacaaaaaaaaagggccagaaagtcattccttccatcttccttgcagaaaccacgagaacaaagccagttccctgtcagtgacagggcttcttgtaatttgtggtatgtgccttaaacctgaatgtctgtagccaaaacttgtttccacattaagagtcagccagctctggaatggtctggaaatgtcttcctggtaccaacttgttttcttctgcttgattctgccctgtggctcagaggtctggccttatcagccagtgaaagttcatgtaaccttacgtagagatttgtgtgcaggaaaccctgagcatacactagtttgcagggactcgtaaggacatgggaagggaggttcccgaaatccaggcaggaggcccagacacctgaaaggcaaagggatcttggttggttgcaggtgcagtgaagtccactgaaggtgtggtgcgaagaatgcagtccttcacccaggtcccaggagggaagaagggtgtgtgctaattcctggtgcccctcggcgggggccagagagaaggatggggacaacccagagagtcacaagaccagtgcctcccctcagggtgcctccaggctgaaaggggctcctggctctggtctctggggaccctgtgcccgttggttggtggtgtgagggaagagaatccataagagagtttctgagaattatggtgtcatgtccagaagctagagcttaccttgcatcaggggtctccacccactccttttccaacctcctgcgttgaggtttagaaaagagagaatcgactaggcactatggctcacgcctgtaatccaaggactttgggaagctgaggtgagaggatcacttgagctcaggagttcaagactagcctagccaacagcgagacccctgtctctactaaaaaatttggccaggcgtggtggctcacggctgtaatcccagcactttgggaggtgaggcgggcagatcacctgaggtcaggagttcgagacccagcctggccaacatggtgaaaccccatctctactaaaaatacaaaaattagccaggcatggtggcacattcctgt

SEQ ID NO: 312759 - DNA, 2630 bp, Homo sapiens
  misc_feature (25)..(26): n is a, c, g, or t
aaaagggcgaggctctgacgaacannattgcaaagacaaggccaacttcgtattggacaagtttggaagccgaggcaccatcactgatgctcccggctttgaccccctgcgagatgccgaggtcctgcggaaggccatgaaaggcttcgggacggatgagcaggccatcattgactgcctggggagtcgctccaacaagcagcggcagcagatcctactttccttcaagacggcttacggcaaggatttgatcaaagatctgaaatctgaactgtcaggaaactttgagaagacaatcttggctctgatgaagaccccagtcctctttgacatttatgagataaaggaagccatcaagggggttggcactgatgaagcctgcctgattgagatcctcgcttcccgcagcaatgagcacatccgagaattaaacagagcctacaaagcagaattcaaaaagaccctggaagaggccattcgaagcgacacatcagggcacttccagcggctcctcatctctctctctcagggaaaccgtgatgaaagcacaaacgtggacatgtcactcgcccagagagatgcccaggagctgtatgcggccggggagaaccgcctgggaacagacgagtccaagttcaatgcggttctgtgctcccggagccgggcccacctggtagcagttttcaatgagtaccagagaatgacaggccgggacattgagaagagcatctgccgggagatgtccggggacctggaggagggcatgctggccgtggtgaaatgtctcaagaataccccagccttctttgcggagaggctcaacaaggccatgaggggggcaggaacaaaggaccggaccctgattcgcatcatggtgtctcgcagcgagaccgacctcctggacatcagatcagagtataagcggatgtacggcaagtcgctgtaccacgacatctcgggagatacttcaggggattaccggaagattctgctgaagatctgtggtggcaatgactgaacagtgactggtggctcacttctgcccacctgccggcaacaccagtgccaggaaaaggccaaaagaatgtctgtttctaacaaatccacaaatagccccgagattcaccgtcctagagcttaggcctgtcttccacccctcctgacccgtatagtgtgccacaggacctgggtcggtctagaactctctcaggatgccttttctaccccatccctcacagcctcttgctgctaaaatagatgtttcatttttctgactcatgcaatcattcccctttgcctgtggctaagacttggcttcatttcgtcatgtaattgtatatttttatttggaggcatattttcttttcttacagtcattgccagacagaggcatacaagtctgtttgctgcatacacatttctggtgagggcgactgggtgggtgaagcaccgtgtcctcgctgaggagagaaagggaggcgtgcctgagagggtagcctgtgcatctggtgagtgtgtcacgagctttgttactgccaaactcactcctttttagaaaaaacaaaaaaaaagggccagaaagtcattccttccatcttccttgcagaaaccacgagaacaaagccagttccctgtcagtgacagggcttcttgtaatttgtggtatgtgccttaaacctgaatgtctgtagccaaaacttgtttccacattaagagtcagccagctctggaatggtctggaaatgtcttcctggtaccaacttgttttcttctgcttgattctgccctgtggctcagaggtctggccttatcagccagtgaaagttcatgtaaccttacgtagagatttgtgtgcaggaaaccctgagcatacactagtttgcagggactcgtaaggacatgggaagggaggttcccgaaatccaggcaggaggcccagacacctgaaaggcaaagggatcttggttggttgcaggtgcagtgaagtccactgaaggtgtggtgcgaagaatgcagtccttcacccaggtcccaggagggaagaagggtgtgtgctaattcctggtgcccctcggcgggggccagagagaaggatggggacaacccagagagtcacaagaccagtgcctcccctcagggtgcctccaggctgaaaggggctcctggctctggtctctggggaccctgtgcccgttggttggtggtgtgagggaagagaatccataagagagtttctgagaattatggtgtcatgtccagaagctagagcttaccttgcatcaggggtctccacccactccttttccaacctcctgcgttgaggtttagaaaagagagaatcgactaggcactatggctcacgcctgtaatccaaggactttgggaagctgaggtgagaggatcacttgagctcaggagttcaagactagcctagccaacagcgagacccctgtctctactaaaaaatttggccaggcgtggtggctcacggctgtaatcccagcactttgggaggtgaggcgggcagatcacctgaggtcaggagttcgagacccagcctggccaacatggtgaaaccccatctctactaaaaatacaaaaattagccaggcatggtggcacattcctgt

SEQ ID NO: 312760 - DNA, 2465 bp, Homo sapiens
cccttgcactgcctctggcacctggggcagccgcgcccgcggagttttccgcccggcgctgacggctgctgcgcccgcggctccccagtgccccgagtgccccgcgggccccgcgagcgggagtgggacccagccctaggcagaacccaggcgccgcgcccgggacgcccgcggagagagccactcccgcccacgtcccatttcgcccctcgcgtccggagtccccgtggccaggtgtgtgtctggggaagagacttacagaagtggagttgctgagtcaaagatctaaccatgagctaccctggctatcccccgcccccaggtggctacccaccagctgcaccaggtggtggtccctggggaggtgctgcctaccctcctccgcccagcatgccccccatcgggctggataacgtggccacctatgcggggcagttcaaccaggactatctctcgggaatggcggccaacatgtctgggacatttggaggagccaacatgcccaacctgtaccctggggcccctggggctggctacccaccagtgccccctggcggctttgggcagcccccctctgcccagcagcctgttcctccctatgggatgtatccacccccaggaggaaacccaccctccaggatgccctcatatccgccatacccaggggcccctgtgccgggccagcccatgccaccccccggacagcagcccccaggggcctaccctgggcagccaccagtgacctaccctggtcagcctccagtgccactccctgggcagcagcagccagtgccgagctacccaggatacccggggtctgggactgtcacccccgctgtgcccccaacccagtttggaagccgaggcaccatcactgatgctcccggctttgaccccctgcgagatgccgaggtcctgcggaaggccatgaaaggcttcgggacggatgagcaggccatcattgactgcctggggagtcgctccaacaagcagcggcagcagatcctactttccttcaagacggcttacggcaaggatttgatcaaagatctgaaatctgaactgtcaggaaactttgagaagacaatcttggctctgatgaagaccccagtcctctttgacatttatgagataaaggaagccatcaagggggttggcactgatgaagcctgcctgattgagatcctcgcttcccgcagcaatgagcacatccgagaattaaacagagcctacaaagcagaattcaaaaagaccctggaagaggccattcgaagcgacacatcagggcacttccagcggctcctcatctctctctctcagggaaaccgtgatgaaagcacaaacgtggacatgtcactcgcccagagagatgcccaggagctgtatgcggccggggagaaccgcctgggaacagacgagtccaagttcaatgcggttctgtgctcccggagccgggcccacctggtagcagttttcaatgagtaccagagaatgacaggccgggacattgagaagagcatctgccgggagatgtccggggacctggaggagggcatgctggccgtggtgaaatgtctcaagaataccccagccttctttgcggagaggctcaacaaggccatgaggggggcaggaacaaaggaccggaccctgattcgcatcatggtgtctcgcagcgagaccgacctcctggacatcagatcagagtataagcggatgtacggcaagtcgctgtaccacgacatctcgggagatacttcaggggattaccggaagattctgctgaagatctgtggtggcaatgactgaacagtgactggtggctcacttctgcccacctgccggcaacaccagtgccaggaaaaggccaaaagaatgtctgtttctaacaaatccacaaatagccccgagattcaccgtcctagagcttaggcctgtcttccacccctcctgacccgtatagtgtgccacaggacctgggtcggtctagaactctctcaggatgccttttctaccccatccctcacagcctcttgctgctaaaatagatgtttcatttttctaaaaaaaaaaaaaaaaaaaaaaaagaaaaaaaaaaaaaaaacaaaacaccacacaaaaaaagaaggagggggggacgggcagctcacaactcaccagccgagagggggacacacgcagcagacgcacaccgacttgtagacaaagggcgacgcacacaaggggggtgatgacagatcaacacaggaggcacgggccgaaaaataacacagcacaggagaggaaaaaaaccgccagaccggggagagagagactagacaacagaaacatcctctcgcgcgacggaagacgcaaagacaacacaacgcacacgagaaagcccgcccagaacacaacagccagaagggtggtgcaacacaacagtcacccgggaaaagcgacgggcgggcaagaaaaatcacggg

SEQ ID NO: 312761 - DNA, 2483 bp, Homo sapiens
cccttgcactgcctctggcacctggggcagccgcgcccgcggagttttccgcccggcgctgacggctgctgcgcccgcggctccccagtgccccgagtgccccgcgggccccgcgagcgggagtgggacccagccctaggcagaacccaggcgccgcgcccgggacgcccgcggagagagccactcccgcccacgtcccatttcgcccctcgcgtccggagtccccgtggccaggtgtgtgtctggggaagagacttacagaagtggagttgctgagtcaaagatctaaccatgagctaccctggctatcccccgcccccaggtggctacccaccagctgcaccaggtggtggtccctggggaggtgctgcctaccctcctccgcccagcatgccccccatcgggctggataacgtggccacctatgcggggcagttcaaccaggactatctctcgggaatggcggccaacatgtctgggacatttggaggagccaacatgcccaacctgtaccctggggcccctggggctggctacccaccagtgccccctggcggctttgggcagcccccctctgcccagcagcctgttcctccctatgggatgtatccacccccaggaggaaacccaccctccaggatgccctcatatccgccatacccaggggcccctgtgccgggccagcccatgccaccccccggacagcagcccccaggggcctaccctgggcagccaccagtgacctaccctggtcagcctccagtgccactccctgggcagcagcagccagtgccgagctacccaggatacccggggtctgggactgtcacccccgctgtgcccccaacccagtttggaagccgaggcaccatcactgatgctcccggctttgaccccctgcgagatgccgaggtcctgcggaaggccatgaaaggcttcgggacggatgagcaggccatcattgactgcctggggagtcgctccaacaagcagcggcagcagatcctactttccttcaagacggcttacggcaaggatttgatcaaagatctgaaatctgaactgtcaggaaactttgagaagacaatcttggctctgatgaagaccccagtcctctttgacatttatgagataaaggaagccatcaagggggttggcactgatgaagcctgcctgattgagatcctcgcttcccgcagcaatgagcacatccgagaattaaacagagcctacaaagcagaattcaaaaagaccctggaagaggccattcgaagcgacacatcagggcacttccagcggctcctcatctctctctctcagggaaaccgtgatgaaagcacaaacgtggacatgtcactcgcccagagagatgcccaggagctgtatgcggccggggagaaccgcctgggaacagacgagtccaagttcaatgcggttctgtgctcccggagccgggcccacctggtagcagttttcaatgagtaccagagaatgacaggccgggacattgagaagagcatctgccgggagatgtccggggacctggaggagggcatgctggccgtggtgaaatgtctcaagaataccccagccttctttgcggagaggctcaacaaggccatgaggggggcaggaacaaaggaccggaccctgattcgcatcatggtgtctcgcagcgagaccgacctcctggacatcagatcagagtataagcggatgtacggcaagtcgctgtaccacgacatctcgggagatacttcaggggattaccggaagattctgctgaagatctgtggtggcaatgactgaacagtgactggtggctcacttctgcccacctgccggcaacaccagtgccaggaaaaggccaaaagaatgtctgtttctaacaaatccacaaatagccccgagattcaccgtcctagagcttaggcctgtcttccacccctcctgacccgtatagtgtgccacaggacctgggtcggtctagaactctctcaggatgccttttctaccccatccctcacagcctcttgctgctaaaatagatgtttcatttttctaaaaaaaaaaaaaaaaaaaaaaaaaaaaaaaaaaaaaaaaaaaaaaaaaaaaaaaaaaaaaaaaaaaaaaaaaaaaaaaaaaaaaaaaaaaaaaaaaaaaaaaaaaaaaaagagggggcgcgcggcgcgcgcaccaagctactcaccgccgagggagggcgcccggaccacgcccacgccaccccataccgcaaacgagccggcccgcacacaggcggcgcgcagctgttatatataataacaccggagccagcgagggcacgacgcgacgctaatattaacaccaccgccggcctccaggtgctgaggacacaacgttcactacactgtgcttcacttcttatgtcggagagcaagaaccctacctccttcgctccggtcggcgggcccacactcatgtgtggcacgaaacagaacaaa

SEQ ID NO: 312762 - DNA, 2506 bp, Homo sapiens
cccttgcactgcctctggcacctggggcagccgcgcccgcggagttttccgcccggcgctgacggctgctgcgcccgcggctccccagtgccccgagtgccccgcgggccccgcgagcgggagtgggacccagccctaggcagaacccaggcgccgcgcccgggacgcccgcggagagagccactcccgcccacgtcccatttcgcccctcgcgtccggagtccccgtggccagggggttggcactgatgaagcctgcctgattgagatcctcgcttcccgcagcaatgagcacatccgagaattaaacagagcctacaaagcagaattcaaaaagaccctggaagaggccattcgaagcgacacatcagggcacttccagcggctcctcatctctctctctcagggaaaccgtgatgaaagcacaaacgtggacatgtcactcgcccagagagatgcccaggagctgtatgcggccggggagaaccgcctgggaacagacgagtccaagttcaatgcggttctgtgctcccggagccgggcccacctggtagcagttttcaatgagtaccagagaatgacaggccgggacattgagaagagcatctgccgggagatgtccggggacctggaggagggcatgctggccgtggtgaaatgtctcaagaataccccagccttctttgcggagaggctcaacaaggccatgaggggggcaggaacaaaggaccggaccctgattcgcatcatggtgtctcgcagcgagaccgacctcctggacatcagatcagagtataagcggatgtacggcaagtcgctgtaccacgacatctcgggagatacttcaggggattaccggaagattctgctgaagatctgtggtggcaatgactgaacagtgactggtggctcacttctgcccacctgccggcaacaccagtgccaggaaaaggccaaaagaatgtctgtttctaacaaatccacaaatagccccgagattcaccgtcctagagcttaggcctgtcttccacccctcctgacccgtatagtgtgccacaggacctgggtcggtctagaactctctcaggatgccttttctaccccatccctcacagcctcttgctgctaaaatagatgtttcatttttctgactcatgcaatcattcccctttgcctgtggctaagacttggcttcatttcgtcatgtaattgtatatttttatttggaggcatattttcttttcttacagtcattgccagacagaggcatacaagtctgtttgctgcatacacatttctggtgagggcgactgggtgggtgaagcaccgtgtcctcgctgaggagagaaagggaggcgtgcctgagagggtagcctgtgcatctggtgagtgtgtcacgagctttgttactgccaaactcactcctttttagaaaaaacaaaaaaaaagggccagaaagtcattccttccatcttccttgcagaaaccacgagaacaaagccagttccctgtcagtgacagggcttcttgtaatttgtggtatgtgccttaaacctgaatgtctgtagccaaaacttgtttccacattaagagtcagccagctctggaatggtctggaaatgtcttcctggtaccaacttgttttcttctgcttgattctgccctgtggctcagaggtctggccttatcagccagtgaaagttcatgtaaccttacgtagagatttgtgtgcaggaaaccctgagcatacactagtttgcagggactcgtaaggacatgggaagggaggttcccgaaatccaggcaggaggcccagacacctgaaaggcaaagggatcttggttggttgcaggtgcagtgaagtccactgaaggtgtggtgcgaagaatgcagtccttcacccaggtcccaggagggaagaagggtgtgtgctaattcctggtgcccctcggcgggggccagagagaaggatggggacaacccagagagtcacaagaccagtgcctcccctcagggtgcctccaggctgaaaggggctcctggctctggtctctggggaccctgtgcccgttggttggtggtgtgagggaagagaatccataagagagtttctgagaattatggtgtcatgtccagaagctagagcttaccttgcatcaggggtctccacccactccttttccaacctcctgcgttgaggtttagaaaagagagaatcgactaggcactatggctcacgcctgtaatccaaggactttgggaagctgaggtgagaggatcacttgagctcaggagttcaagactagcctagccaacagcgagacccctgtctctactaaaaaatttggccaggcgtggtggctcacggctgtaatcccagcactttgggaggtgaggcgggcagatcacctgaggtcaggagttcgagacccagcctggccaacatggtgaaaccccatctctactaaaaatacaaaaattagccaggcatggtggcacattcctgt

SEQ ID NO: 312763 - DNA, 2098 bp, Homo sapiens
ggacgcgtgggtcgacccacgcgtccgatgtcactcgcccagagagatgcccaggagctgtatgcggccggggagaaccgcctgggaacagacgagtccaagttcaatgcggttctgtgctcccggagccgggcccacctggtagcagttttcaatgagtaccagagaatgacaggccgggacattgagaagagcatctgccgggagatgtccggggacctggaggagggcatgctggccgtggtgaaatgtctcaagaataccccagccttctttgcggagaggctcaacaaggccatgaggggggcaggaacaaaggaccggaccctgattcgcatcatggtgtctcgcagcgagaccgacctcctggacatcagatcagagtataagcggatgtacggcaagtcgctgtaccacgacatctcgggagatacttcaggggattaccggaagattctgctgaagatctgtggtggcaatgactgaacagtgactggtggctcacttctgcccacctgccggcaacaccagtgccaggaaaaggccaaaagaatgtctgtttctaacaaatccacaaatagccccgagattcaccgtcctagagcttaggcctgtcttccacccctcctgacccgtatagtgtgccacaggacctgggtcggtctagaactctctcaggatgccttttctaccccatccctcacagcctcttgctgctaaaatagatgtttcatttttctgactcatgcaatcattcccctttgcctgtggctaagacttggcttcatttcgtcatgtaattgtatatttttatttggaggcatattttcttttcttacagtcattgccagacagaggcatacaagtctgtttgctgcatacacatttctggtgagggcgactgggtgggtgaagcaccgtgtcctcgctgaggagagaaagggaggcgtgcctgagagggtagcctgtgcatctggtgagtgtgtcacgagctttgttactgccaaactcactcctttttagaaaaaacaaaaaaaaagggccagaaagtcattccttccatcttccttgcagaaaccacgagaacaaagccagttccctgtcagtgacagggcttcttgtaatttgtggtatgtgccttaaacctgaatgtctgtagccaaaacttgtttccacattaagagtcagccagctctggaatggtctggaaatgtcttcctggtaccaacttgttttcttctgcttgattctgccctgtggctcagaggtctggccttatcagccagtgaaagttcatgtaaccttacgtagagatttgtgtgcaggaaaccctgagcatacactagtttgcagggactcgtaaggacatgggaagggaggttcccgaaatccaggcaggaggcccagacacctgaaaggcaaagggatcttggttggttgcaggtgcagtgaagtccactgaaggtgtggtgcgaagaatgcagtccttcacccaggtcccaggagggaagaagggtgtgtgctaattcctggtgcccctcggcgggggccagagagaaggatggggacaacccagagagtcacaagaccagtgcctcccctcagggtgcctccaggctgaaaggggctcctggctctggtctctggggaccctgtgcccgttggttggtggtgtgagggaagagaatccataagagagtttctgagaattatggtgtcatgtccagaagctagagcttaccttgcatcaggggtctccacccactccttttccaacctcctgcgttgaggtttagaaaagagagaatcgactaggcactatggctcacgcctgtaatccaaggactttgggaagctgaggtgagaggatcacttgagctcaggagttcaagactagcctagccaacagcgagacccctgtctctactaaaaaatttggccaggcgtggtggctcacggctgtaatcccagcactttgggaggtgaggcgggcagatcacctgaggtcaggagttcgagacccagcctggccaacatggtgaaaccccatctctactaaaaatacaaaaattagccaggcatggtggcacattcctgt

SEQ ID NO: 312764 - DNA, 3298 bp, Homo sapiens
cccttgcactgcctctggcacctggggcagccgcgcccgcggagttttccgcccggcgctgacggctgctgcgcccgcggctccccagtgccccgagtgccccgcgggccccgcgagcgggagtgggacccagccctaggcagaacccaggcgccgcgcccgggacgcccgcggagagagccactcccgcccacgtcccatttcgcccctcgcgtccggagtccccgtggccaggtgtgtgtctggggaagagacttacagaagtggagttgctgagtcaaagatctaaccatgagctaccctggctatcccccgcccccaggtggctacccaccagctgcaccaggtggtggtccctggggaggtgctgcctaccctcctccgcccagcatgccccccatcgggctggataacgtggccacctatgcggggcagttcaaccaggactatctctcgggaatggcggccaacatgtctgggacatttggaggagccaacatgcccaacctgtaccctggggcccctggggctggctacccaccagtgccccctggcggctttgggcagcccccctctgcccagcagcctgttcctccctatgggatgtatccacccccaggaggaaacccaccctccaggatgccctcatatccgccatacccaggggcccctgtgccgggccagcccatgccaccccccggacagcagcccccaggggcctaccctgggcagccaccagtgacctaccctggtcagcctccagtgccactccctgggcagcagcagccagtgccgagctacccaggatacccggggtctgggactgtcacccccgctgtgcccccaacccagtttggaagccgaggcaccatcactgatgctcccggctttgaccccctgcgagatgccgaggtcctgcggaaggccatgaaaggcttcgggacggatgagcaggccatcattgactgcctggggagtcgctccaacaagcagcggcagcagatcctactttccttcaagacggcttacggcaaggatttgatcaaagatctgaaatctgaactgtcaggaaactttgagaagacaatcttggctctgatgaagaccccagtcctctttgacatttatgagataaaggaagccatcaagggggttggcactgatgaagcctgcctgattgagatcctcgcttcccgcagcaatgagcacatccgagaattaaacagagcctacaaagcagaattcaaaaagaccctggaagaggccattcgaagcgacacatcagggcacttccagcggctcctcatctctctctctcagggaaaccgtgatgaaagcacaaacgtggacatgtcactcgcccagagagatgcccaggagctgtatgcggccggggagaaccgcctgggaacagacgagtccaagttcaatgcggttctgtgctcccggagccgggcccacctggtagcagttttcaatgagtaccagagaatgacaggccgggacattgagaagagcatctgccgggagatgtccggggacctggaggagggcatgctggccgtggtgaaatgtctcaagaataccccagccttctttgcggagaggctcaacaaggccatgaggggagatacttcaggggattaccggaagattctgctgaagatctgtggtggcaatgactgaacagtgactggtggctcacttctgcccacctgccggcaacaccagtgccaggaaaaggccaaaagaatgtctgtttctaacaaatccacaaatagccccgagattcaccgtcctagagcttaggcctgtcttccacccctcctgacccgtatagtgtgccacaggacctgggtcggtctagaactctctcaggatgccttttctaccccatccctcacagcctcttgctgctaaaatagatgtttcatttttctgactcatgcaatcattcccctttgcctgtggctaagacttggcttcatttcgtcatgtaattgtatatttttatttggaggcatattttcttttcttacagtcattgccagacagaggcatacaagtctgtttgctgcatacacatttctggtgagggcgactgggtgggtgaagcaccgtgtcctcgctgaggagagaaagggaggcgtgcctgagagggtagcctgtgcatctggtgagtgtgtcacgagctttgttactgccaaactcactcctttttagaaaaaacaaaaaaaaagggccagaaagtcattccttccatcttccttgcagaaaccacgagaacaaagccagttccctgtcagtgacagggcttcttgtaatttgtggtatgtgccttaaacctgaatgtctgtagccaaaacttgtttccacattaagagtcagccagctctggaatggtctggaaatgtcttcctggtaccaacttgttttcttctgcttgattctgccctgtggctcagaggtctggccttatcagccagtgaaagttcatgtaaccttacgtagagatttgtgtgcaggaaaccctgagcatacactagtttgcagggactcgtaaggacatgggaagggaggttcccgaaatccaggcaggaggcccagacacctgaaaggcaaagggatcttggttggttgcaggtgcagtgaagtccactgaaggtgtggtgcgaagaatgcagtccttcacccaggtcccaggagggaagaagggtgtgtgctaattcctggtgcccctcggcgggggccagagagaaggatggggacaacccagagagtcacaagaccagtgcctcccctcagggtgcctccaggctgaaaggggctcctggctctggtctctggggaccctgtgcccgttggttggtggtgtgagggaagagaatccataagagagtttctgagaattatggtgtcatgtccagaagctagagcttaccttgcatcaggggtctccacccactccttttccaacctcctgcgttgaggtttagaaaagagagaatcgactaggcactatggctcacgcctgtaatccaaggactttgggaagctgaggtgagaggatcacttgagctcaggagttcaagactagcctagccaacagcgagacccctgtctctactaaaaaatttggccaggcgtggtggctcacggctgtaatcccagcactttgggaggtgaggcgggcagatcacctgaggtcaggagttcgagacccagcctggccaacatggtgaaaccccatctctactaaaaatacaaaaattagccaggcatggtggcacattcctgt

SEQ ID NO: 312765 - DNA, 1985 bp, Homo sapiens
cccttgcactgcctctggcacctggggcagccgcgcccgcggagttttccgcccggcgctgacggctgctgcgcccgcggctccccagtgccccgagtgccccgcgggccccgcgagcgggagtgggacccagccctaggcagaacccaggcgccgcgcccgggacgcccgcggagagagccactcccgcccacgtcccatttcgcccctcgcgtccggagtccccgtggccaggtgtgtgtctggggaagagacttacagaagtggagttgctgagtcaaagatctaaccatgagctaccctggctatcccccgcccccaggtggctacccaccagctgcaccaggtggtggtccctggggaggtgctgcctaccctcctccgcccagcatgccccccatcgggctggataacgtggccacctatgcggggcagttcaaccaggactatctctcgggaatggcggccaacatgtctgggacatttggaggagccaacatgcccaacctgtaccctggggcccctggggctggctacccaccagtgccccctggcggctttgggcagcccccctctgcccagcagcctgttcctccctatgggatgtatccacccccaggaggaaacccaccctccaggatgccctcatatccgccatacccaggggcccctgtgccgggccagcccatgccaccccccggacagcagcccccaggggcctaccctgggcagccaccagtgacctaccctggtcagcctccagtgccactccctgggcagcagcagccagtgccgagctacccaggatacccggggtctgggactgtcacccccgctgtgcccccaacccagtttggaagccgaggcaccatcactgatgctcccggctttgaccccctgcgagatgccgaggtcctgcggaaggccatgaaaggcttcgggacggatgagcaggccatcattgactgcctggggagtcgctccaacaagcagcggcagcagatcctactttccttcaagacggcttacggcaaggatttgatcaaagatctgaaatctgaactgtcaggaaactttgagaagacaatcttggctctgatgaagaccccagtcctctttgacatttatgagataaaggaagccatcaagggggttggcactgatgaagcctgcctgattgagatcctcgcttcccgcagcaatgagcacatccgagaattaaacagagcctacaaagcagaattcaaaaagaccctggaagaggccattcgaagcgacacatcagggcacttccagcggctcctcatctctctctctcagggaaaccgtgatgaaagcacaaacgtggacatgtcactcgcccagagagatgcccaggagctgtatgcggccggggagaaccgcctgggaacagacgagtccaagttcaatgcggttctgtgctcccggagccgggcccacctggtagcagttttcaatgagtaccagagaatgacaggccgggacattgagaagagcatctgccgggagatgtccggggacctggaggagggcatgctggccgtggtgaaatgtctcaagaataccccagccttctttgcggagaggctcaacaaggccatgaggggggcaggaacaaaggaccggaccctgattcgcatcatggtgtctcgcagcgagaccgacctcctggacatcagatcagagtataagcggatgtacggcaagtcgctgtaccacgacatctcgggagatacttcaggggattaccggaagattctgctgaagatctgtggtggcaatgactgaacagtgactggtggctcacttctgcccacctgccggcaacaccacaagtgggaggccaggcaaccaagtgggaggccaggcaaccaagtgggaggccaggcaaccaagtgggaggccagcaaccaagtgggaggccagcaaccaagtgggaggccagcaaccaagtgggaggccag

SEQ ID NO: 312766 - DNA, 3174 bp, Homo sapiens
cccttgcactgcctctggcacctggggcagccgcgcccgcggagttttccgcccggcgctgacggctgctgcgcccgcggctccccagtgccccgagtgccccgcgggccccgcgagcgggagtgggacccagccctaggcagaacccaggcgccgcgcccgggacgcccgcggagagagccactcccgcccacgtcccatttcgcccctcgcgtccggagtccccgtggccaggtgtgtgtctggggaagagacttacagaagtggagttgctgagtcaaagatctaaccatgagctaccctggctatcccccgcccccaggtggctacccaccagctgcaccaggtggtggtccctggggaggtgctgcctaccctcctccgcccagcatgccccccatcgggctggataacgtggccacctatgcggggcagttcaaccaggactatctctcgggaatggcggccaacatgtctgggacatttggaggagccaacatgcccaacctgtaccctggggcccctggggctggctacccaccagtgccccctggcggctttgggcagcccccctctgcccagcagcctgttcctccctatgggatgtatccacccccaggaggaaacccaccctccaggatgccctcatatccgccatacccaggggcccctgtgccgggccagcccatgccaccccccggacagcagcccccaggggcctaccctgggcagccaccagtgacctaccctggtcagcctccagtgccactccctgggcagcagcagccagtgccgagctacccaggatacccggggtctgggactgtcacccccgctgtgcccccaacccagtttggaagccgaggcaccatcactgatgctcccggctttgaccccctgcgagatgccgaggtcctgcggaaggccatgaaaggcttcgggacggatgagcaggccatcattgactgcctggggagtcgctccaacaagcagcggcagcagatcctactttccttcaagacggcttacggcaaggatttgatcaaagatctgaaatctgaactgtcaggaaactttgagaagacaatcttggctctgatgaagaccccagtcctctttgacatttatgagataaaggaagccatcaagggggttggcactgatgaagcctgcctgattgagatcctcgcttcccgcagcaatgagcacatccgagaattaaacagagcctacaaagcagaattcaaaaagaccctggaagaggccattcgaagcgacacatcagggcacttccagcggctcctcatctctctctctcagggaaaccgtgatgaaagcacaaacgtggacatgtcactcgcccagagagatgcccaggagctgtatgcggccggggagaaccgcctgggaacagacgagtccaagttcaatgcggttctgtgctcccggagccgggcccacctggtagcagttttcaatgagtaccagagaatgacaggccgggagatacttcaggggattaccggaagattctgctgaagatctgtggtggcaatgactgaacagtgactggtggctcacttctgcccacctgccggcaacaccagtgccaggaaaaggccaaaagaatgtctgtttctaacaaatccacaaatagccccgagattcaccgtcctagagcttaggcctgtcttccacccctcctgacccgtatagtgtgccacaggacctgggtcggtctagaactctctcaggatgccttttctaccccatccctcacagcctcttgctgctaaaatagatgtttcatttttctgactcatgcaatcattcccctttgcctgtggctaagacttggcttcatttcgtcatgtaattgtatatttttatttggaggcatattttcttttcttacagtcattgccagacagaggcatacaagtctgtttgctgcatacacatttctggtgagggcgactgggtgggtgaagcaccgtgtcctcgctgaggagagaaagggaggcgtgcctgagagggtagcctgtgcatctggtgagtgtgtcacgagctttgttactgccaaactcactcctttttagaaaaaacaaaaaaaaagggccagaaagtcattccttccatcttccttgcagaaaccacgagaacaaagccagttccctgtcagtgacagggcttcttgtaatttgtggtatgtgccttaaacctgaatgtctgtagccaaaacttgtttccacattaagagtcagccagctctggaatggtctggaaatgtcttcctggtaccaacttgttttcttctgcttgattctgccctgtggctcagaggtctggccttatcagccagtgaaagttcatgtaaccttacgtagagatttgtgtgcaggaaaccctgagcatacactagtttgcagggactcgtaaggacatgggaagggaggttcccgaaatccaggcaggaggcccagacacctgaaaggcaaagggatcttggttggttgcaggtgcagtgaagtccactgaaggtgtggtgcgaagaatgcagtccttcacccaggtcccaggagggaagaagggtgtgtgctaattcctggtgcccctcggcgggggccagagagaaggatggggacaacccagagagtcacaagaccagtgcctcccctcagggtgcctccaggctgaaaggggctcctggctctggtctctggggaccctgtgcccgttggttggtggtgtgagggaagagaatccataagagagtttctgagaattatggtgtcatgtccagaagctagagcttaccttgcatcaggggtctccacccactccttttccaacctcctgcgttgaggtttagaaaagagagaatcgactaggcactatggctcacgcctgtaatccaaggactttgggaagctgaggtgagaggatcacttgagctcaggagttcaagactagcctagccaacagcgagacccctgtctctactaaaaaatttggccaggcgtggtggctcacggctgtaatcccagcactttgggaggtgaggcgggcagatcacctgaggtcaggagttcgagacccagcctggccaacatggtgaaaccccatctctactaaaaatacaaaaattagccaggcatggtggcacattcctgt

SEQ ID NO: 312767 - DNA, 2280 bp, Homo sapiens
cccttgcactgcctctggcacctggggcagccgcgcccgcggagttttccgcccggcgctgacggctgctgcgcccgcggctccccagtgccccgagtgccccgcgggccccgcgagcgggagtgggacccagccctaggcagaacccaggcgccgcgcccgggacgcccgcggagagagccactcccgcccacgtcccatttcgcccctcgcgtccggagtccccgtggccaggtgtgtgtctggggaagagacttacagaagtggagttgctgagtcaaagatctaaccatgagctaccctggctatcccccgcccccaggtggctacccaccagctgcaccaggtggtggtccctggggaggtgctgcctaccctcctccgcccagcatgccccccatcgggctggataacgtggccacctatgcggggcagttcaaccaggactatctctcgggaatggcggccaacatgtctgggacatttggaggagccaacatgcccaacctgtaccctggggcccctggggctggctacccaccagtgccccctggcggctttgggcagcccccctctgcccagcagcctgttcctccctatgggatgtatccacccccaggaggaaacccaccctccaggatgccctcatatccgccatacccaggggcccctgtgccgggccagcccatgccaccccccggacagcagcccccaggggcctaccctgggcagccaccagtgacctaccctggtcagcctccagtgccactccctgggcagcagcagccagtgccgagctacccaggatacccggggtctgggactgtcacccccgctgtgcccccaacccagtttggaagccgaggcaccatcactgatgctcccggctttgaccccctgcgagatgccgaggtcctgcggaaggccatgaaaggcttcgggacggatgagcaggccatcattgactgcctggggagtcgctccaacaagcagcggcagcagatcctactttccttcaagacggcttacggcaaggatttgatcaaagatctgaaatctgaactgtcaggaaactttgagaagacaatcttggctctgatgaagaccccagtcctctttgacatttatgagataaaggaagccatcaagggggttggcactgatgaagcctgcctgattgagatcctcgcttcccgcagcaatgagcacatccgagaattaaacagagcctacaaagcagaattcaaaaagaccctggaagaggccattcgaagcgacacatcagggcacttccagcggctcctcatctctctctctcagggaaaccgtgatgaaagcacaaacgtggacatgtcactcgcccagagagatgcccaggagctgtatgcggccggggagaaccgcctgggaacagacgagtccaagttcaatgcggttctgtgctcccggagccgggcccacctggtagcagttttcaatgagtaccagagaatgacaggccgggacattgagaagagcatctgccgggagatgtccggggacctggaggagggcatgctggccgtggtgaaatgtctcaagaataccccagccttctttgcggagaggctcaacaaggccatgaggggggcaggaacaaaggaccggaccctgattcgcatcatggtgtctcgcagcgagaccgacctcctggacatcagatcagagtataagcggatgtacggcaagtcgctgtaccacgacatctcggtacgggcctgctgcaggccaactgggctcccttttggcatctcagtcacctgtggaacctccctccttggagtggccatatgcttggcctctgtgctgtgtgtgggcatcttgattatggacctcggacttgttcatccccttgcccttaaacagattataaatttctgagggcaggtggatcatgaccttgctgtcgcccccaccttgcatcccccagcagcatcagagaacactcgggacctccccaaccttgaccgtgaccttcagcgttccgatcaccgtgtgattccttgatctgtcagtgagaactcatgtcccaaaggctctgtggagctctgctgtcactccctgacaaagcacttcctgcactcagccttaaatctccctgaaccccagctccattgtctttaagatgagaaaataatcgttccttcctgggaatgttgtgagtattgagtgaggcagtgcaggtcaagtgtctattaaacactagccacagttgtatcgctgtgtggcagagccagtctg

SEQ ID NO: 312768 - DNA, 2808 bp, Homo sapiens
cccttgcactgcctctggcacctggggcagccgcgcccgcggagttttccgcccggcgctgacggctgctgcgcccgcggctccccagtgccccgagtgccccgcgggccccgcgagcgggagtgggacccagccctaggcagaacccaggcgccgcgcccgggacgcccgcggagagagccactcccgcccacgtcccatttcgcccctcgcgtccggagtccccgtggccaggtgtgtgtctggggaagagacttacagaagtggagttgctgagtcaaagatctaaccatgagctaccctggctatcccccgcccccaggtggctacccaccagctgcaccaggtggtggtccctggggaggtgctgcctaccctcctccgcccagcatgccccccatcgggctggataacgtggccacctatgcggggcagttcaaccaggactatctctcgggaatggcggccaacatgtctgggacatttggaggagccaacatgcccaacctgtaccctggggcccctggggctggctacccaccagtgccccctggcggctttgggcagcccccctctgcccagcagcctgttcctccctatgggatgtatccacccccaggaggaaacccaccctccaggatgccctcatatccgccatacccaggggcccctgtgccgggccagcccatgccaccccccggacagcagcccccaggggcctaccctgggcagccaccagtgacctaccctggtcagcctccagtgccactccctgggcagcagcagccagtgccgagctacccaggatacccggggtctgggactgtcacccccgctgtgcccccaacccagtttggaagccgaggcaccatcactgatgctcccggctttgaccccctgcgagatgccgaggtcctgcggaaggccatgaaaggcttcgggacggatgagcaggccatcattgactgcctggggagtcgctccaacaagcagcggcagcagatcctactttccttcaagacggcttacggcaaggatttgatcaaagatctgaaatctgaactgtcaggaaactttgagaagacaatcttggctctgatgaagaccccagtcctctttgacatttatgagataaaggaagccatcaagggggttggcactgatgaagcctgcctgattgagatcctcgcttcccgcagcaatgagcacatccgagaattaaacagagcctacaaagcaggtgccaggaaaaggccaaaagaatgtctgtttctaacaaatccacaaatagccccgagattcaccgtcctagagcttaggcctgtcttccacccctcctgacccgtatagtgtgccacaggacctgggtcggtctagaactctctcaggatgccttttctaccccatccctcacagcctcttgctgctaaaatagatgtttcatttttctgactcatgcaatcattcccctttgcctgtggctaagacttggcttcatttcgtcatgtaattgtatatttttatttggaggcatattttcttttcttacagtcattgccagacagaggcatacaagtctgtttgctgcatacacatttctggtgagggcgactgggtgggtgaagcaccgtgtcctcgctgaggagagaaagggaggcgtgcctgagagggtagcctgtgcatctggtgagtgtgtcacgagctttgttactgccaaactcactcctttttagaaaaaacaaaaaaaaagggccagaaagtcattccttccatcttccttgcagaaaccacgagaacaaagccagttccctgtcagtgacagggcttcttgtaatttgtggtatgtgccttaaacctgaatgtctgtagccaaaacttgtttccacattaagagtcagccagctctggaatggtctggaaatgtcttcctggtaccaacttgttttcttctgcttgattctgccctgtggctcagaggtctggccttatcagccagtgaaagttcatgtaaccttacgtagagatttgtgtgcaggaaaccctgagcatacactagtttgcagggactcgtaaggacatgggaagggaggttcccgaaatccaggcaggaggcccagacacctgaaaggcaaagggatcttggttggttgcaggtgcagtgaagtccactgaaggtgtggtgcgaagaatgcagtccttcacccaggtcccaggagggaagaagggtgtgtgctaattcctggtgcccctcggcgggggccagagagaaggatggggacaacccagagagtcacaagaccagtgcctcccctcagggtgcctccaggctgaaaggggctcctggctctggtctctggggaccctgtgcccgttggttggtggtgtgagggaagagaatccataagagagtttctgagaattatggtgtcatgtccagaagctagagcttaccttgcatcaggggtctccacccactccttttccaacctcctgcgttgaggtttagaaaagagagaatcgactaggcactatggctcacgcctgtaatccaaggactttgggaagctgaggtgagaggatcacttgagctcaggagttcaagactagcctagccaacagcgagacccctgtctctactaaaaaatttggccaggcgtggtggctcacggctgtaatcccagcactttgggaggtgaggcgggcagatcacctgaggtcaggagttcgagacccagcctggccaacatggtgaaaccccatctctactaaaaatacaaaaattagccaggcatggtggcacattcctgt

SEQ ID NO: 312769 - DNA, 1526 bp, Homo sapiens
cccttgcactgcctctggcacctggggcagccgcgcccgcggagttttccgcccggcgctgacggctgctgcgcccgcggctccccagtgccccgagtgccccgcgggccccgcgagcgggagtgggacccagccctaggcagaacccaggcgccgcgcccgggacgcccgcggagagagccactcccgcccacgtcccatttcgcccctcgcgtccggagtccccgtggccaggtgtgtgtctggggaagagacttacagaagtggagttgctgagtcaaagatctaaccatgagctaccctggctatcccccgcccccaggtggctacccaccagctgcaccaggtggtggtccctggggaggtgctgcctaccctcctccgcccagcatgccccccatcgggctggataacgtggccacctatgcggggcagttcaaccaggactatctctcgggaatggcggccaacatgtctgggacatttggaggagccaacatgcccaacctgtaccctggggcccctggggctggctacccaccagtgccccctggcggctttgggcagcccccctctgcccagcagcctgttcctccctatgggatgtatccacccccaggaggaaacccaccctccaggatgccctcatatccgccatacccaggggcccctgtgccgggccagcccatgccaccccccggacagcagcccccaggggcctaccctgggcagccaccagtgacctaccctggtcagcctccagtgccactccctgggcagcagcagccagtgccgagctacccaggatacccggggtctgggactgtcacccccgctgtgcccccaacccagtttggaagccgaggcaccatcactgatgctcccggctttgaccccctgcgagatgccgaggtcctgcggaaggccatgaaaggcttcgggacggatgagcaggccatcattgactgcctggggagtcgctccaacaagcagcggcagcagatcctactttccttcaagacggcttacggcaaggcgagctgcggggtgggggcgcgggacagtgaggcgtgtcctgggctcagcacagccctgctctcccctgcttttccttgggtgggcccggatctcccggatggacagtaaggagcaggagggcatttccttctgcccatccagctggtggcatcgttgggaggtgaaggatgccaccgggtgctgaggtttgctgagaggctccagacatctatccctgggttctagcccttgctctgccacatctcactgaggttgtggccacatcattttccttcccctgccctcttcatgaccaccctggggggtttagctgatgtaagagctttgcagggaaaggctgtgagtgctgcccaagtacgaggggcgtgtatgagcatattttgaacttctggggttttgaatcttagaaagataaaaattcggtaaatattgattagattcgtgttctagcccagtgcttctcaaacttcattgtgtcaccgatcccc

SEQ ID NO: 312770 - DNA, 1824 bp, Homo sapiens
  misc_feature (19)..(20): n is a, c, g, or t
  misc_feature (22)..(22): n is a, c, g, or t
agttgaatgtaaggatgcnnangatgggagggcgatgaggactaggatgatggcgggcaggatagttcagacggtttctatttcctgagcgattggacatcagatcagagtataagcggatgtacggcaagtcgctgtaccacgacatctcgggagatacttcaggggattaccggaagattctgctgaagatctgtggtggcaatgactgaacagtgactggtggctcacttctgcccacctgccggcaacaccagtgccaggaaaaggccaaaagaatgtctgtttctaacaaatccacaaatagccccgagattcaccgtcctagagcttaggcctgtcttccacccctcctgacccgtatagtgtgccacaggacctgggtcggtctagaactctctcaggatgccttttctaccccatccctcacagcctcttgctgctaaaatagatgtttcatttttctgactcatgcaatcattcccctttgcctgtggctaagacttggcttcatttcgtcatgtaattgtatatttttatttggaggcatattttcttttcttacagtcattgccagacagaggcatacaagtctgtttgctgcatacacatttctggtgagggcgactgggtgggtgaagcaccgtgtcctcgctgaggagagaaagggaggcgtgcctgagagggtagcctgtgcatctggtgagtgtgtcacgagctttgttactgccaaactcactcctttttagaaaaaacaaaaaaaaagggccagaaagtcattccttccatcttccttgcagaaaccacgagaacaaagccagttccctgtcagtgacagggcttcttgtaatttgtggtatgtgccttaaacctgaatgtctgtagccaaaacttgtttccacattaagagtcagccagctctggaatggtctggaaatgtcttcctggtaccaacttgttttcttctgcttgattctgccctgtggctcagaggtctggccttatcagccagtgaaagttcatgtaaccttacgtagagatttgtgtgcaggaaaccctgagcatacactagtttgcagggactcgtaaggacatgggaagggaggttcccgaaatccaggcaggaggcccagacacctgaaaggcaaagggatcttggttggttgcaggtgcagtgaagtccactgaaggtgtggtgcgaagaatgcagtccttcacccaggtcccaggagggaagaagggtgtgtgctaattcctggtgcccctcggcgggggccagagagaaggatggggacaacccagagagtcacaagaccagtgcctcccctcagggtgcctccaggctgaaaggggctcctggctctggtctctggggaccctgtgcccgttggttggtggtgtgagggaagagaatccataagagagtttctgagaattatggtgtcatgtccagaagctagagcttaccttgcatcaggggtctccacccactccttttccaacctcctgcgttgaggtttagaaaagagagaatcgactaggcactatggctcacgcctgtaatccaaggactttgggaagctgaggtgagaggatcacttgagctcaggagttcaagactagcctagccaacagcgagacccctgtctctactaaaaaatttggccaggcgtggtggctcacggctgtaatcccagcactttgggaggtgaggcgggcagatcacctgaggtcaggagttcgagacccagcctggccaacatggtgaaaccccatctctactaaaaatacaaaaattagccaggcatggtggcacattcctgt

SEQ ID NO: 312771 - DNA, 1995 bp, Homo sapiens
agcataaatgcactgggaaaacagcaatattggttagccctgggaagtggtttttaggatgattataatttttttttgtgggtattcatttgatgtggatagctggggtgagtgctgctttccgtcttctgatgggggcctggagaaggctgaactgcattttttaaggtctgtgacgcctgctgcaggacctgcagtgggggaaaattccccagggtggggctttctccctataagggtgctcagggctgaatatcaggacccagaaggctgaaagtgactgtccctcccttaacggatgtcttccttgtttctgtggccagggagatacttcaggggattaccggaagattctgctgaagatctgtggtggcaatgactgaacagtgactggtggctcacttctgcccacctgccggcaacaccagtgccaggaaaaggccaaaagaatgtctgtttctaacaaatccacaaatagccccgagattcaccgtcctagagcttaggcctgtcttccacccctcctgacccgtatagtgtgccacaggacctgggtcggtctagaactctctcaggatgccttttctaccccatccctcacagcctcttgctgctaaaatagatgtttcatttttctgactcatgcaatcattcccctttgcctgtggctaagacttggcttcatttcgtcatgtaattgtatatttttatttggaggcatattttcttttcttacagtcattgccagacagaggcatacaagtctgtttgctgcatacacatttctggtgagggcgactgggtgggtgaagcaccgtgtcctcgctgaggagagaaagggaggcgtgcctgagagggtagcctgtgcatctggtgagtgtgtcacgagctttgttactgccaaactcactcctttttagaaaaaacaaaaaaaaagggccagaaagtcattccttccatcttccttgcagaaaccacgagaacaaagccagttccctgtcagtgacagggcttcttgtaatttgtggtatgtgccttaaacctgaatgtctgtagccaaaacttgtttccacattaagagtcagccagctctggaatggtctggaaatgtcttcctggtaccaacttgttttcttctgcttgattctgccctgtggctcagaggtctggccttatcagccagtgaaagttcatgtaaccttacgtagagatttgtgtgcaggaaaccctgagcatacactagtttgcagggactcgtaaggacatgggaagggaggttcccgaaatccaggcaggaggcccagacacctgaaaggcaaagggatcttggttggttgcaggtgcagtgaagtccactgaaggtgtggtgcgaagaatgcagtccttcacccaggtcccaggagggaagaagggtgtgtgctaattcctggtgcccctcggcgggggccagagagaaggatggggacaacccagagagtcacaagaccagtgcctcccctcagggtgcctccaggctgaaaggggctcctggctctggtctctggggaccctgtgcccgttggttggtggtgtgagggaagagaatccataagagagtttctgagaattatggtgtcatgtccagaagctagagcttaccttgcatcaggggtctccacccactccttttccaacctcctgcgttgaggtttagaaaagagagaatcgactaggcactatggctcacgcctgtaatccaaggactttgggaagctgaggtgagaggatcacttgagctcaggagttcaagactagcctagccaacagcgagacccctgtctctactaaaaaatttggccaggcgtggtggctcacggctgtaatcccagcactttgggaggtgaggcgggcagatcacctgaggtcaggagttcgagacccagcctggccaacatggtgaaaccccatctctactaaaaatacaaaaattagccaggcatggtggcacattcctgt

SEQ ID NO: 312772 - DNA, 2294 bp, Homo sapiens
caaaatacattctcagctgtgtggtctaacgctcaaattctgaactcacatgagccttgcaattgcaccatggggaccacgtcctcccaccttagactcagtagcatttgatgatggtgggcatgtcatcacaggaaactcactgtgtttccttggctgtatgaatgaagctgttgttagagaattagtgattctaggctgggcacagtggctcacgcctgtaatcccagcactttgggaggctgaggcaggtggatcatttgaggtcaggagttcgagaccagcctggccaacaaggtaaaaccctgtctctactaaaaatacaaaattagctgggcttgcctgtaatcccagctaattaggtaggctgcggcaggagaattgcttgaacccgggagacagaggttgcagtgagctgggatcacgccattccacttcagtcttggtgacagagtgagacttcgtctcaaaaaaaaaaagagagttaataattcattacagagtatctcctgcatgccagcaagctatggacatctggaagaagccacatgccttgccctcaagttgcttagggtggaaggaaatgattagaaatgagccaagccgagcctgcactcttagaggagatacttcaggggattaccggaagattctgctgaagatctgtggtggcaatgactgaacagtgactggtggctcacttctgcccacctgccggcaacaccagtgccaggaaaaggccaaaagaatgtctgtttctaacaaatccacaaatagccccgagattcaccgtcctagagcttaggcctgtcttccacccctcctgacccgtatagtgtgccacaggacctgggtcggtctagaactctctcaggatgccttttctaccccatccctcacagcctcttgctgctaaaatagatgtttcatttttctgactcatgcaatcattcccctttgcctgtggctaagacttggcttcatttcgtcatgtaattgtatatttttatttggaggcatattttcttttcttacagtcattgccagacagaggcatacaagtctgtttgctgcatacacatttctggtgagggcgactgggtgggtgaagcaccgtgtcctcgctgaggagagaaagggaggcgtgcctgagagggtagcctgtgcatctggtgagtgtgtcacgagctttgttactgccaaactcactcctttttagaaaaaacaaaaaaaaagggccagaaagtcattccttccatcttccttgcagaaaccacgagaacaaagccagttccctgtcagtgacagggcttcttgtaatttgtggtatgtgccttaaacctgaatgtctgtagccaaaacttgtttccacattaagagtcagccagctctggaatggtctggaaatgtcttcctggtaccaacttgttttcttctgcttgattctgccctgtggctcagaggtctggccttatcagccagtgaaagttcatgtaaccttacgtagagatttgtgtgcaggaaaccctgagcatacactagtttgcagggactcgtaaggacatgggaagggaggttcccgaaatccaggcaggaggcccagacacctgaaaggcaaagggatcttggttggttgcaggtgcagtgaagtccactgaaggtgtggtgcgaagaatgcagtccttcacccaggtcccaggagggaagaagggtgtgtgctaattcctggtgcccctcggcgggggccagagagaaggatggggacaacccagagagtcacaagaccagtgcctcccctcagggtgcctccaggctgaaaggggctcctggctctggtctctggggaccctgtgcccgttggttggtggtgtgagggaagagaatccataagagagtttctgagaattatggtgtcatgtccagaagctagagcttaccttgcatcaggggtctccacccactccttttccaacctcctgcgttgaggtttagaaaagagagaatcgactaggcactatggctcacgcctgtaatccaaggactttgggaagctgaggtgagaggatcacttgagctcaggagttcaagactagcctagccaacagcgagacccctgtctctactaaaaaatttggccaggcgtggtggctcacggctgtaatcccagcactttgggaggtgaggcgggcagatcacctgaggtcaggagttcgagacccagcctggccaacatggtgaaaccccatctctactaaaaatacaaaaattagccaggcatggtggcacattcctgt

SEQ ID NO: 312773 - DNA, 359 bp, Homo sapiens
cagcagatctgtgtccctcctcacaatttaactggcaggggacattgccaagggatccgtgttcagagggacttcgtgagagcaggtgtctcacctggcacctgtccaggctgctcttcctcccttactgacagatctgcaaatcacttacttctcttaatcagcagcctctactgcagaaacagggtgatgctgcctcatttgccctggttcttcaccctgcatcagatgaacctcctgagggccctttttgcttctaggaacgatgattccataccttaccaggtccccttgcctgatgaaccagaggttggagaatgaagagagacaggggcctctgacttcccctgttgctggag

SEQ ID NO: 312774 - DNA, 912 bp, Homo sapiens
aaccccattacggctaggtacgaggctgggtggtggacggctgctgcgcccgcggctccccagtgccccgagtgccccgcgggccccgcgagcgggagtgggacccagccctaggcagaacccaggcgccgcgcccgggacgcccgcggagagagccactcccgcccacgtcccatttcgcccctcgcgtccggagtccccgtggccagatctaaccatgagctaccctggctatcccccgcccccaggtggctacccaccagctgcaccaggtggtggtccctggggaggtgctgcctaccctcctccgcccagcatgccccccatcgggctggataacgtggccacctatgcggggcagttcaaccaggactatctctcgggaatggcggccaacatgtctgggacatttggaggagccaacatgcccaacctgtaccctggggcccctggggctggctacccaccagtgccccctggcggctttgggcagcccccctctgcccagcagcctgttcctccctatgggatgtatccacccccaggaggaaacccaccctccaggatgccctcatatccgccatacccaggggcccctgtgccgggccagcccatgccaccccccggacagcagcccccaggggcctaccctgggcagccaccagtgacctaccctggtcagcctccagtgccactccctgggcagcagcagccagtgccgagctacccaggatacccggggtctgggactgtcacccccgctgtgcccccaacccagagttggaagcgagggcatcacttgttctcccgggtttgaccccttcgaaattccgaggtctcggaagcgctaaggcgtcgacggataagcaggcacacttgaggcggggggcgcccaaggggcggggactactc

SEQ ID NO: 312775 - DNA, 3026 bp, Homo sapiens
cccttgcactgcctctggcacctggggcagccgcgcccgcggagttttccgcccggcgctgacggctgctgcgcccgcggctccccagtgccccgagtgccccgcgggccccgcgagcgggagtgggacccagccctaggcagaacccaggcgccgcgcccgggacgcccgcggagagagccactcccgcccacgtcccatttcgcccctcgcgtccggagtccccgtggccaggtgtgtgtctggggaagagacttacagaagtggagttgctgagtcaaagatctaaccatgagctaccctggctatcccccgcccccaggtggctacccaccagctgcaccaggtggtggtccctggggaggtgctgcctaccctcctccgcccagcatgccccccatcgggctggataacgtggccacctatgcggggcagttcaaccaggactatctctcgggaatggcggccaacatgtctgggacatttggaggagccaacatgcccaacctgtaccctggggcccctggggctggctacccaccagtgccccctggcggctttgggcagcccccctctgcccagcagcctgttcctccctatgggatgtatccacccccaggaggaaacccaccctccaggatgccctcatatccgccatacccaggggcccctgtgccgggccagcccatgccaccccccggacagcagcccccaggggcctaccctgggcagccaccagtgacctaccctggtcagcctccagtgccactccctgggcagcagcagccagtgccgagctacccaggatacccggggtctgggactgtcacccccgctgtgcccccaacccagtttggaagccgaggcaccatcactgatgctcccggctttgaccccctgcgagatgccgaggtcctgcggaaggccatgaaaggcttcgggacggatgagcaggccatcattgactgcctggggagtcgctccaacaagcagcggcagcagatcctactttccttcaagacggcttacggcaaggatttgatcaaagatctgaaatctgaactgtcaggaaactttgagaagacaatcttggctctgatgaagaccccagtcctctttgacatttatgagataaaggaagccatcaagggggttggcactgatgaagcctgcctgattgagatcctcgcttcccgcagcaatgagcacatccgagaattaaacagagcctacaaagcagaattcaaaaagaccctggaagaggccattcgaagcgacacatcagggcacttccagcggctcctcatctctctctctcagggaaaccgtgatgaaagcacaaacgtggacatgtcactcgcccagagagatgcccaggagctgtatgcggccggggagaaccgcctgggaacagacgagtccaagttcaatgcggttctgtgctcccggagccgggcccacctggtagcagttttcaatgagtaccagagaatgacaggccgggacattgagaagagcatctgccgggagatgtccggggacctggaggagggcatgctggccgtggtgaaatgtctcaagaataccccagccttctttgcggagaggctcaacaaggccatgaggggggcaggaacaaaggaccggaccctgattcgcatcatggtgtctcgcagcgagaccgacctcctggacatcagatcagagtataagcggatgtacggcaagtcgctgtaccacgacatctcgggagatacttcaggggattaccggaagattctgctgaagatctgtggtggcaatgactgaacagtgactggtggctcacttctgcccacctgccggcaacaccagtgccaggaaaaggccaaaagaatgtctgtttctaacaaatccacaaatagccccgagattcaccgtcctagagcttaggcctgtcttccacccctcctgacccgtatagtgtgccacaggacctgggtcggtctagaactctctcaggatgccttttctaccccatccctcacagcctcttgctgctaaaatagatgtttcatttttctgactcatgcaatcattcccctttgcctgtggctaagacttggcttcatttcgtcatgtaattgtatatttttatttggaggcatattttcttttcttacagtcattgccagacagaggcatacaagtctgtttgctgcatacacatttctggtgagggcgactgggtgggtgaagcaccgtgtcctcgctgaggagagaaagggaggcgtgcctgagagggtagcctgtgcatctggtgagtgtgtcacgagctttgttactgccaaactcactcctttttagaaaaaacaaaaaaaaagggccagaaagtcattccttccatcttccttgcagaaaccacgagaacaaagccagttccctgtcagtgacagggcttcttgtaatttgtggtatgtgccttaaacctgaatgtctgtagccaaaacttgtttccacattaagagtcagccagctctggaatggtctggaaatgtaaaaaaaaaaaaaaaaaaaaaaaaaaaaaaaaaaaaaaaaaaaaaaaaaaaaaaaaaaaaaaaaaaaaaaaaaaaaaaaaaaaaaaaaaaaaaaaaaaaaaaaaaaaaaaagaaaaaaaaaaaaaaaacaaaacaccacacaaaaaaagaaggagggggggacgggcagctcacaactcaccagccgagagggggacacacgcagcagacgcacaccgacttgtagacaaagggcgacgcacacaaggggggtgatgacagatcaacacaggaggcacgggccgaaaaataacacagcacaggagaggaaaaaaaccgccagaccggggagagagagactagacaacagaaacatcctctcgcgcgacggaagacgcaaagacaacacaacgcacacgagaaagcccgcccagaacacaacagccagaagggtggtgcaacacaacagtcacccgggaaaagcgacgggcgggcaagaaaaatcacggg

SEQ ID NO: 312776 - DNA, 3521 bp, Homo sapiens
ctcattatgttgcccaggctggtgtcaaacttctgagctcaaatgatctgcctgcgtcagcctcccaaagtgctgggattataggcatgggccactgtgcctggcctcatcttgtcattttaaagaatatatcagcagggattattggacctgcctggtttaaactattgtcttagttaattttgtgctgctctaacaaaatatcacagactgagtaatttataagcaatagtagcttatttggctcacagttctggaggctgagaagatcgtgaggctgcatctggcaagggccttcttgctgcttcataacatggcagaagacatcatgcgggtgtgtgtctggggaagagacttacagaagtggagttgctgagtcaaagatctaaccatgagctaccctggctatcccccgcccccaggtggctacccaccagctgcaccaggtggtggtccctggggaggtgctgcctaccctcctccgcccagcatgccccccatcgggctggataacgtggccacctatgcggggcagttcaaccaggactatctctcgggaatggcggccaacatgtctgggacatttggaggagccaacatgcccaacctgtaccctggggcccctggggctggctacccaccagtgccccctggcggctttgggcagcccccctctgcccagcagcctgttcctccctatgggatgtatccacccccaggaggaaacccaccctccaggatgccctcatatccgccatacccaggggcccctgtgccgggccagcccatgccaccccccggacagcagcccccaggggcctaccctgggcagccaccagtgacctaccctggtcagcctccagtgccactccctgggcagcagcagccagtgccgagctacccaggatacccggggtctgggactgtcacccccgctgtgcccccaacccagtttggaagccgaggcaccatcactgatgctcccggctttgaccccctgcgagatgccgaggtcctgcggaaggccatgaaaggcttcgggacggatgagcaggccatcattgactgcctggggagtcgctccaacaagcagcggcagcagatcctactttccttcaagacggcttacggcaaggatttgatcaaagatctgaaatctgaactgtcaggaaactttgagaagacaatcttggctctgatgaagaccccagtcctctttgacatttatgagataaaggaagccatcaagggggttggcactgatgaagcctgcctgattgagatcctcgcttcccgcagcaatgagcacatccgagaattaaacagagcctacaaagcagaattcaaaaagaccctggaagaggccattcgaagcgacacatcagggcacttccagcggctcctcatctctctctctcagggaaaccgtgatgaaagcacaaacgtggacatgtcactcgcccagagagatgcccaggagctgtatgcggccggggagaaccgcctgggaacagacgagtccaagttcaatgcggttctgtgctcccggagccgggcccacctggtagcagttttcaatgagtaccagagaatgacaggccgggacattgagaagagcatctgccgggagatgtccggggacctggaggagggcatgctggccgtggtgaaatgtctcaagaataccccagccttctttgcggagaggctcaacaaggccatgaggggggcaggaacaaaggaccggaccctgattcgcatcatggtgtctcgcagcgagaccgacctcctggacatcagatcagagtataagcggatgtacggcaagtcgctgtaccacgacatctcgggagatacttcaggggattaccggaagattctgctgaagatctgtggtggcaatgactgaacagtgactggtggctcacttctgcccacctgccggcaacaccagtgccaggaaaaggccaaaagaatgtctgtttctaacaaatccacaaatagccccgagattcaccgtcctagagcttaggcctgtcttccacccctcctgacccgtatagtgtgccacaggacctgggtcggtctagaactctctcaggatgccttttctaccccatccctcacagcctcttgctgctaaaatagatgtttcatttttctgactcatgcaatcattcccctttgcctgtggctaagacttggcttcatttcgtcatgtaattgtatatttttatttggaggcatattttcttttcttacagtcattgccagacagaggcatacaagtctgtttgctgcatacacatttctggtgagggcgactgggtgggtgaagcaccgtgtcctcgctgaggagagaaagggaggcgtgcctgagagggtagcctgtgcatctggtgagtgtgtcacgagctttgttactgccaaactcactcctttttagaaaaaacaaaaaaaaagggccagaaagtcattccttccatcttccttgcagaaaccacgagaacaaagccagttccctgtcagtgacagggcttcttgtaatttgtggtatgtgccttaaacctgaatgtctgtagccaaaacttgtttccacattaagagtcagccagctctggaatggtctggaaatgtcttcctggtaccaacttgttttcttctgcttgattctgccctgtggctcagaggtctggccttatcagccagtgaaagttcatgtaaccttacgtagagatttgtgtgcaggaaaccctgagcatacactagtttgcagggactcgtaaggacatgggaagggaggttcccgaaatccaggcaggaggcccagacacctgaaaggcaaagggatcttggttggttgcaggtgcagtgaagtccactgaaggtgtggtgcgaagaatgcagtccttcacccaggtcccaggagggaagaagggtgtgtgctaattcctggtgcccctcggcgggggccagagagaaggatggggacaacccagagagtcacaagaccagtgcctcccctcagggtgcctccaggctgaaaggggctcctggctctggtctctggggaccctgtgcccgttggttggtggtgtgagggaagagaatccataagagagtttctgagaattatggtgtcatgtccagaagctagagcttaccttgcatcaggggtctccacccactccttttccaacctcctgcgttgaggtttagaaaagagagaatcgactaggcactatggctcacgcctgtaatccaaggactttgggaagctgaggtgagaggatcacttgagctcaggagttcaagactagcctagccaacagcgagacccctgtctctactaaaaaatttggccaggcgtggtggctcacggctgtaatcccagcactttgggaggtgaggcgggcagatcacctgaggtcaggagttcgagacccagcctggccaacatggtgaaaccccatctctactaaaaatacaaaaattagccaggcatggtggcacattcctgt

SEQ ID NO: 312777 - DNA, 3141 bp, Homo sapiens
aagcaggctgtaccggtcggaaggtctatgatccgcccccaggtggctacccaccagctgcaccaggtggtggtccctggggaggtgctgcctaccctcctccgcccagcatgccccccatcgggctggataacgtggccacctatgcggggcagttcaaccaggactatctctcgggaatggcggccaacatgtctgggacatttggaggagccaacatgcccaacctgtaccctggggcccctggggctggctacccaccagtgccccctggcggctttgggcagcccccctctgcccagcagcctgttcctccctatgggatgtatccacccccaggaggaaacccaccctccaggatgccctcatatccgccatacccaggggcccctgtgccgggccagcccatgccaccccccggacagcagcccccaggggcctaccctgggcagccaccagtgacctaccctggtcagcctccagtgccactccctgggcagcagcagccagtgccgagctacccaggatacccggggtctgggactgtcacccccgctgtgcccccaacccagtttggaagccgaggcaccatcactgatgctcccggctttgaccccctgcgagatgccgaggtcctgcggaaggccatgaaaggcttcgggacggatgagcaggccatcattgactgcctggggagtcgctccaacaagcagcggcagcagatcctactttccttcaagacggcttacggcaaggatttgatcaaagatctgaaatctgaactgtcaggaaactttgagaagacaatcttggctctgatgaagaccccagtcctctttgacatttatgagataaaggaagccatcaagggggttggcactgatgaagcctgcctgattgagatcctcgcttcccgcagcaatgagcacatccgagaattaaacagagcctacaaagcagaattcaaaaagaccctggaagaggccattcgaagcgacacatcagggcacttccagcggctcctcatctctctctctcagggaaaccgtgatgaaagcacaaacgtggacatgtcactcgcccagagagatgcccaggagctgtatgcggccggggagaaccgcctgggaacagacgagtccaagttcaatgcggttctgtgctcccggagccgggcccacctggtagcagttttcaatgagtaccagagaatgacaggccgggacattgagaagagcatctgccgggagatgtccggggacctggaggagggcatgctggccgtggtgaaatgtctcaagaataccccagccttctttgcggagaggctcaacaaggccatgaggggggcaggaacaaaggaccggaccctgattcgcatcatggtgtctcgcagcgagaccgacctcctggacatcagatcagagtataagcggatgtacggcaagtcgctgtaccacgacatctcgggagatacttcaggggattaccggaagattctgctgaagatctgtggtggcaatgactgaacagtgactggtggctcacttctgcccacctgccggcaacaccagtgccaggaaaaggccaaaagaatgtctgtttctaacaaatccacaaatagccccgagattcaccgtcctagagcttaggcctgtcttccacccctcctgacccgtatagtgtgccacaggacctgggtcggtctagaactctctcaggatgccttttctaccccatccctcacagcctcttgctgctaaaatagatgtttcatttttctgactcatgcaatcattcccctttgcctgtggctaagacttggcttcatttcgtcatgtaattgtatatttttatttggaggcatattttcttttcttacagtcattgccagacagaggcatacaagtctgtttgctgcatacacatttctggtgagggcgactgggtgggtgaagcaccgtgtcctcgctgaggagagaaagggaggcgtgcctgagagggtagcctgtgcatctggtgagtgtgtcacgagctttgttactgccaaactcactcctttttagaaaaaacaaaaaaaaagggccagaaagtcattccttccatcttccttgcagaaaccacgagaacaaagccagttccctgtcagtgacagggcttcttgtaatttgtggtatgtgccttaaacctgaatgtctgtagccaaaacttgtttccacattaagagtcagccagctctggaatggtctggaaatgtcttcctggtaccaacttgttttcttctgcttgattctgccctgtggctcagaggtctggccttatcagccagtgaaagttcatgtaaccttacgtagagatttgtgtgcaggaaaccctgagcatacactagtttgcagggactcgtaaggacatgggaagggaggttcccgaaatccaggcaggaggcccagacacctgaaaggcaaagggatcttggttggttgcaggtgcagtgaagtccactgaaggtgtggtgcgaagaatgcagtccttcacccaggtcccaggagggaagaagggtgtgtgctaattcctggtgcccctcggcgggggccagagagaaggatggggacaacccagagagtcacaagaccagtgcctcccctcagggtgcctccaggctgaaaggggctcctggctctggtctctggggaccctgtgcccgttggttggtggtgtgagggaagagaatccataagagagtttctgagaattatggtgtcatgtccagaagctagagcttaccttgcatcaggggtctccacccactccttttccaacctcctgcgttgaggtttagaaaagagagaatcgactaggcactatggctcacgcctgtaatccaaggactttgggaagctgaggtgagaggatcacttgagctcaggagttcaagactagcctagccaacagcgagacccctgtctctactaaaaaatttggccaggcgtggtggctcacggctgtaatcccagcactttgggaggtgaggcgggcagatcacctgaggtcaggagttcgagacccagcctggccaacatggtgaaaccccatctctactaaaaatacaaaaattagccaggcatggtggcacattcctgt

SEQ ID NO: 312778 - DNA, 2829 bp, Homo sapiens
aaccccattacggctaggtacgaggctgggtggtggacccctccaggatgccctcatatccgccatacccaggggcccctgtgccgggccagcccatgccaccccccggacagcagcccccaggggcctaccctgggcagccaccagtgacctaccctggtcagcctccagtgccactccctgggcagcagcagccagtgccgagctacccaggatacccggggtctgggactgtcacccccgctgtgcccccaacccagtttggaagccgaggcaccatcactgatgctcccggctttgaccccctgcgagatgccgaggtcctgcggaaggccatgaaaggcttcgggacggatgagcaggccatcattgactgcctggggagtcgctccaacaagcagcggcagcagatcctactttccttcaagacggcttacggcaaggatttgatcaaagatctgaaatctgaactgtcaggaaactttgagaagacaatcttggctctgatgaagaccccagtcctctttgacatttatgagataaaggaagccatcaagggggttggcactgatgaagcctgcctgattgagatcctcgcttcccgcagcaatgagcacatccgagaattaaacagagcctacaaagcagaattcaaaaagaccctggaagaggccattcgaagcgacacatcagggcacttccagcggctcctcatctctctctctcagggaaaccgtgatgaaagcacaaacgtggacatgtcactcgcccagagagatgcccaggagctgtatgcggccggggagaaccgcctgggaacagacgagtccaagttcaatgcggttctgtgctcccggagccgggcccacctggtagcagttttcaatgagtaccagagaatgacaggccgggacattgagaagagcatctgccgggagatgtccggggacctggaggagggcatgctggccgtggtgaaatgtctcaagaataccccagccttctttgcggagaggctcaacaaggccatgaggggggcaggaacaaaggaccggaccctgattcgcatcatggtgtctcgcagcgagaccgacctcctggacatcagatcagagtataagcggatgtacggcaagtcgctgtaccacgacatctcgggagatacttcaggggattaccggaagattctgctgaagatctgtggtggcaatgactgaacagtgactggtggctcacttctgcccacctgccggcaacaccagtgccaggaaaaggccaaaagaatgtctgtttctaacaaatccacaaatagccccgagattcaccgtcctagagcttaggcctgtcttccacccctcctgacccgtatagtgtgccacaggacctgggtcggtctagaactctctcaggatgccttttctaccccatccctcacagcctcttgctgctaaaatagatgtttcatttttctgactcatgcaatcattcccctttgcctgtggctaagacttggcttcatttcgtcatgtaattgtatatttttatttggaggcatattttcttttcttacagtcattgccagacagaggcatacaagtctgtttgctgcatacacatttctggtgagggcgactgggtgggtgaagcaccgtgtcctcgctgaggagagaaagggaggcgtgcctgagagggtagcctgtgcatctggtgagtgtgtcacgagctttgttactgccaaactcactcctttttagaaaaaacaaaaaaaaagggccagaaagtcattccttccatcttccttgcagaaaccacgagaacaaagccagttccctgtcagtgacagggcttcttgtaatttgtggtatgtgccttaaacctgaatgtctgtagccaaaacttgtttccacattaagagtcagccagctctggaatggtctggaaatgtcttcctggtaccaacttgttttcttctgcttgattctgccctgtggctcagaggtctggccttatcagccagtgaaagttcatgtaaccttacgtagagatttgtgtgcaggaaaccctgagcatacactagtttgcagggactcgtaaggacatgggaagggaggttcccgaaatccaggcaggaggcccagacacctgaaaggcaaagggatcttggttggttgcaggtgcagtgaagtccactgaaggtgtggtgcgaagaatgcagtccttcacccaggtcccaggagggaagaagggtgtgtgctaattcctggtgcccctcggcgggggccagagagaaggatggggacaacccagagagtcacaagaccagtgcctcccctcagggtgcctccaggctgaaaggggctcctggctctggtctctggggaccctgtgcccgttggttggtggtgtgagggaagagaatccataagagagtttctgagaattatggtgtcatgtccagaagctagagcttaccttgcatcaggggtctccacccactccttttccaacctcctgcgttgaggtttagaaaagagagaatcgactaggcactatggctcacgcctgtaatccaaggactttgggaagctgaggtgagaggatcacttgagctcaggagttcaagactagcctagccaacagcgagacccctgtctctactaaaaaatttggccaggcgtggtggctcacggctgtaatcccagcactttgggaggtgaggcgggcagatcacctgaggtcaggagttcgagacccagcctggccaacatggtgaaaccccatctctactaaaaatacaaaaattagccaggcatggtggcacattcctgt

SEQ ID NO: 312779 - DNA, 3271 bp, Homo sapiens
cccttgcactgcctctggcacctggggcagccgcgcccgcggagttttccgcccggcgctgacggctgctgcgcccgcggctccccagtgccccgagtgccccgcgggccccgcgagcgggagtgggacccagccctaggcagaacccaggcgccgcgcccgggacgcccgcggagagagccactcccgcccacgtcccatttcgcccctcgcgtccggagtccccgtggccaggtgtgtgtctggggaagagacttacagaagtggagttgctgagtcaaagatctaaccatgagctaccctggctatcccccgcccccaggtggctacccaccagctgcaccaggtggtggtccctggggaggtgctgcctaccctcctccgcccagcatgccccccatcgggctggataacgtggccacctatgcggggcagttcaaccaggactatctctcgggaatggcggccaacatgtctgggacatttggaggagccaacatgcccaacctgtaccctgcccctgtgccgggccagcccatgccaccccccggacagcagcccccaggggcctaccctgggcagccaccagtgacctaccctggtcagcctccagtgccactccctgggcagcagcagccagtgccgagctacccaggatacccggggtctgggactgtcacccccgctgtgcccccaacccagtttggaagccgaggcaccatcactgatgctcccggctttgaccccctgcgagatgccgaggtcctgcggaaggccatgaaaggcttcgggacggatgagcaggccatcattgactgcctggggagtcgctccaacaagcagcggcagcagatcctactttccttcaagacggcttacggcaaggatttgatcaaagatctgaaatctgaactgtcaggaaactttgagaagacaatcttggctctgatgaagaccccagtcctctttgacatttatgagataaaggaagccatcaagggggttggcactgatgaagcctgcctgattgagatcctcgcttcccgcagcaatgagcacatccgagaattaaacagagcctacaaagcagaattcaaaaagaccctggaagaggccattcgaagcgacacatcagggcacttccagcggctcctcatctctctctctcagggaaaccgtgatgaaagcacaaacgtggacatgtcactcgcccagagagatgcccaggagctgtatgcggccggggagaaccgcctgggaacagacgagtccaagttcaatgcggttctgtgctcccggagccgggcccacctggtagcagttttcaatgagtaccagagaatgacaggccgggacattgagaagagcatctgccgggagatgtccggggacctggaggagggcatgctggccgtggtgaaatgtctcaagaataccccagccttctttgcggagaggctcaacaaggccatgaggggggcaggaacaaaggaccggaccctgattcgcatcatggtgtctcgcagcgagaccgacctcctggacatcagatcagagtataagcggatgtacggcaagtcgctgtaccacgacatctcgggagatacttcaggggattaccggaagattctgctgaagatctgtggtggcaatgactgaacagtgactggtggctcacttctgcccacctgccggcaacaccagtgccaggaaaaggccaaaagaatgtctgtttctaacaaatccacaaatagccccgagattcaccgtcctagagcttaggcctgtcttccacccctcctgacccgtatagtgtgccacaggacctgggtcggtctagaactctctcaggatgccttttctaccccatccctcacagcctcttgctgctaaaatagatgtttcatttttctgactcatgcaatcattcccctttgcctgtggctaagacttggcttcatttcgtcatgtaattgtatatttttatttggaggcatattttcttttcttacagtcattgccagacagaggcatacaagtctgtttgctgcatacacatttctggtgagggcgactgggtgggtgaagcaccgtgtcctcgctgaggagagaaagggaggcgtgcctgagagggtagcctgtgcatctggtgagtgtgtcacgagctttgttactgccaaactcactcctttttagaaaaaacaaaaaaaaagggccagaaagtcattccttccatcttccttgcagaaaccacgagaacaaagccagttccctgtcagtgacagggcttcttgtaatttgtggtatgtgccttaaacctgaatgtctgtagccaaaacttgtttccacattaagagtcagccagctctggaatggtctggaaatgtcttcctggtaccaacttgttttcttctgcttgattctgccctgtggctcagaggtctggccttatcagccagtgaaagttcatgtaaccttacgtagagatttgtgtgcaggaaaccctgagcatacactagtttgcagggactcgtaaggacatgggaagggaggttcccgaaatccaggcaggaggcccagacacctgaaaggcaaagggatcttggttggttgcaggtgcagtgaagtccactgaaggtgtggtgcgaagaatgcagtccttcacccaggtcccaggagggaagaagggtgtgtgctaattcctggtgcccctcggcgggggccagagagaaggatggggacaacccagagagtcacaagaccagtgcctcccctcagggtgcctccaggctgaaaggggctcctggctctggtctctggggaccctgtgcccgttggttggtggtgtgagggaagagaatccataagagagtttctgagaattatggtgtcatgtccagaagctagagcttaccttgcatcaggggtctccacccactccttttccaacctcctgcgttgaggtttagaaaagagagaatcgactaggcactatggctcacgcctgtaatccaaggactttgggaagctgaggtgagaggatcacttgagctcaggagttcaagactagcctagccaacagcgagacccctgtctctactaaaaaatttggccaggcgtggtggctcacggctgtaatcccagcactttgggaggtgaggcgggcagatcacctgaggtcaggagttcgagacccagcctggccaacatggtgaaaccccatctctactaaaaatacaaaaattagccaggcatggtggcacattcctgt

SEQ ID NO: 312780 - DNA, 2625 bp, Homo sapiens
ggcagcgcgccacgcgggacaagtgcacacaccccaaaaacaggtggttgaggacgtttggaagccgaggcaccatcactgatgctcccggctttgaccccctgcgagatgccgaggtcctgcggaaggccatgaaaggcttcgggacggatgagcaggccatcattgactgcctggggagtcgctccaacaagcagcggcagcagatcctactttccttcaagacggcttacggcaaggatttgatcaaagatctgaaatctgaactgtcaggaaactttgagaagacaatcttggctctgatgaagaccccagtcctctttgacatttatgagataaaggaagccatcaagggggttggcactgatgaagcctgcctgattgagatcctcgcttcccgcagcaatgagcacatccgagaattaaacagagcctacaaagcagaattcaaaaagaccctggaagaggccattcgaagcgacacatcagggcacttccagcggctcctcatctctctctctcagggaaaccgtgatgaaagcacaaacgtggacatgtcactcgcccagagagatgcccaggagctgtatgcggccggggagaaccgcctgggaacagacgagtccaagttcaatgcggttctgtgctcccggagccgggcccacctggtagcagttttcaatgagtaccagagaatgacaggccgggacattgagaagagcatctgccgggagatgtccggggacctggaggagggcatgctggccgtggtgaaatgtctcaagaataccccagccttctttgcggagaggctcaacaaggccatgaggggggcaggaacaaaggaccggaccctgattcgcatcatggtgtctcgcagcgagaccgacctcctggacatcagatcagagtataagcggatgtacggcaagtcgctgtaccacgacatctcgggagatacttcaggggattaccggaagattctgctgaagatctgtggtggcaatgactgaacagtgactggtggctcacttctgcccacctgccggcaacaccagtgccaggaaaaggccaaaagaatgtctgtttctaacaaatccacaaatagccccgagattcaccgtcctagagcttaggcctgtcttccacccctcctgacccgtatagtgtgccacaggacctgggtcggtctagaactctctcaggatgccttttctaccccatccctcacagcctcttgctgctaaaatagatgtttcatttttctgactcatgcaatcattcccctttgcctgtggctaagacttggcttcatttcgtcatgtaattgtatatttttatttggaggcatattttcttttcttacagtcattgccagacagaggcatacaagtctgtttgctgcatacacatttctggtgagggcgactgggtgggtgaagcaccgtgtcctcgctgaggagagaaagggaggcgtgcctgagagggtagcctgtgcatctggtgagtgtgtcacgagctttgttactgccaaactcactcctttttagaaaaaacaaaaaaaaagggccagaaagtcattccttccatcttccttgcagaaaccacgagaacaaagccagttccctgtcagtgacagggcttcttgtaatttgtggtatgtgccttaaacctgaatgtctgtagccaaaacttgtttccacattaagagtcagccagctctggaatggtctggaaatgtcttcctggtaccaacttgttttcttctgcttgattctgccctgtggctcagaggtctggccttatcagccagtgaaagttcatgtaaccttacgtagagatttgtgtgcaggaaaccctgagcatacactagtttgcagggactcgtaaggacatgggaagggaggttcccgaaatccaggcaggaggcccagacacctgaaaggcaaagggatcttggttggttgcaggtgcagtgaagtccactgaaggtgtggtgcgaagaatgcagtccttcacccaggtcccaggagggaagaagggtgtgtgctaattcctggtgcccctcggcgggggccagagagaaggatggggacaacccagagagtcacaagaccagtgcctcccctcagggtgcctccaggctgaaaggggctcctggctctggtctctggggaccctgtgcccgttggttggtggtgtgagggaagagaatccataagagagtttctgagaattatggtgtcatgtccagaagctagagcttaccttgcatcaggggtctccacccactccttttccaacctcctgcgttgaggtttagaaaagagagaatcgactaggcactatggctcacgcctgtaatccaaggactttgggaagctgaggtgagaggatcacttgagctcaggagttcaagactagcctagccaacagcgagacccctgtctctactaaaaaatttggccaggcgtggtggctcacggctgtaatcccagcactttgggaggtgaggcgggcagatcacctgaggtcaggagttcgagacccagcctggccaacatggtgaaaccccatctctactaaaaatacaaaaattagccaggcatggtggcacattcctgt

SEQ ID NO: 312781 - DNA, 2542 bp, Homo sapiens
acgatacagagaagattaggatggcccctgcgcaaggatgacacgcaaattcgtgaagcgttccatattttttggctcttattagtcacttcctgtggattttttaaatagacttgtttttttttttgttggttgtttgtttgaatatccaatcaggatttgatcaaagatctgaaatctgaactgtcaggaaactttgagaagacaatcttggctctgatgaagaccccagtcctctttgacatttatgagataaaggaagccatcaagggggttggcactgatgaagcctgcctgattgagatcctcgcttcccgcagcaatgagcacatccgagaattaaacagagcctacaaagcagaattcaaaaagaccctggaagaggccattcgaagcgacacatcagggcacttccagcggctcctcatctctctctctcagggaaaccgtgatgaaagcacaaacgtggacatgtcactcgcccagagagatgcccaggagctgtatgcggccggggagaaccgcctgggaacagacgagtccaagttcaatgcggttctgtgctcccggagccgggcccacctggtagcagttttcaatgagtaccagagaatgacaggccgggacattgagaagagcatctgccgggagatgtccggggacctggaggagggcatgctggccgtggtgaaatgtctcaagaataccccagccttctttgcggagaggctcaacaaggccatgaggggggcaggaacaaaggaccggaccctgattcgcatcatggtgtctcgcagcgagaccgacctcctggacatcagatcagagtataagcggatgtacggcaagtcgctgtaccacgacatctcgggagatacttcaggggattaccggaagattctgctgaagatctgtggtggcaatgactgaacagtgactggtggctcacttctgcccacctgccggcaacaccagtgccaggaaaaggccaaaagaatgtctgtttctaacaaatccacaaatagccccgagattcaccgtcctagagcttaggcctgtcttccacccctcctgacccgtatagtgtgccacaggacctgggtcggtctagaactctctcaggatgccttttctaccccatccctcacagcctcttgctgctaaaatagatgtttcatttttctgactcatgcaatcattcccctttgcctgtggctaagacttggcttcatttcgtcatgtaattgtatatttttatttggaggcatattttcttttcttacagtcattgccagacagaggcatacaagtctgtttgctgcatacacatttctggtgagggcgactgggtgggtgaagcaccgtgtcctcgctgaggagagaaagggaggcgtgcctgagagggtagcctgtgcatctggtgagtgtgtcacgagctttgttactgccaaactcactcctttttagaaaaaacaaaaaaaaagggccagaaagtcattccttccatcttccttgcagaaaccacgagaacaaagccagttccctgtcagtgacagggcttcttgtaatttgtggtatgtgccttaaacctgaatgtctgtagccaaaacttgtttccacattaagagtcagccagctctggaatggtctggaaatgtcttcctggtaccaacttgttttcttctgcttgattctgccctgtggctcagaggtctggccttatcagccagtgaaagttcatgtaaccttacgtagagatttgtgtgcaggaaaccctgagcatacactagtttgcagggactcgtaaggacatgggaagggaggttcccgaaatccaggcaggaggcccagacacctgaaaggcaaagggatcttggttggttgcaggtgcagtgaagtccactgaaggtgtggtgcgaagaatgcagtccttcacccaggtcccaggagggaagaagggtgtgtgctaattcctggtgcccctcggcgggggccagagagaaggatggggacaacccagagagtcacaagaccagtgcctcccctcagggtgcctccaggctgaaaggggctcctggctctggtctctggggaccctgtgcccgttggttggtggtgtgagggaagagaatccataagagagtttctgagaattatggtgtcatgtccagaagctagagcttaccttgcatcaggggtctccacccactccttttccaacctcctgcgttgaggtttagaaaagagagaatcgactaggcactatggctcacgcctgtaatccaaggactttgggaagctgaggtgagaggatcacttgagctcaggagttcaagactagcctagccaacagcgagacccctgtctctactaaaaaatttggccaggcgtggtggctcacggctgtaatcccagcactttgggaggtgaggcgggcagatcacctgaggtcaggagttcgagacccagcctggccaacatggtgaaaccccatctctactaaaaatacaaaaattagccaggcatggtggcacattcctgt

SEQ ID NO: 312782 - DNA, 2186 bp, Homo sapiens
cccttgcactgcctctggcacctggggcagccgcgcccgcggagttttccgcccggcgctgacggctgctgcgcccgcggctccccagtgccccgagtgccccgcgggccccgcgagcgggagtgggacccagccctaggcagaacccaggcgccgcgcccgggacgcccgcggagagagccactcccgcccacgtcccatttcgcccctcgcgtccggagtccccgtggccaggtgtgtgtctggggaagagacttacagaagtggagttgctgagtcaaagatctaaccatgagctaccctggctatcccccgcccccaggtggctacccaccagctgcaccaggtggtggtccctggggaggtgctgcctaccctcctccgcccagcatgccccccatcgggctggataacgtggccacctatgcggggcagttcaaccaggactatctctcgggaatggcggccaacatgtctgggacatttggaggagccaacatgcccaacctgtaccctggggcccctggggctggctacccaccagtgccccctggcggctttgggcagcccccctctgcccagcagcctgttcctccctatgggatgtatccacccccaggaggaaacccaccctccaggatgccctcatatccgccatacccaggggcccctgtgccgggccagcccatgccaccccccggacagcagcccccaggggcctaccctgggcagccaccagtgacctaccctggtcagcctccagtgccactccctgggcagcagcagccagtgccgagctacccaggatacccggggtctgggactgtcacccccgctgtgcccccaacccagtttggaagccgaggcaccatcactgatgctcccggctttgaccccctgcgagatgccgaggtcctgcggaaggccatgaaaggcttcgggacggatgagcaggccatcattgactgcctggggagtcgctccaacaagcagcggcagcagatcctactttccttcaagacggcttacggcaaggatttgatcaaagatctgaaatctgaactgtcaggaaactttgagaagacaatcttggctctgatgaagaccccagtcctctttgacatttatgagataaaggaagccatcaagggggttggcactgatgaagcctgcctgattgagatcctcgcttcccgcagcaatgagcacatccgagaattaaacagagcctacaaagcagaattcaaaaagaccctggaagaggccattcgaagcgacacatcagggcacttccagcggctcctcatctctctctctcagggaaaccgtgatgaaagcacaaacgtggacatgtcactcgcccagagagatgcccaggagctgtatgcggccggggagaaccgcctgggaacagacgagtccaagttcaatgcggttctgtgctcccggagccgggcccacctggtagcagttttcaatgagtaccagagaatgacaggccgggacattgagaagagcatctgccgggagatgtccggggacctggaggagggcatgctggccgtggtgaaatgtctcaagaataccccagccttctttgcggagaggctcaacaaggccatgaggggggcaggaacaaaggaccggaccctgattcgcatcatggtgtctcgcagcgagaccgacctcctggacatcagatcagagtataagcggatgtacggcaagtcgctgtaccacgacatctcgggagatacttcaggggattaccggaagattctgctgaagatctgtggtggcaatgactgaacagtgactggtggctcacttctgcccacctgccggcaacaccagtgccaggaaaaggccaaaagaatgtctgtttctaacaaatccacaaatagccccgagattcaccgtcctagagcttaggcctgtcttccacccctcctgacccgtatagtgtgccacaggacctgggtcggtctagaactctctcaggatgccttttctaccccatccctcacagcctcttgctgctaaaatagatgtttcatttttctaaaaaaaaaaaagggggggggccaaagattcttgggggcccaggttggcgtcccggttttgtcaagggcctcaagggacgcttaaagagggggggggtaaacgggtggaaagggccgggcttg

SEQ ID NO: 312783 - DNA, 2283 bp, Homo sapiens
aaaaagaccctggaagaggccattcgaattctgctttgtaggctctgtttaattctcggatgtgctcattgctgcgggaattaaacagagcctacaaagcagaattcaaaaagaccctggaagaggccattcgaagcgacacatcagggcacttccagcggctcctcatctctctctctcagggaaaccgtgatgaaagcacaaacgtggacatgtcactcgcccagagagatgcccaggagctgtatgcggccggggagaaccgcctgggaacagacgagtccaagttcaatgcggttctgtgctcccggagccgggcccacctggtagcagttttcaatgagtaccagagaatgacaggccgggacattgagaagagcatctgccgggagatgtccggggacctggaggagggcatgctggccgtggtgaaatgtctcaagaataccccagccttctttgcggagaggctcaacaaggccatgaggggggcaggaacaaaggaccggaccctgattcgcatcatggtgtctcgcagcgagaccgacctcctggacatcagatcagagtataagcggatgtacggcaagtcgctgtaccacgacatctcgggagatacttcaggggattaccggaagattctgctgaagatctgtggtggcaatgactgaacagtgactggtggctcacttctgcccacctgccggcaacaccagtgccaggaaaaggccaaaagaatgtctgtttctaacaaatccacaaatagccccgagattcaccgtcctagagcttaggcctgtcttccacccctcctgacccgtatagtgtgccacaggacctgggtcggtctagaactctctcaggatgccttttctaccccatccctcacagcctcttgctgctaaaatagatgtttcatttttctgactcatgcaatcattcccctttgcctgtggctaagacttggcttcatttcgtcatgtaattgtatatttttatttggaggcatattttcttttcttacagtcattgccagacagaggcatacaagtctgtttgctgcatacacatttctggtgagggcgactgggtgggtgaagcaccgtgtcctcgctgaggagagaaagggaggcgtgcctgagagggtagcctgtgcatctggtgagtgtgtcacgagctttgttactgccaaactcactcctttttagaaaaaacaaaaaaaaagggccagaaagtcattccttccatcttccttgcagaaaccacgagaacaaagccagttccctgtcagtgacagggcttcttgtaatttgtggtatgtgccttaaacctgaatgtctgtagccaaaacttgtttccacattaagagtcagccagctctggaatggtctggaaatgtcttcctggtaccaacttgttttcttctgcttgattctgccctgtggctcagaggtctggccttatcagccagtgaaagttcatgtaaccttacgtagagatttgtgtgcaggaaaccctgagcatacactagtttgcagggactcgtaaggacatgggaagggaggttcccgaaatccaggcaggaggcccagacacctgaaaggcaaagggatcttggttggttgcaggtgcagtgaagtccactgaaggtgtggtgcgaagaatgcagtccttcacccaggtcccaggagggaagaagggtgtgtgctaattcctggtgcccctcggcgggggccagagagaaggatggggacaacccagagagtcacaagaccagtgcctcccctcagggtgcctccaggctgaaaggggctcctggctctggtctctggggaccctgtgcccgttggttggtggtgtgagggaagagaatccataagagagtttctgagaattatggtgtcatgtccagaagctagagcttaccttgcatcaggggtctccacccactccttttccaacctcctgcgttgaggtttagaaaagagagaatcgactaggcactatggctcacgcctgtaatccaaggactttgggaagctgaggtgagaggatcacttgagctcaggagttcaagactagcctagccaacagcgagacccctgtctctactaaaaaatttggccaggcgtggtggctcacggctgtaatcccagcactttgggaggtgaggcgggcagatcacctgaggtcaggagttcgagacccagcctggccaacatggtgaaaccccatctctactaaaaatacaaaaattagccaggcatggtggcacattcctgt

SEQ ID NO: 312784 - DNA, 3542 bp, Homo sapiens
cccttgcactgcctctggcacctggggcagccgcgcccgcggagttttccgcccggcgctgacggctgctgcgcccgcggctccccagtgccccgagtgccccgcgggccccgcgagcgggagtgggacccagccctaggcagaacccaggcgccgcgcccgggacgcccgcggagagagccactcccgcccacgtcccatttcgcccctcgcgtccggagtccccgtggccaggtgtgtgtctggggaagagacttacagaagtggagttgctgagtcaaagatctaaccatgagctaccctggctatcccccgcccccaggtggctacccaccagctgcaccaggtggtggtccctggggaggtgctgcctaccctcctccgcccagcatgccccccatcgggctggataacgtggccacctatgcggggcagttcaaccaggactatctctcgggaatggcggccaacatgtctgggacatttggaggagccaacatgcccaacctgtaccctggggcccctggggctggctacccaccagtgccccctggcggctttgggcagcccccctctgcccagcagcctgttcctccctatgggatgtatccacccccaggaggaaacccaccctccaggatgccctcatatccgccatacccaggggcccctgtgccgggccagcccatgccaccccccggacagcagcccccaggggcctaccctgggcagccaccagtgacctaccctggtcagcctccagtgccactccctgggcagcagcagccagtgccgagctacccaggatacccggggtctgggactgtcacccccgctgtgcccccaacccagtttggaagccgaggcaccatcactgatgctcccggctttgaccccctgcgagatgccgaggtcctgcggaaggccatgaaaggcttcgggacggatgagcaggccatcattgactgcctggggagtcgctccaacaagcagcggcagcagatcctactttccttcaagacggcttacggcaaggatttgatcaaagatctgaaatctgaactgtcaggaaactttgagaagacaatcttggctctgatgaagaccccagtcctctttgacatttatgagataaaggaagccatcaagggggttggcactgatgaagcctgcctgattgagatcctcgcttcccgcagcaatgagcacatccgagaattaaacagagcctacaaagcagaattcaaaaagaccctggaagaggccattcgaagcgacacatcagggcacttccagcggctcctcatctctctctctcagggaaaccgtgatgaaagcacaaacgtggacatgtcactcgcccagagagatgcccaggagctgtatgcggccggggagaaccgcctgggaacagacgagtccaagttcaatgcggttctgtgctcccggagccgggcccacctggtagcagttttcaatgagtaccagagaatgacaggccgggacattgagaagagcatctgccgggagatgtccggggacctggaggagggcatgctggccgtggtgaaatgtctcaagaataccccagccttctttgcggagaggctcaacaaggccatgaggggggcaggaacaaaggaccggaccctgattcgcatcatggtgtctcgcagcgagaccgacctcctggacatcagatcagagtataagcggatgtacggcaagtcgctgtaccacgacatctcgagtatctcctgcatgccagcaagctatggacatctggaagaagccacatgccttgccctcaagttgcttagggtggaaggaaatgattagaaatgagccaagccgagcctgcactcttagaggagatacttcaggggattaccggaagattctgctgaagatctgtggtggcaatgactgaacagtgactggtggctcacttctgcccacctgccggcaacaccagtgccaggaaaaggccaaaagaatgtctgtttctaacaaatccacaaatagccccgagattcaccgtcctagagcttaggcctgtcttccacccctcctgacccgtatagtgtgccacaggacctgggtcggtctagaactctctcaggatgccttttctaccccatccctcacagcctcttgctgctaaaatagatgtttcatttttctgactcatgcaatcattcccctttgcctgtggctaagacttggcttcatttcgtcatgtaattgtatatttttatttggaggcatattttcttttcttacagtcattgccagacagaggcatacaagtctgtttgctgcatacacatttctggtgagggcgactgggtgggtgaagcaccgtgtcctcgctgaggagagaaagggaggcgtgcctgagagggtagcctgtgcatctggtgagtgtgtcacgagctttgttactgccaaactcactcctttttagaaaaaacaaaaaaaaagggccagaaagtcattccttccatcttccttgcagaaaccacgagaacaaagccagttccctgtcagtgacagggcttcttgtaatttgtggtatgtgccttaaacctgaatgtctgtagccaaaacttgtttccacattaagagtcagccagctctggaatggtctggaaatgtcttcctggtaccaacttgttttcttctgcttgattctgccctgtggctcagaggtctggccttatcagccagtgaaagttcatgtaaccttacgtagagatttgtgtgcaggaaaccctgagcatacactagtttgcagggactcgtaaggacatgggaagggaggttcccgaaatccaggcaggaggcccagacacctgaaaggcaaagggatcttggttggttgcaggtgcagtgaagtccactgaaggtgtggtgcgaagaatgcagtccttcacccaggtcccaggagggaagaagggtgtgtgctaattcctggtgcccctcggcgggggccagagagaaggatggggacaacccagagagtcacaagaccagtgcctcccctcagggtgcctccaggctgaaaggggctcctggctctggtctctggggaccctgtgcccgttggttggtggtgtgagggaagagaatccataagagagtttctgagaattatggtgtcatgtccagaagctagagcttaccttgcatcaggggtctccacccactccttttccaacctcctgcgttgaggtttagaaaagagagaatcgactaggcactatggctcacgcctgtaatccaaggactttgggaagctgaggtgagaggatcacttgagctcaggagttcaagactagcctagccaacagcgagacccctgtctctactaaaaaatttggccaggcgtggtggctcacggctgtaatcccagcactttgggaggtgaggcgggcagatcacctgaggtcaggagttcgagacccagcctggccaacatggtgaaaccccatctctactaaaaatacaaaaattagccaggcatggtggcacattcctgt

SEQ ID NO: 312785 - DNA, 2002 bp, Homo sapiens
cacgaggtgttttttctaaaaaggagtgagtttggcagtaacaaagctcgtgacacactcaccagatgcacaggctaccctctcaggcacgcctccctttctctcctcagcgaggacacggtgcttcacccacccagtcgccctcacctgaaatgtctcaagaataccccagccttctttgcggagaggctcaacaaggccatgaggggggcaggaacaaaggaccggaccctgattcgcatcatggtgtctcgcagcgagaccgacctcctggacatcagatcagagtataagcggatgtacggcaagtcgctgtaccacgacatctcgggagatacttcaggggattaccggaagattctgctgaagatctgtggtggcaatgactgaacagtgactggtggctcacttctgcccacctgccggcaacaccagtgccaggaaaaggccaaaagaatgtctgtttctaacaaatccacaaatagccccgagattcaccgtcctagagcttaggcctgtcttccacccctcctgacccgtatagtgtgccacaggacctgggtcggtctagaactctctcaggatgccttttctaccccatccctcacagcctcttgctgctaaaatagatgtttcatttttctgactcatgcaatcattcccctttgcctgtggctaagacttggcttcatttcgtcatgtaattgtatatttttatttggaggcatattttcttttcttacagtcattgccagacagaggcatacaagtctgtttgctgcatacacatttctggtgagggcgactgggtgggtgaagcaccgtgtcctcgctgaggagagaaagggaggcgtgcctgagagggtagcctgtgcatctggtgagtgtgtcacgagctttgttactgccaaactcactcctttttagaaaaaacaaaaaaaaagggccagaaagtcattccttccatcttccttgcagaaaccacgagaacaaagccagttccctgtcagtgacagggcttcttgtaatttgtggtatgtgccttaaacctgaatgtctgtagccaaaacttgtttccacattaagagtcagccagctctggaatggtctggaaatgtcttcctggtaccaacttgttttcttctgcttgattctgccctgtggctcagaggtctggccttatcagccagtgaaagttcatgtaaccttacgtagagatttgtgtgcaggaaaccctgagcatacactagtttgcagggactcgtaaggacatgggaagggaggttcccgaaatccaggcaggaggcccagacacctgaaaggcaaagggatcttggttggttgcaggtgcagtgaagtccactgaaggtgtggtgcgaagaatgcagtccttcacccaggtcccaggagggaagaagggtgtgtgctaattcctggtgcccctcggcgggggccagagagaaggatggggacaacccagagagtcacaagaccagtgcctcccctcagggtgcctccaggctgaaaggggctcctggctctggtctctggggaccctgtgcccgttggttggtggtgtgagggaagagaatccataagagagtttctgagaattatggtgtcatgtccagaagctagagcttaccttgcatcaggggtctccacccactccttttccaacctcctgcgttgaggtttagaaaagagagaatcgactaggcactatggctcacgcctgtaatccaaggactttgggaagctgaggtgagaggatcacttgagctcaggagttcaagactagcctagccaacagcgagacccctgtctctactaaaaaatttggccaggcgtggtggctcacggctgtaatcccagcactttgggaggtgaggcgggcagatcacctgaggtcaggagttcgagacccagcctggccaacatggtgaaaccccatctctactaaaaatacaaaaattagccaggcatggtggcacattcctgt

SEQ ID NO: 312786 - DNA, 2389 bp, Homo sapiens
cccttgcactgcctctggcacctggggcagccgcgcccgcggagttttccgcccggcgctgacggctgctgcgcccgcggctccccagtgccccgagtgccccgcgggccccgcgagcgggagtgggacccagccctaggcagaacccaggcgccgcgcccgggacgcccgcggagagagccactcccgcccacgtcccatttcgcccctcgcgtccggagtccccgtggccaggtgtgtgtctggggaagagacttacagaagtggagttgctgagtcaaagatctaaccatgagctaccctggctatcccccgcccccaggtggctacccaccagctgcaccaggtggtggtccctggggaggtgctgcctaccctcctccgcccagcatgccccccatcgggctggataacgtggccacctatgcggggcagttcaaccaggactatctctcgggaatggcggccaacatgtctgggacatttggaggagccaacatgcccaacctgtaccctggggcccctggggctggctacccaccagtgccccctggcggctttgggcagcccccctctgcccagcagcctgttcctccctatgggatgtatccacccccaggaggaaacccaccctccaggatgccctcatatccgccatacccaggggcccctgtgccgggccagcccatgccaccccccggacagcagcccccaggggcctaccctgggcagccaccagtgacctaccctggtcagcctccagtgccactccctgggcagcagcagccagtgccgagctacccaggatacccggggtctgggactgtcacccccgctgtgcccccaacccagtttggaagccgaggcaccatcactgatgctcccggctttgaccccctgcgagatgccgaggtcctgcggaaggccatgaaaggcttcgggacggatgagcaggccatcattgactgcctggggagtcgctccaacaagcagcggcagcagatcctactttccttcaagacggcttacggcaaggatttgatcaaagatctgaaatctgaactgtcaggaaactttgagaagacaatcttggctctgatgaagaccccagtcctctttgacatttatgagataaaggaagccatcaagggggttggcactgatgaagcctgcctgattgagatcctcgcttcccgcagcaatgagcacatccgagaattaaacagagcctacaaagcagaattcaaaaagaccctggaagaggccattcgaagcgacacatcagggcacttccagcggctcctcatctctctctctcagggaaaccgtgatgaaagcacaaacgtggacatgtcactcgcccagagagatgcccaggagctgtatgcggccggggagaaccgcctgggaacagacgagtccaagttcaatgcggttctgtgctcccggagccgggcccacctggtagcagttttcaatgagtaccagagaatgacaggccgggacattgagaagagcatctgccgggagatgtccggggacctggaggagggcatgctggccgtggtgaaatgtctcaagaataccccagccttctttgcggagaggctcaacaaggccatgaggggggcaggaacaaaggaccggaccctgattcgcatcatggtgtctcgcagcgagaccgacctcctggacatcagatcagagtataagcggatgtacggcaagtcgctgtaccacgacatctcggtacgggcctgctgcaggccaactgggctcccttttggcatctcagtcacctgtggaacctccctccttggagtggccatatgcttggcctctgtgctgtgtgtgggcatcttgattatggacctcggacttgttcatccccttgcccttaaacagattataaatttctgagggcaggtggatcatgaccttgctgtcgcccccaccttgcatcccccagcagcatcagagaacactcgggacctccccaaccttgaccgtgaccttcagcgttccgatcaccgtgtgattccttgatctgtcagtgagaactcatgtcccaaaggctctgtggagctctgctgtcactccctgacaaagcacttcctgcactcagctttatggcgtaggccacatagtaaggccgttcagagcgagggccctgggggtcacgccacttggagtccagcttttctacttgctaactgtgtgaccttgaatggctcccttaaatctccctgaaccccagctccattgtctttaagatgagaaaataatcgttccttcctgggaatgttgtgagtattgagtgaggcagtgcaggtcaagtgtctattaaacactagccacagttgtatcgctgtgtggcagagccagtctg

SEQ ID NO: 312787 - DNA, 2592 bp, Homo sapiens
cccttgcactgcctctggcacctggggcagccgcgcccgcggagttttccgcccggcgctgacggctgctgcgcccgcggctccccagtgccccgagtgccccgcgggccccgcgagcgggagtgggacccagccctaggcagaacccaggcgccgcgcccgggacgcccgcggagagagccactcccgcccacgtcccatttcgcccctcgcgtccggagtccccgtggccaggtgtgtgtctggggaagagacttacagaagtggagttgctgagtcaaagatctaaccatgagctaccctggctatcccccgcccccaggtggctacccaccagctgcaccaggtggtggtccctggggaggtgctgcctaccctcctccgcccagcatgccccccatcgggctggataacgtggccacctatgcggggcagttcaaccaggactatctctcgggaatggcggccaacatgtctgggacatttggaggagccaacatgcccaacctgtaccctggggcccctggggctggctacccaccagtgccccctggcggctttgggcagcccccctctgcccagcagcctgttcctccctatgggatgtatccacccccaggaggaaacccaccctccaggatgccctcatatccgccatacccaggggcccctgtgccgggccagcccatgccaccccccggacagcagcccccaggggcctaccctgggcagccaccagtgacctaccctggtcagcctccagtgccactccctgggcagcagcagccagtgccgagctacccaggatacccggggtctgggactgtcacccccgctgtgcccccaacccagtttggaagccgaggcaccatcactgatgctcccggctttgaccccctgcgagatgccgaggtcctgcggaaggccatgaaaggcttcgggacggatgagcaggccatcattgactgcctggggagtcgctccaacaagcagcggcagcagatcctactttccttcaagacggcttacggcaaggatttgatcaaagatctgaaatctgaactgtcaggaaactttgagaagacaatcttggctctgatgaagaccccagtcctctttgacatttatgagataaaggaagccatcaagggggttggcactgatgaagcctgcctgattgagatcctcgcttcccgcagcaatgagcacatccgagaattaaacagagcctacaaagcagaattcaaaaagaccctggaagaggccattcgaagcgacacatcagggcacttccagcggctcctcatctctctctctcagggaaaccgtgatgaaagcacaaacgtggacatgtcactcgcccagagagatgcccaggagctgtatgcggccggggagaaccgcctgggaacagacgagtccaagttcaatgcggttctgtgctcccggagccgggcccacctggtagcagttttcaatgagtaccagagaatgacaggccgggacattgagaagagcatctgccgggagatgtccggggacctggaggagggcatgctggccgtggtgaaatgtctcaagaataccccagccttctttgcggagaggctcaacaaggccatgagggtatgtaacttccatgtgcaggttgcgatggaaccttagcctcgcctgtgcctgggaccaagggctgagggcagaaggcctggggagagctaaatctcagctgagagttccgaggacctgggtagggaggggactggagggcccagggcaggtgggaaggtgaggaggcctggtgctcatgctcttgggtggactctctttagggggcaggaacaaaggaccggaccctgattcgcatcatggtgtctcgcagcgagaccgacctcctggacatcagatcagagtataagcggatgtacggcaagtcgctgtaccacgacatctcggtacgggcctgctgcaggccaactgggctcccttttggcatctcagtcacctgtggaacctccctccttggagtggccatatgcttggcctctgtgctgtgtgtgggcatcttgattatggacctcggacttgttcatccccttgcccttaaacagattataaatttctgagggcaggtggatcatgaccttgctgtcgcccccaccttgcatcccccagcagcatcagagaacactcgggacctccccaaccttgaccgtgaccttcagcgttccgatcaccgtgtgattccttgatctgtcagtgagaactcatgtcccaaaggctctgtggagctctgctgtcactccctgacaaagcacttcctgcactcagctttatggcgtaggccacatagtaaggccgttcagagcgagggccctgggggtcacgccacttggagtccagcttttctacttgctaactgtgtgaccttgaatggctcccttaaatctccctgaaccccagctccattgtctttaagatgagaaaataatcgttccttcctgggaatgttgtgagtattgagtgaggcagtgcaggtcaagtgtctattaaacactagccacagttgtatcgctgtgtggcagagccagtctg

SEQ ID NO: 312788 - DNA, 937 bp, Homo sapiens
cccttgcactgcctctggcacctggggcagccgcgcccgcggagttttccgcccggcgctgacggctgctgcgcccgcggctccccagtgccccgagtgccccgcgggccccgcgagcgggagtgggacccagccctaggcagaacccaggcgccgcgcccgggacgcccgcggagagagccactcccgcccacgtcccatttcgcccctcgcgtccggagtccccgtggccagatctaaccatgagctaccctggctatcccccgcccccaggtggctacccaccagctgcaccaggtggtggtccctggggaggtgctgcctaccctcctccgcccagcatgccccccatcgggctggataacgtggccacctatgcggggcagttcaaccaggactatctctcgggaatggcggccaacatgtctgggacatttggaggagccaacatgcccaacctgtaccctggggcccctggggctggctacccaccagtgccccctggcggctttgggcagcccccctctgcccagcagcctgttcctccctatgggatgtatccacccccaggaggaaacccaccctccaggatgccctcatatccgccatacccaggggcccctgtgccgggccagcccatgccaccccccggacagcagcccccaggggcctaccctgggcagccaccagtgacctaccctggtcagcctccagtgccactccctgggcagcagcagccagtgccgagctacccaggatacccggggtctgggactgtcacccccgctgtgcccccaacccagagttggaagcgagggcatcacttgttctcccgggtttgaccccttcgaaattccgaggtctcggaagcgctaaggcgtcgacggataagcaggcacacttgaggcggggggcgcccaaggggcggggactactc

SEQ ID NO: 312789 - DNA, 1095 bp, Homo sapiens
cgcgggctgccgggaacggggcggagcgcggctgcgccggcgcgtcgaggggagaggcagcagccgcgatggacgtgttcctcatgatccggcgccacaagaccaccatcttcacggacgccaaggagtccagcacggtgttcgaactgaagcgcatcgtcgagggcatcctcaagcggcctcctgacgagcagcggctgtacaaggatgaccaactcttggatgatggcaagacactgggcgagtgtggcttcaccagtcaaacagcacggccacaggccccagccacagtggggctggccttccgggcagatgacacctttgaggccctgtgcatcgagccgttttccagcccgccagagctgcccgatgtgatgaagccccaggactcgggaagcagtgccaatgaacaagccgtgcagtgagacccccaagaggcccatttcccccaataaaagagatttgggagtctgcctggttgctgcctctttttcccgcccctccctgggatgggtcccactccctgtgggctccttttggggcttgtgcttggcagttcctgtgctgtcctgtctcccagatcctgagaccctggctgagaacttggcccagcctgctgcttaaaggcaccatggggacctgggttgccctcagacccaagccattgttagcagctagccagccacaccaaccacgccagggggaggaaagggaaggactgggagagacacaaagaccagagccagcctcagggacaagagattccagttttaggcctttctccttctaagtgccccccacccccatagcctgcatgtccactcccagacgatggccaagagcagaaacacaagctggagccagtgtcctggtttgacagcatgttcaacgagggaaccccaagacggacccacacaggtccacccacgctgggggctgtaatcacggagggaagtggctgcccccttaacacacctttaataaacagtctacagacccaaaaaaaaaaatcattgtctcgtaggccttagtggtgaagctctgcagccgattcctttatcgaggcgtaatccatgatcctcgctactgactctt

SEQ ID NO: 312790 - DNA, 1000 bp, Homo sapiens
cgcgggctgccgggaacggggcggagcgcggctgcgccggcgcgtcgaggggagaggcagcagccgcgatggacgtgttcctcatgatccggcgccacaagaccaccatcttcacggacgccaaggagtccagcacggtgttcgaactgaagcgcatcgtcgagggcatcctcaagcggcctcctgacgagcagcggctgtacaaggatgaccaactcttggatgatggcaagacactgggcgagtgtggcttcaccagtcaaacagcacggccacaggccccagccacagtggggctggccttccgggcagatgacacctttgaggccctgtgcatcgagccgttttccagcccgccagagctgcccgatgtgatgaagccccaggactcgggaagcagtgccaatgaacaagccgtgcagtgagacccccaagaggcccatttcccccaataaaagagatttgggagtctgcctggttgctgcctctttttcccgcccctccctgggatgggtcccactccctgtgggctccttttggggcttgtgcttggcagttcctgtgctgtcctgtctcccagatcctgagaccctggctgagaacttggcccagcctgctgcttaaaggcaccatggggacctgggttgccctcagacccaagccattgttagcagctagccagccacaccaaccacgccagggggaggaaagggaaggactgggagagacacaaagaccagagccagcctcagggacaagagattccagttttaggcctttctccttctaagtgccccccacccccatagcctgcatgtccactcccagacgatggccaagagcagaaacacaagctggagccagtgtcctggtttgacagcatgttcaacgagggaaccccaagacggacccacacaggtccacccacgctgggggctgtaatcacggagggaagtggctgcccccttaacacacctttaataaacagtctacagaccca

SEQ ID NO: 312791 - DNA, 468 bp, Homo sapiens
  misc_feature (26)..(26): n is a, c, g, or t
gcggcggggggcggctgggccgcgcngggggcccgggcttcgtgctcacgccggcccgccgcccccaggacgtgttcctcatgatccggcgccacaagaccaccatcttcacggacgccaaggagtccagcacggtgttcgaactgaagcgcatcgtcgagggcatcctcaagcggcctcctgacgagcagcggctgtacaaggatgaccaactcttggatgatggcaagacactgggcgagtgtggcttcaccagtcaaacagcacggccacaggccccagccacagtggggctggccttccgggcagatgacacctttgaggccctgtgcatcgagccgttttccagcccgccagagctgcccgatgtgatgaagccccaggactcgggaagcagtgccaatgaacaagccgtgcagtgagacccccaagaggcccatttcccccaataaaagagatttgggagtc

SEQ ID NO: 312792 - DNA, 595 bp, Homo sapiens
  misc_feature (26)..(26): n is a, c, g, or t
gcggcggggggcggctgggccgcgcngggggcccgggcttcgtgctcacgccggcccgccgcccccaggacgtgttcctcatgatccggcgccacaagaccaccatcttcacggacgccaaggagtccagcacggtgttcgaactgaagcgcatcgtcgagggcatcctcaagcggcctcctgacgagcagcggctgtacaaggatgaccaactcttggatgatggcaagacactgggcgagtgtggcttcaccagtcaaacagcacggccacaggccccagccacagtggggctggccttccgggcagatgacacctttgaggccctgtgcatcgagccgttttccagcccgccagagctgcccgatgtgatgaagccccaggactcgggaagcagtgccaatgaacaagccgtgcagtgagacccccaagaggcccatttcccccaataaaagagatttgggagtcaaaaaaaaaaaaaaaaaaccccaaaccaacaaaaaacaaaacttttagattcgggaagccttacgtttggcccaatttttgctctattgcccaattccccttatgggggggttattaaattccgggt

SEQ ID NO: 312793 - DNA, 999 bp, Homo sapiens
ctagctgggggcgaactgggggagaggcagcagccgcgatggacgtgttcctcatgatccggcgccacaagaccaccatcttcacggacgccaaggagtccagcacggtgttcgaactgaagcgcatcgtcgagggcatcctcaagcggcctcctgacgagcagcggctgtacaaggatgaccaactcttggatgatggcaagacactgggcgagtgtggcttcaccagtcaaacagcacggccacaggccccagccacagtggggctggccttccgggcagatgacacctttgaggccctgtgcatcgagccgttttccagcccgccagagctgcccgatgtgatgaagccccaggactcgggaagcagtgccaatgaacaagccgtgcacctgcatgtccactcccagacgatggccaagagcagaaacacaagctggagccagtgtcctggtttgacagcatgttcaacgagggaaccccaagacggacccacacaggtccacccacgctgggggctgtaatcacggagggaagtggctgcccccttaacacacctttaataaacagtctacagacccaaaaacaacccaaaaaaaacatcgaagaatcaaaggaccggggtgcggcaaaaagagcgcaccgaaagggccccacgggacacagaggaacccagcacacgcccaacggaaccacaggggccaacactcgacgggacccaccaccgacagagagcgaacacaataccactcgccgaagaaacacacggtgacacccgcgccctaaaggacacccaagacacgagcagagcgcgacaacacagacaagaccacgagcgagacacaaaggacagccggggacacaccaacagacgggagcaagcgacacacacgcacagcagcaacgacctaacaagagaacacagacgccaccagaagcggacacgagcaacacaggaagacagaaacaacagatcacgcacacaagacgacagcgacc

SEQ ID NO: 312794 - DNA, 1282 bp, Homo sapiens
cgcgggctgccgggaacggggcggagcgcggctgcgccggcgcgtcgaggggagaggcagcagccgcgatggacgtgttcctcatgatccggcgccacaagaccaccatcttcacggacgccaaggagtccagcacggtgttcgaactgaagcgcatcgtcgagggcatcctcaagcggcctcctgacgagcagcggctgtacaaggatgaccaactcttggatgatggcaagacactgggcgagtgtggcttcaccagtcaaacagcacggccacaggccccagccacagtggggctggccttccgggcagatgacacctttgaggccctgtgcatcgagccgttttccagcccgccagagctgcccgatgtgatgaagccccaggactcgggaagcagtgccaatgaacaagccgtgcagtgagacccccaagaggcccatttcccccaataaaagagatttgggagtcaaaaaaaaaaaaaaaaaaaaaaaaaaaaacaaaaaaaaaaaaaaaaaaaaaaaaaaaaaaaaaaaaaaaaaaaaaaaaaaaaaaaaggggggggggggcaaaaaccggggggcgccaccaaacgatcgcacccccccccgcactttttctagacagaagaggggcgggccaaccaaaacagaaggcaggccataatctaaacaagaaagagccgagcgggcggcgcaccttaaaacacacaccgcctcgagcggcgaagaaaaagaacaccacagtccgcagcgagcaatccatagtaaggggaaggacacccaactcagtgcgggagggcggagcaacaagacgtagcgcacaccaacactaaagaaaaataaagcgcccgaggagcaaaaaacaacccaaccgcgaggatgggtgggagaaacacacaccgcagtaattcgttccgcccaaggacaaaaaaagctcgcacacgaggagaggtaaaaatagataaagaaaatttcaacccggccgctggctcggatacacaatcgtccgcacctaatgaatcacaattctactagaaaaaactcagcaacgacagcatatgccgaatgtccattcatcaactcagcctgaatacatgcatacgataaaatgtccatacacatactatctcccccacaccgcacacccacgaacagacctaaacacagctactcaaacacacagcaactcacaaagcaccacaccacgcacaataaagagcacactccccacaatccacatatctacccaccttctccaccaccaccacgctactaagaaa

SEQ ID NO: 312795 - DNA, 1029 bp, Homo sapiens
cgcgggctgccgggaacggggcggagcgcggctgcgccggcgcgtcgaggggagaggcagcagccgcgatggacgtgttcctcatgatccggcgccacaagaccaccatcttcacggacgccaaggagtccagcacggtgttcgaactgaagcgcatcgtcgagggcatcctcaagcggcctcctgacgagcagcggctgtacaaggatgaccaactcttggatgatggcaagacactgggcgagtgtggcttcaccagtcaaacagcacggccacaggccccagccacagtggggctggccttccgggcagatgacacctttgaggccctgtgcatcgagccgttttccagcccgccagagctgcccgatgtgatgaagccccaggactcgggaagcagtgccaatgaacaagccgtgcacctgcatgtccactcccagacgatggccaagagcagaaacacaagctggagccagtgtcctggtttgacagcatgttcaacgagggaaccccaagacggacccacacaggtccacccacgctgggggctgtaatcacggagggaagtggctgcccccttaacacacctttaataaacagtctacagacccaaaaacaacccaaaaaaaacatcgaagaatcaaaggaccggggtgcggcaaaaagagcgcaccgaaagggccccacgggacacagaggaacccagcacacgcccaacggaaccacaggggccaacactcgacgggacccaccaccgacagagagcgaacacaataccactcgccgaagaaacacacggtgacacccgcgccctaaaggacacccaagacacgagcagagcgcgacaacacagacaagaccacgagcgagacacaaaggacagccggggacacaccaacagacgggagcaagcgacacacacgcacagcagcaacgacctaacaagagaacacagacgccaccagaagcggacacgagcaacacaggaagacagaaacaacagatcacgcacacaagacgacagcgacc

SEQ ID NO: 312796 - DNA, 928 bp, Homo sapiens
caacggtatcgcccgcgccgtgcagttgacgaaattgaggatgaccaactcttggatgatggcaagacactgggcgagtgtggcttcaccagtcaaacagcacggccacaggccccagccacagtggggctggccttccgggcagatgacacctttgaggccctgtgcatcgagccgttttccagcccgccagagctgcccgatgtgatgaagccccaggactcgggaagcagtgccaatgaacaagccgtgcagtgagacccccaagaggcccatttcccccaataaaagagatttgggagtctgcctggttgctgcctctttttcccgcccctccctgggatgggtcccactccctgtgggctccttttggggcttgtgcttggcagttcctgtgctgtcctgtctcccagatcctgagaccctggctgagaacttggcccagcctgctgcttaaaggcaccatggggacctgggttgccctcagacccaagccattgttagcagctagccagccacaccaaccacgccagggggaggaaagggaaggactgggagagacacaaagaccagagccagcctcagggacaagagattccagttttaggcctttctccttctaagtgccccccacccccatagcctgcatgtccactcccagacgatggccaagagcagaaacacaagctggagccagtgtcctggtttgacagcatgttcaacgagggaaccccaagacggacccacacaggtccacccacgctgggggctgtaatcacggagggaagtggctgcccccttaacacacctttaataaacagtctacagacccaaaaaaaaaaatcattgtctcgtaggccttagtggtgaagctctgcagccgattcctttatcgaggcgtaatccatgatcctcgctactgactctt

SEQ ID NO: 312797 - DNA, 338 bp, Homo sapiens
cgcgggctgccgggaacggggcggagcgcggctgcgccggcgcgtcgaggggagaggcagcagccgcgatggacgtgttcctcatgatccggcgccacaagaccaccatcttcacggacgccaaggagtccagcacggtgttcgaactgaagcgcatcgtcgagggcatcctcaagcggcctcctgacgagcagcggctgtacaaggatgaccaactcttggatgatggcaagacactgggcgagtgtggcttcaccagtcaaacagcacggccacaggccccagccacagtggggctggccttccgggcaggtgagaggcccaccacccactgggct

SEQ ID NO: 312798 - DNA, 365 bp, Homo sapiens
cgcgggctgccgggaacggggcggagcgcggctgcgccggcgcgtcgaggggagaggcagcagccgcgatggacgtgttcctcatgatccggcgccacaagaccaccatcttcacggacgccaaggagtccagcacggtgttcgaactgaagcgcatcgtcgagggcatcctcaagcggcctcctgacgagcagcggctgtacaagatgacacctttgaggccctgtgcatcgagccgttttccagcccgccagagctgcccgatgtgatgaagccccaggactcgggaagcagtgccaatgaacaagccgtgcagtgagacccccaagaggcccatttcccccaataaaagagatttgggagtc

SEQ ID NO: 312799 - DNA, 471 bp, Homo sapiens
cgcgggctgccgggaacggggcggagcgcggctgcgccggcgcgtcgaggggagaggcagcagccgcgatggacgtgttcctcatgatccggcgccacaagaccaccatcttcacggacgccaaggagtccagcacggtgttcgaactgaagcgcatcgtcgagggcatcctcaagcggcctcctgacgagcagcggctgtacaaggatgaccaactcttggatgatggcaagacactgggcgagtgtggcttcaccagtcaaacagcacggccacaggccccagccacagtggggctggccttccgggcagatgacacctttgaggccctgtgcatcgagccgttttccagcccgccagagctgcccgatgtgatgaagccccaggactcgggaagcagtgccaatgaacaagccgtgcagtgagacccccaagaggcccatttcccccaataaaagagatttgggagtc

SEQ ID NO: 312800 - DNA, 646 bp, Homo sapiens
cgcgggctgccgggaacggggcggagcgcggctgcgccggcgcgtcgaggggagaggcagcagccgcgatggacgtgttcctcatgatccggcgccacaagaccaccatcttcacggacgccaaggagtccagcacggtgttcgaactgaagcgcatcgtcgagggcatcctcaagcggcctcctgacgagcagcggctgtacaaggatgaccaactcttggatgatggcaagacactgggcgagtgtggcttcaccagtcaaacagcacggccacaggccccagccacagtggggctggccttccgggcagatgacacctttgaggccctgtgcatcgagccgttttccagcccgccagagctgcccgatgtgatgaagccccaggactcgggaagcagtgccaatgaacaagccgtgcagtgagacccccaagaggcccatttcccccaataaaagagatttgggagtcaaaaaaaaaaaaaaaaaaaaaaaaaaaaacaaaaaaaaaaaaaaaaaaaaaaaaaaaaaaaaaaaaccccaaaccaacaaaaaacaaaacttttagattcgggaagccttacgtttggcccaatttttgctctattgcccaattccccttatgggggggttattaaattccgggt

SEQ ID NO: 312801 - DNA, 660 bp, Homo sapiens
cgcgggctgccgggaacggggcggagcgcggctgcgccggcgcgtcgaggggagaggcagcagccgcgatggacgtgttcctcatgatccggcgccacaagaccaccatcttcacggacgccaaggagtccagcacggtgttcgaactgaagcgcatcgtcgagggcatcctcaagcggcctcctgacgagcagcggctgtacaaggatgaccaactcttggatgatggcaagacactgggcgagtgtggcttcaccagtcaaacagcacggccacaggccccagccacagtggggctggccttccgggcagatgacacctttgaggccctgtgcatcgagccgttttccagcccgccagagctgcccgatgtgatgaagccccaggactcgggaagcagtgccaatgaacaagccgtgcagtgagacccccaagaggcccatttcccccaataaaagagatttgggagtcaactgcctcctgccagctctcatctcccctgacagcttgacctagccgccacaggcagggctgtatgccacgaatttactgactaacaccattggggccgtttggccccatcagcttttagattgggccaagcttatcttcggcccaatttcgggctcactggcccatttcccctatgggggccgtttc

SEQ ID NO: 312802 - DNA, 582 bp, Homo sapiens
ctagctgggggcgaactgggggagaggcagcagccgcgatggacgtgttcctcatgatccggcgccacaagaccaccatcttcacggacgccaaggagtccagcacggtgttcgaactgaagcgcatcgtcgagggcatcctcaagcggcctcctgacgagcagcggctgtacaaggatgaccaactcttggatgatggcaagacactgggcgagtgtggcttcaccagtcaaacagcacggccacaggccccagccacagtggggctggccttccgggcagatgacacctttgaggccctgtgcatcgagccgttttccagcccgccagagctgcccgatgtgatgaagccccaggactcgggaagcagtgccaatgaacaagccgtgcacctgcatgtccactcccagacgatggccaagagcagaaacacaagctggagccagtgtcctggtttgacagcatgttcaacgagggaaccccaagacggacccacacaggtccacccacgctgggggctgtaatcacggagggaagtggctgcccccttaacacacctttaataaacagtctacagaccca

SEQ ID NO: 312803 - DNA, 1065 bp, Homo sapiens
ctagctgggggcgaactgggggagaggcagcagccgcgatggacgtgttcctcatgatccggcgccacaagaccaccatcttcacggacgccaaggagtccagcacggtgttcgaactgaagcgcatcgtcgagggcatcctcaagcggcctcctgacgagcagcggctgtacaaggatgaccaactcttggatgatggcaagacactgggcgagtgtggcttcaccagtcaaacagcacggccacaggccccagccacagtggggctggccttccgggcagatgacacctttgaggccctgtgcatcgagccgttttccagcccgccagagctgcccgatgtgatgaagccccaggactcgggaagcagtgccaatgaacaagccgtgcagtgagacccccaagaggcccatttcccccaataaaagagatttgggagtctgcctggttgctgcctctttttcccgcccctccctgggatgggtcccactccctgtgggctccttttggggcttgtgcttggcagttcctgtgctgtcctgtctcccagatcctgagaccctggctgagaacttggcccagcctgctgcttaaaggcaccatggggacctgggttgccctcagacccaagccattgttagcagctagccagccacaccaaccacgccagggggaggaaagggaaggactgggagagacacaaagaccagagccagcctcagggacaagagattccagttttaggcctttctccttctaagtgccccccacccccatagcctgcatgtccactcccagacgatggccaagagcagaaacacaagctggagccagtgtcctggtttgacagcatgttcaacgagggaaccccaagacggacccacacaggtccacccacgctgggggctgtaatcacggagggaagtggctgcccccttaacacacctttaataaacagtctacagacccaaaaaaaaaaatcattgtctcgtaggccttagtggtgaagctctgcagccgattcctttatcgaggcgtaatccatgatcctcgctactgactctt

SEQ ID NO: 312804 - DNA, 1092 bp, Homo sapiens
  misc_feature (26)..(26): n is a, c, g, or t
gcggcggggggcggctgggccgcgcngggggcccgggcttcgtgctcacgccggcccgccgcccccaggacgtgttcctcatgatccggcgccacaagaccaccatcttcacggacgccaaggagtccagcacggtgttcgaactgaagcgcatcgtcgagggcatcctcaagcggcctcctgacgagcagcggctgtacaaggatgaccaactcttggatgatggcaagacactgggcgagtgtggcttcaccagtcaaacagcacggccacaggccccagccacagtggggctggccttccgggcagatgacacctttgaggccctgtgcatcgagccgttttccagcccgccagagctgcccgatgtgatgaagccccaggactcgggaagcagtgccaatgaacaagccgtgcagtgagacccccaagaggcccatttcccccaataaaagagatttgggagtctgcctggttgctgcctctttttcccgcccctccctgggatgggtcccactccctgtgggctccttttggggcttgtgcttggcagttcctgtgctgtcctgtctcccagatcctgagaccctggctgagaacttggcccagcctgctgcttaaaggcaccatggggacctgggttgccctcagacccaagccattgttagcagctagccagccacaccaaccacgccagggggaggaaagggaaggactgggagagacacaaagaccagagccagcctcagggacaagagattccagttttaggcctttctccttctaagtgccccccacccccatagcctgcatgtccactcccagacgatggccaagagcagaaacacaagctggagccagtgtcctggtttgacagcatgttcaacgagggaaccccaagacggacccacacaggtccacccacgctgggggctgtaatcacggagggaagtggctgcccccttaacacacctttaataaacagtctacagacccaaaaaaaaaaatcattgtctcgtaggccttagtggtgaagctctgcagccgattcctttatcgaggcgtaatccatgatcctcgctactgactctt

SEQ ID NO: 312805 - DNA, 612 bp, Homo sapiens
cgcgggctgccgggaacggggcggagcgcggctgcgccggcgcgtcgaggggagaggcagcagccgcgatggacgtgttcctcatgatccggcgccacaagaccaccatcttcacggacgccaaggagtccagcacggtgttcgaactgaagcgcatcgtcgagggcatcctcaagcggcctcctgacgagcagcggctgtacaaggatgaccaactcttggatgatggcaagacactgggcgagtgtggcttcaccagtcaaacagcacggccacaggccccagccacagtggggctggccttccgggcagatgacacctttgaggccctgtgcatcgagccgttttccagcccgccagagctgcccgatgtgatgaagccccaggactcgggaagcagtgccaatgaacaagccgtgcacctgcatgtccactcccagacgatggccaagagcagaaacacaagctggagccagtgtcctggtttgacagcatgttcaacgagggaaccccaagacggacccacacaggtccacccacgctgggggctgtaatcacggagggaagtggctgcccccttaacacacctttaataaacagtctacagaccca

SEQ ID NO: 312806 - DNA, 1164 bp, Homo sapiens
cgcgggctgccgggaacggggcggagcgcggctgcgccggcgcgtcgaggggagaggcagcagccgcgatggacgtgttcctcatgatccggcgccacaagaccaccatcttcacggacgccaaggagtccagcacggtgttcgaactgaagcgcatcgtcgagggcatcctcaagcggcctcctgacgagcagcggctgtacaagttgctggtcagaagtctttgggacttgccccacgtagggcctctcccaagatcctgcttctctcctcaggatgaccaactcttggatgatggcaagacactgggcgagtgtggcttcaccagtcaaacagcacggccacaggccccagccacagtggggctggccttccgggcagatgacacctttgaggccctgtgcatcgagccgttttccagcccgccagagctgcccgatgtgatgaagccccaggactcgggaagcagtgccaatgaacaagccgtgcagtgagacccccaagaggcccatttcccccaataaaagagatttgggagtctgcctggttgctgcctctttttcccgcccctccctgggatgggtcccactccctgtgggctccttttggggcttgtgcttggcagttcctgtgctgtcctgtctcccagatcctgagaccctggctgagaacttggcccagcctgctgcttaaaggcaccatggggacctgggttgccctcagacccaagccattgttagcagctagccagccacaccaaccacgccagggggaggaaagggaaggactgggagagacacaaagaccagagccagcctcagggacaagagattccagttttaggcctttctccttctaagtgccccccacccccatagcctgcatgtccactcccagacgatggccaagagcagaaacacaagctggagccagtgtcctggtttgacagcatgttcaacgagggaaccccaagacggacccacacaggtccacccacgctgggggctgtaatcacggagggaagtggctgcccccttaacacacctttaataaacagtctacagacccaaaaaaaaaaatcattgtctcgtaggccttagtggtgaagctctgcagccgattcctttatcgaggcgtaatccatgatcctcgctactgactctt

SEQ ID NO: 312807 - DNA, 540 bp, Homo sapiens
cgcgggctgccgggaacggggcggagcgcggctgcgccggcgcgtcgaggggagaggcagcagccgcgatggacgtgttcctcatgatccggcgccacaagaccaccatcttcacggacgccaaggagtccagcacggtgttcgaactgaagcgcatcgtcgagggcatcctcaagcggcctcctgacgagcagcggctgtacaagttgctggtcagaagtctttgggacttgccccacgtagggcctctcccaagatcctgcttctctcctcaggatgaccaactcttggatgatggcaagacactgggcgagtgtggcttcaccagtcaaacagcacggccacaggccccagccacagtggggctggccttccgggcagatgacacctttgaggccctgtgcatcgagccgttttccagcccgccagagctgcccgatgtgatgaagccccaggactcgggaagcagtgccaatgaacaagccgtgcagtgagacccccaagaggcccatttcccccaataaaagagatttgggagtc

SEQ ID NO: 312808 - DNA, 488 bp, Homo sapiens
  misc_feature (26)..(26): n is a, c, g, or t
gcggcggggggcggctgggccgcgcngggggcccgggcttcgtgctcacgccggcccgccgcccccaggacgtgttcctcatgatccggcgccacaagaccaccatcttcacggacgccaaggagtccagcacggtgttcgaactgaagcgcatcgtcgagggcatcctcaagcggcctcctgacgagcagcggctgtacaaggatgaccaactcttggatgatggcaagacactgggcgagtgtggcttcaccagtcaaacagcacggccacaggccccagccacagtggggctggccttccgggcagctctgctgcttcctccacagatgacacctttgaggccctgtgcatcgagccgttttccagcccgccagagctgcccgatgtgatgaagccccaggactcgggaagcagtgccaatgaacaagccgtgcagtgagacccccaagaggcccatttcccccaataaaagagatttgggagtc

SEQ ID NO: 312809 - DNA, 2399 bp, Homo sapiens
atttaacggaaactgtgggcggtgagaagttccttatgacacactaatcccaacctgctgaccggaccacgcctccagcggagggaacctctagagctccaggacattcaggtaccaggtagccccaaggaggagctgccgacctggcagggaacaaccaagactggggttaaatctcacagcctgcaagtggaagagaagaacttgaacccaggtccaacttttgcgccacagcaggctgcctcttggtcctgacaggaagtcacaacttgggtctgagtactgatccctggctattttttggctgtgttaccttggacaagtcacttattcctcctcccgtttcctcctatgtaaaatggaaataataatgttgaccctgggtctgagagagtggatttgaaagtacttagtgcatcacaaagcacagaacacacttccagtctcgtgattatgtacttatgtaactggtcatcacccatcttgagaatgaatgcattggggaaagggccatccactaggctgcgaagtttctgagggactccttcgggctggagaaggatggccacaggagggaggagagattgccttatcctgcagtgatcatgtcattgagaacagagccagattctttttttcctggcagggccaacttgttttaacatctaaggactgagctatttgtgtctgtgccctttgtccaagcagtgtttcccaaagtgtagcccaagaaccatctccctcagagccaccaggaagtgctttaaattgcaggttcctaggccacagcctgcacctgcagagtcagaatcatggaggttgggacccaggcacctgcgtttctaacaaatgcctcgggtgattctgatgcaattgaaagtttgagatccacagttctgagacaataacagaatggtttttctaacccctgcagccctgacttcctatcctagggaaggggccggctggagaggccaggacagagaaagcagatcccttctttttccaaggactctgtgtcttccataggcaacatgtcagaaggggtgggcacgttccgcatggtacctgaagaggaacaggagctccgtgcccaactggagcagctcacaaccaaggaccatggacctgtctttggcccgtgcagccagctgccccgccacaccttgcagaaggccaaggatgagctgaacgagagagaggagacccgggaggaggcagtgcgagagctgcaggagatggtgcaggcgcaggcggcctcgggggaggagctggcggtggccgtggcggagagggtgcaagagaaggacagcggcttcttcctgcgcttcatccgcgcacggaagttcaacgtgggccgtgcctatgagctgctcagaggctatgtgaatttccggctgcagtaccctgagctctttgacagcctgtccccagaggctgtccgctgcaccattgaagctggctaccctggtgtcctctctagtcgggacaagtatggccgagtggtcatgctcttcaacattgagaactggcaaagtcaagaaatcacctttgatgagatcttgcaggcatattgcttcatcctggagaagctgctggagaatgaggaaactcaaatcaatggcttctgcatcattgagaacttcaagggctttaccatgcagcaggctgctagtctccggacttcagatctcaggaagatggtggacatgctccaggattccttcccagcccggttcaaagccatccacttcatccaccagccatggtacttcaccacgacctacaatgtggtcaagcccttcttgaagagcaagctgcttgagagggtctttgtccacggggatgacctttctggtttctaccaggagatcgatgagaacatcctgccctctgacttcgggggcacgctgcccaagtatgatggcaaggccgttgctgagcagctctttggcccccaggcccaagctgagaacacagccttctgaaaacatctcctgccagctgaactgtagttagaatctctgggcctctcctcaactgtcctggacccaaggctaggaaagggctgcttgagatgactgtggtccccccttagactccctaagcccgagtgagctcaggtgtcaccctgttctcaagttgggggatggggaataaaggagggggaattcccttgaacaagaagaactggggatagttatatttccacctgcccttgaagctttaagacagtgatttttgtgtaaggttgtatttcaaagactcgaattcattttctcaatcatttcctttgtaacagagttttacgacttagagtctgtgaaaacaggcaaggagcccgggttaaaatatccccctattcgcccccaaaatgcaataaaagaagataaaagaga

SEQ ID NO: 312810 - DNA, 926 bp, Homo sapiens
  misc_feature (70)..(70): n is a, c, g, or t
  misc_feature (77)..(78): n is a, c, g, or t
  misc_feature (85)..(85): n is a, c, g, or t
atgatatatcaaataagtacaacttggcaagaagcgaaaggaggagcctaggcgtcaactgactctcttnttaaccnncgctacngatcttgcaggcatattgcttcatcctggagaagctgctggagaatgaggaaactcaaatcaatggcttctgcatcattgagaacttcaagggctttaccatgcagcaggctgctagtctccggacttcagatctcaggaagatggtggacatgctccaggattccttcccagcccggttcaaagccatccacttcatccaccagccatggtacttcaccacgacctacaatgtggtcaagcccttcttgaagagcaagctgcttgagagggtctttgtccacggggatgacctttctggtttctaccaggagatcgatgagaacatcctgccctctgacttcgggggcacgctgcccaagtatgatggcaaggccgttgctgagcagctctttggcccccaggcccaagctgagaacacagccttctgaaaacatctcctgccagctgaactgtagttagaatctctgggcctctcctcaactgtcctggacccaaggctaggaaagggctgcttgagatgactgtggtccccccttagactccctaagcccgagtgagctcaggtgtcaccctgttctcaagttgggggatggggaataaaggagggggaattcccttgaacaagaagaactggggatagttatatttccacctgcccttgaagctttaagacagtgatttttgtgtaaggttgtatttcaaagactcgaattcattttctcaatcatttcctttgtaacagagttttacgacttagagtctgtgaaaacaggcaaggagcccgggttaaaatatccccctattcgcccccaaaatgcaataaaagaagataaaagaga

SEQ ID NO: 312811 - DNA, 1738 bp, Homo sapiens
atttaacggaaactgtgggcggtgagaagttccttatgacacactaatcccaacctgctgaccggaccacgcctccagcggagggaacctctagagctccaggacattcaggtaccaggtagccccaaggaggagctgccgacctggcagggaacaaccaagactggggttaaatctcacagcctgcaagtggaagagaagaacttgaacccaggtccaacttttgcgccacagcaggctgcctcttggtcctgacaggaagtcacaacttggccctgacttcctatcctagggaaggggccggctggagaggccaggacagagaaagcagatcccttctttttccaaggactctgtgtcttccataggcaacatgtcagaaggggtgggcacgttccgcatggtacctgaagaggaacaggagctccgtgcccaactggagcagctcacaaccaaggaccatggacctgtctttggcccgtgcagccagctgccccgccacaccttgcagaaggccaaggatgagctgaacgagagagaggagacccgggaggaggcagtgcgagagctgcaggagatggtgcaggcgcaggcggcctcgggggaggagctggcggtggccgtggcggagagggtgcaagagaaggacagcggcttcttcctgcgcttcatccgcgcacggaagttcaacgtgggccgtgcctatgagctgctcagaggctatgtgaatttccggctgcagtaccctgagctctttgacagcctgtccccagaggctgtccgctgcaccattgaagctggctaccctggtgtcctctctagtcgggacaagtatggccgagtggtcatgctcttcaacattgagaactggcaaagtcaagaaatcacctttgatgagatcttgcaggcatattgcttcatcctggagaagctgctggagaatgaggaaactcaaatcaatggcttctgcatcattgagaacttcaagggctttaccatgcagcaggctgctagtctccggacttcagatctcaggaagatggtggacatgctccaggattccttcccagcccggttcaaagccatccacttcatccaccagccatggtacttcaccacgacctacaatgtggtcaagcccttcttgaagagcaagctgcttgagagggtctttgtccacggggatgacctttctggtttctaccaggagatcgatgagaacatcctgccctctgacttcgggggcacgctgcccaagtatgatggcaaggccgttgctgagcagctctttggcccccaggcccaagctgagaacacagccttctgaaaacatctcctgccagctgaactgtagttagaatctctgggcctctcctcaactgtcctggacccaaggctaggaaagggctgcttgagatgactgtggtccccccttagactccctaagcccgagtgagctcaggtgtcaccctgttctcaagttgggggatggggaataaaggagggggaattcccttgaacaagaagaactggggatagttatatttccacctgcccttgaagctttaagacagtgatttttgtgtaaggttgtatttcaaagactcgaattcattttctcaatcatttcctttgtaacagagttttacgacttagagtctgtgaaaacaggcaaggagcccgggttaaaatatccccctattcgcccccaaaatgcaataaaagaagataaaagaga

SEQ ID NO: 312812 - DNA, 1449 bp, Homo sapiens
  misc_feature (35)..(35): n is a, c, g, or t
  misc_feature (58)..(58): n is a, c, g, or t
  misc_feature (62)..(63): n is a, c, g, or t
atggaagacacagatccttggaaaaaagaaggganctgctttctctgtcctggcctcnccanncggccccttccctaggcaacatgtcaagaaggggtgggcacgttccgcatggtacctgaagaggaacaggagctccgtgcccaactggagcagctcacaaccaaggaccatggacctgtctttggcccgtgcagccagctgccccgccacaccttgcagaaggccaaggatgagctgaacgagagagaggagacccgggaggaggcagtgcgagagctgcaggagatggtgcaggcgcaggcggcctcgggggaggagctggcggtggccgtggcggagagggtgcaagagaaggacagcggcttcttcctgcgcttcatccgcgcacggaagttcaacgtgggccgtgcctatgagctgctcagaggctatgtgaatttccggctgcagtaccctgagctctttgacagcctgtccccagaggctgtccgctgcaccattgaagctggctaccctggtgtcctctctagtcgggacaagtatggccgagtggtcatgctcttcaacattgagaactggcaaagtcaagaaatcacctttgatgagatcttgcaggcatattgcttcatcctggagaagctgctggagaatgaggaaactcaaatcaatggcttctgcatcattgagaacttcaagggctttaccatgcagcaggctgctagtctccggacttcagatctcaggaagatggtggacatgctccaggattccttcccagcccggttcaaagccatccacttcatccaccagccatggtacttcaccacgacctacaatgtggtcaagcccttcttgaagagcaagctgcttgagagggtctttgtccacggggatgacctttctggtttctaccaggagatcgatgagaacatcctgccctctgacttcgggggcacgctgcccaagtatgatggcaaggccgttgctgagcagctctttggcccccaggcccaagctgagaacacagccttctgaaaacatctcctgccagctgaactgtagttagaatctctgggcctctcctcaactgtcctggacccaaggctaggaaagggctgcttgagatgactgtggtccccccttagactccctaagcccgagtgagctcaggtgtcaccctgttctcaagttgggggatggggaataaaggagggggaattcccttgaacaagaagaactggggatagttatatttccacctgcccttgaagctttaagacagtgatttttgtgtaaggttgtatttcaaagactcgaattcattttctcaatcatttcctttgtaacagagttttacgacttagagtctgtgaaaacaggcaaggagcccgggttaaaatatccccctattcgcccccaaaatgcaataaaagaagataaaagaga

SEQ ID NO: 312813 - DNA, 389 bp, Homo sapiens
  misc_feature (8)..(8): n is a, c, g, or t
gcggccgnctactactactaaattcgcggccgcgtcggaacaaatggggaaaactgaaaactaaaaattttaaatgtattaaatgccatccctgagcctaaatctagtatttgtagtttatttctaggtctgctagaacctgaaaacctgaatgaaaaaaggtgtgctgacactaatcaagtcctgtgaggtttaaattattgacctatccactctacctccattgtacaaaaaatattttacaacaagcctgggtaagattcaacagcatagtagttttgtatccaaggttacttccccacaaccactttaaacataagaaatgtggtggcaatataaagtttgtagcctttccaataaaggtttataaaacagttaaaaagtgtagt

SEQ ID NO: 312814 - DNA, 2071 bp, Homo sapiens
ctcgggcgctcgggggcgggctctgcacagcgacgtcacgggcaccgtgcgctgcggaaagttcagccccgcccccgcttccccctcgctgtctccctcggcctgtgccgccgccgacgccgcttgtgggcccgactccgctctgtctgcttcgccaccttctccccgagcactgcccggccggccgccatggctaacgtggctgacacgaagctgtacgacatcctgggcgtcccgcccggcgccagcgagaacgagctgaagaaggcatacagaaagttagccaaggaatatcatcctgataagaatccaaatgcaggagacaaatttaaagaaataagttttgcatatgaagtactatcaaatcctgagaagcgtgagttatatgacagatacggagagcaaggtcttcgggaaggcagcggcggaggtggtggcatggatgatattttctctcacatttttggtgggggattgttcggcttcatgggcaatcagagtagaagtcgaaatggcagaagaagaggagaggacatgatgcatccactcaaagtatctttagaagatctgtataatggcaagacaaccaaactacaacttagcaagaatgtgctctgtagtgcatgcagtggccaaggcggaaagtctggagctgtccaaaagtgtagtgcttgtcgaggtcgaggtgtgcgcatcatgatcagacagctggctccagggatggtacaacagatgcagtctgtgtgctctgattgtaatggagaaggagaggtaattaatgaaaaagaccgctgtaaaaaatgtgaagggaagaaggtgattaaagaagtcaagattcttgaagtccacgtagacaaaggcatgaaacatggacagagaattacattcactggggaagcagaccaggccccaggagtggaacccggagacattgttcttttgctacaggagaaagaacatgaggtatttcagagagatgggaatgatttgcacatgacatataaaataggacttgttgaagctctatgtggatttcagttcacatttaagcaccttgatggacgtcagattgtggtgaaatacccccctggcaaagtaattgaaccagggtgtgttcgtgtagttcgaggtgaagggatgccgcagtatcgtaatccctttgaaaaaggtgatctttacataaagtttgatgtgcagtttcctgaaaacaactggatcaacccagacaagctttctgaactagaagatcttctgccatctagaccggaagttcctaacataattggagaaacagaggaggtagagcttcaggaatttgatagcactcgaggctcaggaggtggtcagaggcgtgaagcctataatgatagctctgatgaagaaagcagcagccatcatggacctggagtgcagtgtgcccatcagtaaactctgcaaacaaattgcacaggtggattttctttccacatttgcctgatttgttctcagcaatccagctggagtgtcttatcaatccagatgaactgagggacatctgttggtctatgtataacttttaaaattggtatagtatctacagagtgtataatttaaactaaccacaaagctttacatcttcattttgactgttccatagcagaataaagcacttgaaaggaaacaagactccctttcacacatggattattataagtttcaatcctggtatctgtgcttgatttttatcagttttgtgtagatttttatgtttcatattttaaatttaaatcccacattgtaaagtttgtacaatttgtcctgaagctttgtgtttggctgcacctgcataagctgctacaaatagaataaagaatttcatagcctgtatctatcatttagatgcatggaaaaaaatgggctttgcacacaatgggtttggagctgactgggaacaatggaaaaaattacattagctgtggttgtaaagtttttttgtttttggttttgttttttttttcttttttcttttttttttttttaccatcttgtgaaaggtttctgaaactcgataataaaaagcggttggtgtaaa

SEQ ID NO: 312815 - DNA, 1661 bp, Homo sapiens
ctcgggcgctcgggggcgggctctgcacagcgacgtcacgggcaccgtgcgctgcggaaagttcagccccgcccccgcttccccctcgctgtctccctcggcctgtgccgccgccgacgccgcttgtgggcccgactccgctctgtctgcttcgccaccttctccccgagcactgcccggccggccgccatggctaacgtggctgacacgaagctgtacgacatcctgggcgtcccgcccggcgccagcgagaacgagctgaagaaggcatacagaaagttagccaaggaatatcatcctgataagaatccaaatgcaggagacaaatttaaagaaataagttttgcatatgaagtactatcaaatcctgagaagcgtgagttatatgacagatacggagagcaaggtcttcgggaaggcagcggcggaggtggtggcatggatgatattttctctcacatttttggtgggggattgttcggcttcatgggcaatcagagtagaagtcgaaatggcagaagaagaggagaggacatgatgcatccactcaaagtatctttagaagatctgtataatggcaagacaaccaaactacaacttagcaagaatgtgctctgtagtgcatgcagtggccaaggcggaaagtctggagctgtccaaaagtgtagtgcttgtcgaggtcgaggtgtgcgcatcatgatcagacagctggctccagggatggtacaacagatgcagtctgtgtgctctgattgtaatggagaaggagaggtaattaatgaaaaagaccgctgtaaaaaatgtgaagggaagaaggtgattaaagaagtcaagattcttgaagtccacgtagacaaaggcatgaaacatggacagagaattacattcactggggaagcagaccaggccccaggagtggaacccggagacattgttcttttgctacaggagaaagaacatgaggtatttcagagagatgggaatgatttgcacatgacatataaaataggacttgttgaagctctatgtggatttcagttcacatttaagcaccttgatggacgtcagattgtggtgaaatacccccctggcaaagtaattgaaccagggtgtgttcgtgtagttcgaggtgaagggatgccgcagtatcgtaatccctttgaaaaaggtgatctttacataaagtttgatgtgcagtttcctgaaaacaactggatcaacccagacaagctttctgaactagaagatcttctgccatctagaccggaagttcctaacataattggagaaacagaggaggtagagcttcaggaatttgatagcactcgaggctcaggaggtggtcagaggcgtgaagcctataatgatagctctgatgaagaaagcagcagccatcatggacctggagtgcagtgtgcccatcagtaaactctgcaaacaaattgcacaggtggattttctttccacatttgcctgatttgttctcagcaatccagctggagtgtcttatcaatccagatgaactgagggacatctgttggtctatgtataacttttaaaattggtatagtatctacagagtgtataatttaaactaaccacaaagctttacatcttcattttgactgttccatagcagaataaagcacttgaaaggaaac

SEQ ID NO: 312816 - DNA, 339 bp, Homo sapiens
  misc_feature (8)..(8): n is a, c, g, or t
gcggccgnctactactactaaattcgcggccgcgtcgatttttatgtttcatattttaaatttaaatcccacattgtaaagtttgtacaatttgtcctgaagctttgtgtttggctgcacctgcataagctgctacaaatagaataaagaatttcatagcctgtatctatcatttagatgcatggaaaaaaatgggctttgcacacaatgggtttggagctgactgggaacaatggaaaaaattacattagctgtggttgtaaagtttttttgtttttgtttttttaccatcttgtgaaaggtttctgaaactcgataataaaaagcggttggtgtaaa

SEQ ID NO: 312817 - DNA, 432 bp, Homo sapiens
ctcgggcgctcgggggcgggctctgcacagcgacgtcacgggcaccgtgcgctgcggaaagttcagccccgcccccgcttccccctcgctgtctccctcggcctgtgccgccgccgcagatgcagcaaataaaactcactcctgcgcaaacacgatgggagcccttccttcctccctccttgaacgagcgccgggggctggtatcccccgggaggcagcagctcgcccggtccttcgcgtcgaggtcaccaccccggaaaaacaggttggaccgaggtgctcagcgcatcccggccccgagagagaagctgtccgccccgcggccgtcggccccgggtctggtgctccgcggggaggaacggcggggaggtcgaggccgcccccacagagcgcctcgggcggatggggttgtttcctgggttccgcggccgc

SEQ ID NO: 312818 - DNA, 3106 bp, Homo sapiens
ctcgggcgctcgggggcgggctctgcacagcgacgtcacgggcaccgtgcgctgcggaaagttcagccccgcccccgcttccccctcgctgtctccctcggcctgtgccgccgccgacgccgcttgtgggcccgactccgctctgtctgcttcgccaccttctccccgagcactgcccggccggccgccatggctaacgtggctgacacgaagctgtacgacatcctgggcgtcccgcccggcgccagcgagaacgagctgaagaaggcatacagaaagttagccaaggaatatcatcctgataagaatccaaatgcaggagacaaatttaaagaaataagttttgcatatgaagtactatcaaatcctgagaagcgtgagttatatgacagatacggagagcaaggtcttcgggaaggcagcggcggaggtggtggcatggatgatattttctctcacatttttggtgggggattgttcggcttcatgggcaatcagagtagaagtcgaaatggcagaagaagaggagaggacatgatgcatccactcaaagtatctttagaagatctgtataatggcaagacaaccaaactacaacttagcaagaatgtgctctgtagtgcatgcagtggccaaggcggaaagtctggagctgtccaaaagtgtagtgcttgtcgaggtcgaggtgtgcgcatcatgatcagacagctggctccagggatggtacaacagatgcagtctgtgtgctctgattgtaatggagaaggagaggtaattaatgaaaaagaccgctgtaaaaaatgtgaagggaagaaggtgattaaagaagtcaagattcttgaagtccacgtagacaaaggcatgaaacatggacagagaattacattcactggggaagcagaccaggccccaggagtggaacccggagacattgttcttttgctacaggagaaagaacatgaggtatttcagagagatgggaatgatttgcacatgacatataaaataggacttgttgaagctctatgtggatttcagttcacatttaagcaccttgatggacgtcagattgtggtgaaatacccccctggcaaagtaattgaaccagggtgtgttcgtgtagttcgaggtgaagggatgccgcagtatcgtaatccctttgaaaaaggtgatctttacataaagtttgatgtgcagtttcctgaaaacaactggatcaacccagacaagctttctgaactagaagatcttctgccatctagaccggaagttcctaacataattggagaaacagaggaggtagagcttcaggaatttgatagcactcgaggctcaggaggtggtcagaggcgtgaagcctataatgatagctctgatgaagaaagcagcagccatcatggacctggagtgcagtgtgcccatcagtaaactctgcaaacaaattgcacaggtggattttctttccacatttgcctgatttgttctcagcaatccagctggagtgtcttatcaatccagatgaactgagggacatctgttggtctatgtataacttttaaaattggtatagtatctacagagtgtataatttaaactaaccacaaagctttacatcttcattttgactgttccatagcagaataaagcacttgaaaggaaacaagactccctttcacacatggattattataagtttcaatcctggtatctgtgcttgatttttatcagttttgtgtagatttttatgtttcatattttaaatttaaatcccacattgtaaagtttgtacaatttgtcctgaagctttgtgtttggctgcacctgcataagctgctacaaatagaataaagaatttcatagcctgtatctatcatttagatgcatggaaaaaaatgggctttgcacacaatgggtttggagctgactgggaacaatggaaaaaattacattagctgtggttgtaaagtttttttgtttttggttttgttttttttttcttttttcttttttttttttttaccatcttgtgaaaggtttctgaaactcgataataaaaagcggttggtgtaaattattcttttgtgtcacatttttagaaggaaaaacataaaagaatgtatccttagtactggttcttaaacagcccataaaaacccattggcctgaagcttatatctcaggcctatgcccatcttatagtcttggaagacaaaaggctggtagagacagtcttcagtggcttcagtgatgctctgtagaggccagggtgtcttgagtgctgtaactcccaagcactgggctagcctgacttctgtatctccctaccaccacccccttaaaaaaataaggtaacagcaaatctatagtaaaaccatgtctgcatagaacgtgttcaaatcctctgttttcattaaatgtaaaagatgctgtctccattaagttgaatatttggaattggagaagccattgattattattttgagtttctgtaatgttttatagaaaagtaagatgcttattcagaatttaagaatgaaggcaactgaaatatgcattgttgtagttatttatatttcaaactaaaaataagcaaaaaaaaaaggctggtttgagaaaaatcaggtaaaattgatgaaacggatgttgtgtttctctttccatcatctggtttttaccatttcactcagtaggtatttttagaacacacttatttgaggaaagagacatcagatgcacaattttacatttataaaggaacaaatggggaaaactgaaaactaaaaattttaaatgtattaaatgccatccctgagcctaaatctagtatttgtagtttatttctaggtctgctagaacctgaaaacctgaatgaaaaaaggtgtgctgacactaatcaagtcctgtgaggtttaaattattgacctatccactctacctccattgtacaaaaaatattttacaacaagcctgggtaagattcaacagcatagtagttttgtatccaaggttacttccccacaaccactttaaacataagaaatgtggtggcaatataaagtttgtagcctttccaataaaggtttataaaacagttaaaaagtgtagt

SEQ ID NO: 312819 - DNA, 2087 bp, Homo sapiens
  misc_feature (2069)..(2069): n is a, c, g, or t
ctcgggcgctcgggggcgggctctgcacagcgacgtcacgggcaccgtgcgctgcggaaagttcagccccgcccccgcttccccctcgctgtctccctcggcctgtgccgccgccgacgccgcttgtgggcccgactccgctctgtctgcttcgccaccttctccccgagcactgcccggccggccgccatggctaacgtggctgacacgaagctgtacgacatcctgggcgtcccgcccggcgccagcgagaacgagctgaagaaggcatacagaaagttagccaaggaatatcatcctgataagaatccaaatgcaggagacaaatttaaagaaataagttttgcatatgaagtactatcaaatcctgagaagcgtgagttatatgacagatacggagagcaaggtcttcgggaaggcagcggcggaggtggtggcatggatgatattttctctcacatttttggtgggggattgttcggcttcatgggcaatcagagtagaagtcgaaatggcagaagaagaggagaggacatgatgcatccactcaaagtatctttagaagatctgtataatggcaagacaaccaaactacaacttagcaagaatgtgctctgtagtgcatgcagtggccaaggcggaaagtctggagctgtccaaaagtgtagtgcttgtcgaggtcgaggtgtgcgcatcatgatcagacagctggctccagggatggtacaacagatgcagtctgtgtgctctgattgtaatggagaaggagaggtaattaatgaaaaagaccgctgtaaaaaatgtgaagggaagaaggtgattaaagaagtcaagattcttgaagtccacgtagacaaaggcatgaaacatggacagagaattacattcactggggaagcagaccaggccccaggagtggaacccggagacattgttcttttgctacaggagaaagaacatgaggtatttcagagagatgggaatgatttgcacatgacatataaaataggacttgttgaagctctatgtggatttcagttcacatttaagcaccttgatggacgtcagattgtggtgaaatacccccctggcaaagtaattgaaccagggtgtgttcgtgtagttcgaggtgaagggatgccgcagtatcgtaatccctttgaaaaaggtgatctttacataaagtttgatgtgcagtttcctgaaaacaactggatcaacccagacaagctttctgaactagaagatcttctgccatctagaccggaagttcctaacataattggagaaacagaggaggtagagcttcaggaatttgatagcactcgaggctcaggaggtggtcagaggcgtgaagcctataatgatagctctgatgaagaaagcagcagccatcatggacctggagtgcagtgtgcccatcagtaaactctgcaaacaaattgcacaggtggattttctttccacatttgcctgatttgttctcagcaatccagctggagtgtcttatcaatccagatgaactgagggacatctgttggtctatgtataacttttaaaattggtatagtatctacagagtgtataatttaaactaaccacaaagctttacatcttcattttgactgttccatagcagaataaagcacttgaaaggaaacaagactccctttcacacatggattattataagtttcaatcctggtatctgtgcttgatttttatcagttttgtgtagatttttatgtttcatattttaaatttaaatcccacattgtaaagtttgtacaatttgtcctgaagctttgtgtttggctgcacctgcataagctgctacaaatagaataaagaatttcatagcctgtatctatcatttagatgcatggaaaaaaatgggctttgcacacaatgggtttggagctgactgggaacaatggaaaaaattacattagctgtggttgtaaagtttttttgtttttggttttgttttttttttcttttttcttttttttttttttaccatcttgtgaaagggaagtcccggggaaccgagctcgaatccgaaatcngggccatagctgatcccg

SEQ ID NO: 312820 - DNA, 4149 bp, Homo sapiens
ctctgcgtccctcgcccattgacccggaggtagctgggtctgtgtttggatgcattgttctttgggcaggtaatgctaatgtcctgtacctgcttaggaataagccgtggtcccagccaaacgcctgagtgtacagtaaacataaatagaaggccttattattgctatttgcaatgctgcgatatctttcatctcaggatttcaaagcacacgaggcatttaagccccacagcatcctcaccaggctaagagcatccagatttgtaagccgagaaaaatgagaatgctccttaggcagtgagaagagtacagtggacttcctgttaccttaccggaaatgctagtctgtattatataattcacgagcctccgtgaatgaagatttaagtgctttaggacccaaacacctcgttgagagtgtgtgcaacttctctaccaccgaagttgccaccacgaccccagttaaccaccacgtgcaaataaaacaccaaaagacgctaactaggaccacctttactttttcatgatgttacagttagaaggaaggcgtgagccatcgggagcaggaattgtgactttagcttgatttatagtaatgttttgcagtccgcaaagcttaacagtcatttatctcgaatttattagggtcgtcttggtctggttacttggccatcaaagacacttgacaatagggaaaatatggataatgtttgaacgttttgtttttccctgtggcattgcttcattgttttatctggttttcacgtcactgtaacctgttttcaagtatagctgctgtctacttggttatattacattagtaaacagtatcgcgagaaagtgccgaagaatccctacgaatagaaaatatttttgaaaggttataactctagaacattacttctcagaaaagtggatattaagttattacaaaacttttaactggtgtttagttataaccttttttgtttttatccattttcaaaggcatacagaaagttagccaaggaatatcatcctgataagaatccaaatgcaggagacaaagtaagttatttgcaccttttttattccgggggttttagctttaacttaaattgccctccttgaaaaagaggaatgttgcaggaaaaaaatccaactatgcccacacagccacattttcataatgtcaagagtattttagttttagaataagagtactaccattctgaggagcggtgggtggtaaatagaaccagaatcaagtcaaaggtaacttgtccctttttttttttttttagaattaaatggattctggattcctgtagcttctccccactcttctacttgaaaatgcaattatttttatttttaccttttctttatagtttaaagaaataagttttgcatatgaagtactatcaaatcctgagaagcgtgagttatatgacagatacggagagcaaggtcttcgggaaggcagcggcggaggtggtggcatggatgatattttctctcacatttttggtgggggattgttcggcttcatgggcaatcagagtagaagtcgaaatggcagaagaagaggagaggacatgatgcatccactcaaagtatctttagaagatctgtataatggcaagacaaccaaactacaacttagcaagaatgtgctctgtagtgcatgcagtggccaaggcggaaagtctggagctgtccaaaagtgtagtgcttgtcgaggtcgaggtgtgcgcatcatgatcagacagctggctccagggatggtacaacagatgcagtctgtgtgctctgattgtaatggagaaggagaggtaattaatgaaaaagaccgctgtaaaaaatgtgaagggaagaaggtgattaaagaagtcaagattcttgaagtccacgtagacaaaggcatgaaacatggacagagaattacattcactggggaagcagaccaggccccaggagtggaacccggagacattgttcttttgctacaggagaaagaacatgaggtatttcagagagatgggaatgatttgcacatgacatataaaataggacttgttgaagctctatgtggatttcagttcacatttaagcaccttgatggacgtcagattgtggtgaaatacccccctggcaaagtaattgaaccagggtgtgttcgtgtagttcgaggtgaagggatgccgcagtatcgtaatccctttgaaaaaggtgatctttacataaagtttgatgtgcagtttcctgaaaacaactggatcaacccagacaagctttctgaactagaagatcttctgccatctagaccggaagttcctaacataattggagaaacagaggaggtagagcttcaggaatttgatagcactcgaggctcaggaggtggtcagaggcgtgaagcctataatgatagctctgatgaagaaagcagcagccatcatggacctggagtgcagtgtgcccatcagtaaactctgcaaacaaattgcacaggtggattttctttccacatttgcctgatttgttctcagcaatccagctggagtgtcttatcaatccagatgaactgagggacatctgttggtctatgtataacttttaaaattggtatagtatctacagagtgtataatttaaactaaccacaaagctttacatcttcattttgactgttccatagcagaataaagcacttgaaaggaaacaagactccctttcacacatggattattataagtttcaatcctggtatctgtgcttgatttttatcagttttgtgtagatttttatgtttcatattttaaatttaaatcccacattgtaaagtttgtacaatttgtcctgaagctttgtgtttggctgcacctgcataagctgctacaaatagaataaagaatttcatagcctgtatctatcatttagatgcatggaaaaaaatgggctttgcacacaatgggtttggagctgactgggaacaatggaaaaaattacattagctgtggttgtaaagtttttttgtttttggttttgttttttttttcttttttcttttttttttttttaccatcttgtgaaaggtttctgaaactcgataataaaaagcggttggtgtaaattattcttttgtgtcacatttttagaaggaaaaacataaaagaatgtatccttagtactggttcttaaacagcccataaaaacccattggcctgaagcttatatctcaggcctatgcccatcttatagtcttggaagacaaaaggctggtagagacagtcttcagtggcttcagtgatgctctgtagaggccagggtgtcttgagtgctgtaactcccaagcactgggctagcctgacttctgtatctccctaccaccacccccttaaaaaaataaggtaacagcaaatctatagtaaaaccatgtctgcatagaacgtgttcaaatcctctgttttcattaaatgtaaaagatgctgtctccattaagttgaatatttggaattggagaagccattgattattattttgagtttctgtaatgttttatagaaaagtaagatgcttattcagaatttaagaatgaaggcaactgaaatatgcattgttgtagttatttatatttcaaactaaaaataagcaaaaaaaaaaggctggtttgagaaaaatcaggtaaaattgatgaaacggatgttgtgtttctctttccatcatctggtttttaccatttcactcagtaggtatttttagaacacacttatttgaggaaagagacatcagatgcacaattttacatttataaaggaacaaatggggaaaactgaaaactaaaaattttaaatgtattaaatgccatccctgagcctaaatctagtatttgtagtttatttctaggtctgctagaacctgaaaacctgaatgaaaaaaggtgtgctgacactaatcaagtcctgtgaggtttaaattattgacctatccactctacctccattgtacaaaaaatattttacaacaagcctgggtaagattcaacagcatagtagttttgtatccaaggttacttccccacaaccactttaaacataagaaatgtggtggcaatataaagtttgtagcctttccaataaaggtttataaaacagttaaaaagtgtagt

SEQ ID NO: 312821 - DNA, 1910 bp, Homo sapiens
ctcgggcgctcgggggcgggctctgcacagcgacgtcacgggcaccgtgcgctgcggaaagttcagccccgcccccgcttccccctcgctgtctccctcggcctgtgccgccgccgacgccgcttgtgggcccgactccgctctgtctgcttcgccaccttctccccgagcactgcccggccggccgccatggctaacgtggctgacacgaagctgtacgacatcctgggcgtcccgcccggcgccagcgagaacgagctgaagaaggcatacagaaagttagccaaggaatatcatcctgataagaatccaaatgcaggagacaaatttaaagaaataagttttgcatatgaagtactatcaaatcctgagaagcgtgagttatatgacagatacggagagcaaggtcttcgggaaggcagcggcggaggtggtggcatggatgatattttctctcacatttttggtgggggattgttcggcttcatgggcaatcagagtagaagtcgaaatggcagaagaagaggagaggacatgatgcatccactcaaagtatctttagaagatctgtataatggcaagacaaccaaactacaacttagcaagaatgtgctctgtagtgcatgcagtggccaaggcggaaagtctggagctgtccaaaagtgtagtgcttgtcgaggtcgaggtgtgcgcatcatgatcagacagctggctccagggatggtacaacagatgcagtctgtgtgctctgattgtaatggagaaggagaggtaattaatgaaaaagaccgctgtaaaaaatgtgaagggaagaaggtgattaaagaagtcaagattcttgaagtccacgtagacaaaggcatgaaacatggacagagaattacattcactggggaagcagaccaggccccaggagtggaacccggagacattgttcttttgctacaggagaaagaacatgaggtatttcagagagatgggaatgatttgcacatgacatataaaataggacttgttgaagctctatgtggatttcagttcacatttaagcaccttgatggacgtcagattgtggtgaaatacccccctggcaaagtaattgaaccagggtgtgttcgtgtagttcgaggtgaagggatgccgcagtatcgtaatccctttgaaaaaggtgatctttacataaagtttgatgtgcagtttcctgaaaacaactggatcaacccagacaagctttctgaactagaagatcttctgccatctagaccggaagttcctaacataattggagaaacagaggaggtagagcttcaggaatttgatagcactcgaggctcaggaggtggtcagaggcgtgaagcctataatgatagctctgatgaagaaagcagcagccatcatggacctggagtgcagtgtgcccatcagtaaactctgcaaacaaattgcacaggtggattttctttccacatttgcctgatttgttctcagcaatccagctggagtgtcttatcaatccagatgaactgagggacatctgttggtctatgtataacttttaaaattggtatagtatctacagagtgtataatttaaactaaccacaaagctttacatcttcattttgactgttccatagcagaataaagcacttgaaaggaaacaagactccctttcacacatggattattataagtttcaatcctggtatctgtgcttgatttttatcagttttgtgtagatttttatgtttcatattttaaatttaaatcccacattgtaaagtttgtacaatttgtcctgaagctttgtgtttggctgcacctgcataagctgctacagatttaaagaaataagttttgcatatgaagtactatcaatcctgagaagcgtgagttatatgccactacagc

SEQ ID NO: 312822 - DNA, 3131 bp, Homo sapiens
acacaaaacacaaatagtcaagtcgagccgatgttaatcggcacagggcgcgcgacgccgcttgtgggcccgactccgctctgtctgcttcgccaccttctccccgagcactgcccggccggccgccatggctaacgtggctgacacgaagctgtacgacatcctgggcgtcccgcccggcgccagcgagaacgagctgaagaaggcatacagaaagttagccaaggaatatcatcctgataagaatccaaatgcaggagacaaaaattaaatggattctggattcctgtagcttctccccactcttctacttgaaaatgcaattatttttatttttaccttttctttatagtttaaagaaataagttttgcatatgaagtactatcaaatcctgagaagcgtgagttatatgacagatacggagagcaaggtcttcgggaaggcagcggcggaggtggtggcatggatgatattttctctcacatttttggtgggggattgttcggcttcatgggcaatcagagtagaagtcgaaatggcagaagaagaggagaggacatgatgcatccactcaaagtatctttagaagatctgtataatggcaagacaaccaaactacaacttagcaagaatgtgctctgtagtgcatgcagtggccaaggcggaaagtctggagctgtccaaaagtgtagtgcttgtcgaggtcgaggtgtgcgcatcatgatcagacagctggctccagggatggtacaacagatgcagtctgtgtgctctgattgtaatggagaaggagaggtaattaatgaaaaagaccgctgtaaaaaatgtgaagggaagaaggtgattaaagaagtcaagattcttgaagtccacgtagacaaaggcatgaaacatggacagagaattacattcactggggaagcagaccaggccccaggagtggaacccggagacattgttcttttgctacaggagaaagaacatgaggtatttcagagagatgggaatgatttgcacatgacatataaaataggacttgttgaagctctatgtggatttcagttcacatttaagcaccttgatggacgtcagattgtggtgaaatacccccctggcaaagtaattgaaccagggtgtgttcgtgtagttcgaggtgaagggatgccgcagtatcgtaatccctttgaaaaaggtgatctttacataaagtttgatgtgcagtttcctgaaaacaactggatcaacccagacaagctttctgaactagaagatcttctgccatctagaccggaagttcctaacataattggagaaacagaggaggtagagcttcaggaatttgatagcactcgaggctcaggaggtggtcagaggcgtgaagcctataatgatagctctgatgaagaaagcagcagccatcatggacctggagtgcagtgtgcccatcagtaaactctgcaaacaaattgcacaggtggattttctttccacatttgcctgatttgttctcagcaatccagctggagtgtcttatcaatccagatgaactgagggacatctgttggtctatgtataacttttaaaattggtatagtatctacagagtgtataatttaaactaaccacaaagctttacatcttcattttgactgttccatagcagaataaagcacttgaaaggaaacaagactccctttcacacatggattattataagtttcaatcctggtatctgtgcttgatttttatcagttttgtgtagatttttatgtttcatattttaaatttaaatcccacattgtaaagtttgtacaatttgtcctgaagctttgtgtttggctgcacctgcataagctgctacaaatagaataaagaatttcatagcctgtatctatcatttagatgcatggaaaaaaatgggctttgcacacaatgggtttggagctgactgggaacaatggaaaaaattacattagctgtggttgtaaagtttttttgtttttggttttgttttttttttcttttttcttttttttttttttaccatcttgtgaaaggtttctgaaactcgataataaaaagcggttggtgtaaattattcttttgtgtcacatttttagaaggaaaaacataaaagaatgtatccttagtactggttcttaaacagcccataaaaacccattggcctgaagcttatatctcaggcctatgcccatcttatagtcttggaagacaaaaggctggtagagacagtcttcagtggcttcagtgatgctctgtagaggccagggtgtcttgagtgctgtaactcccaagcactgggctagcctgacttctgtatctccctaccaccacccccttaaaaaaataaggtaacagcaaatctatagtaaaaccatgtctgcatagaacgtgttcaaatcctctgttttcattaaatgtaaaagatgctgtctccattaagttgaatatttggaattggagaagccattgattattattttgagtttctgtaatgttttatagaaaagtaagatgcttattcagaatttaagaatgaaggcaactgaaatatgcattgttgtagttatttatatttcaaactaaaaataagcaaaaaaaaaaggctggtttgagaaaaatcaggtaaaattgatgaaacggatgttgtgtttctctttccatcatctggtttttaccatttcactcagtaggtatttttagaacacacttatttgaggaaagagacatcagatgcacaattttacatttataaaggaacaaatggggaaaactgaaaactaaaaattttaaatgtattaaatgccatccctgagcctaaatctagtatttgtagtttatttctaggtctgctagaacctgaaaacctgaatgaaaaaaggtgtgctgacactaatcaagtcctgtgaggtttaaattattgacctatccactctacctccattgtacaaaaaatattttacaacaagcctgggtaagattcaacagcatagtagttttgtatccaaggttacttccccacaaccactttaaacataagaaatgtggtggcaatataaagtttgtagcctttccaataaaggtttataaaacagttaaaaagtgtagt

SEQ ID NO: 312823 - DNA, 1723 bp, Homo sapiens
ctcgggcgctcgggggcgggctctgcacagcgacgtcacgggcaccgtgcgctgcggaaagttcagccccgcccccgcttccccctcgctgtctccctcggcctgtgccgccgccgacgccgcttgtgggcccgactccgctctgtctgcttcgccaccttctccccgagcactgcccggccggccgccatggctaacgtggctgacacgaagctgtacgacatcctgggcgtcccgcccggcgccagcgagaacgagctgaagaaggcatacagaaagttagccaaggaatatcatcctgataagaatccaaatgcaggagacaaatttaaagaaataagttttgcatatgaagtactatcaaatcctgagaagcgtgagttatatgacagatacggagagcaaggtcttcgggaaggcagcggcggaggtggtggcatggatgatattttctctcacatttttggtgggggattgttcggcttcatgggcaatcagagtagaagtcgaaatggcagaagaagaggagaggacatgatgcatccactcaaagtatctttagaagatctgtataatggcaagacaaccaaactacaacttagcaagaatgtgctctgtagtgcatgcagtggccaaggcggaaagtctggagctgtccaaaagtgtagtgcttgtcgaggtcgaggtgtgcgcatcatgatcagacagctggctccagggatggtacaacagatgcagtctgtgtgctctgattgtaatggagaaggagaggtaattaatgaaaaagaccgctgtaaaaaatgtgaagggaagaaggtgattaaagaagtcaagattcttgaagtccacgtagacaaaggcatgaaacatggacagagaattacattcactggggaagcagaccaggccccaggagtggaacccggagacattgttcttttgctacaggagaaagaacatgaggtatttcagagagatgggaatgatttgcacatgacatataaaataggacttgttgaagctctatgtggatttcagttcacatttaagcaccttgatggacgtcagattgtggtgaaatacccccctggcaaagtaattgaaccagggtgtgttcgtgtagttcgaggtgaagggatgccgcagtatcgtaatccctttgaaaaaggtgatctttacataaagtttgatgtgcagtttcctgaaaacaactggatcaacccagacaagctttctgaactagaagatcttctgccatctagaccggaagttcctaacataattggagaaacagaggaggtagagcttcaggaatttgatagcactcgaggctcaggaggtggtcagaggcgtgaagcctataatgatagctctgatgaagaaagcagcagccatcatggacctggagtgcagtgtgcccatcagtaaactctgcaaacaaattgcacagtttatttctaggtctgctagaacctgaaaacctgaatgaaaaaaggtgtgctgacactaatcaagtcctgtgaggtttaaattattgacctatccactctacctccattgtacaaaaaatattttacaacaagcctgggtaagattcaacagcatagtagttttgtatccaaggttacttccccacaaccactttaaacataagaaatgtggtggcaatataaagtttgtagcctttccaataaaggtttataaaacagttaaaaagtgtagt

SEQ ID NO: 312824 - DNA, 1396 bp, Homo sapiens
ctcgggcgctcgggggcgggctctgcacagcgacgtcacgggcaccgtgcgctgcggaaagttcagccccgcccccgcttccccctcgctgtctccctcggcctgtgccgccgccgacgccgcttgtgggcccgactccgctctgtctgcttcgccaccttctccccgagcactgcccggccggccgccatggctaacgtggctgacacgaagctgtacgacatcctgggcgtcccgcccggcgccagcgagaacgagctgaagaaggcatacagaaagttagccaaggaatatcatcctgataagaatccaaatgcaggagacaaatttaaagaaataagttttgcatatgaagtactatcaaatcctgagaagcgtgagttatatgacagatacggagagcaaggtcttcgggaaggcagcggcggaggtggtggcatggatgatattttctctcacatttttggtgggggattgttcggcttcatgggcaatcagagtagaagtcgaaatggcagaagaagaggagaggacatgatgcatccactcaaagtatctttagaagatctgtataatggcaagacaaccaaactacaacttagcaagaatgtgctctgtagtgcatgcagtggccaaggcggaaagtctggagctgtccaaaagtgtagtgcttgtcgaggtcgaggtgtgcgcatcatgatcagacagctggctccagggatggtacaacagatgcagtctgtgtgctctgattgtaatggagaaggagaggtaattaatgaaaaagaccgctgtaaaaaatgtgaagggaagaaggtgattaaagaagtcaagattcttgaagtccacgtagacaaaggcatgaaacatggacagagaattacattcactggggaagcagaccaggccccaggagtggaacccggagacattgttcttttgctacaggagaaagaacatgaggtatttcagagagatgggaatgatttgcacatgacatataaaataggacttgttgaagctctatgtggatttcagttcacatttaagcaccttgatggacgtcagattgtggtgaaatacccccctggcaaagtaattgaaccagggtgtgttcgtgtagttcgaggtgaagggatgccgcagtatcgtaatccctttgaaaaaggtgatctttacataaagtttgatgtgcagtttcctgaaaacaactggatcaacccagacaagctttctgaattagaagatttctgcatctaggcggaaggtcctactattgggcaacaggggggtaagtccggattgtgcctcgggccggggggcaagggagcaaagatgcgagaaaaaggaggcccaggcggggggcctgacgccaagtcgggtttcctggtgtccc

SEQ ID NO: 312825 - DNA, 1148 bp, Homo sapiens
ctcgggcgctcgggggcgggctctgcacagcgacgtcacgggcaccgtgcgctgcggaaagttcagccccgcccccgcttccccctcgctgtctccctcggcctgtgccgccgccgacgccgcttgtgggcccgactccgctctgtctgcttcgccaccttctccccgagcactgcccggccggccgccatggctaacgtggctgacacgaagctgtacgacatcctgggcgtcccgcccggcgccagcgagaacgagctgaagaaggcatacagaaagttagccaaggaatatcatcctgataagaatccaaatgcaggagacaaatttaaagaaataagttttgcatatgaagtactatcaaatcctgagaagcgtgagttatatgacagatacggagagcaaggtcttcgggaaggcagcggcggaggtggtggcatggatgatattttctctcacatttttggtgggggattgttcggcttcatgggcaatcagagtagaagtcgaaatggcagaagaagaggagaggacatgatgcatccactcaaagtatctttagaagatctgtataatggcaagacaaccaaactacaacttagcaagaatgtgctctgtagtgcatgcagtggccaaggcggaaagtctggagctgtccaaaagtgtagtgcttgtcgaggtcgaggtgtgcgcatcatgatcagacagctggctccagggatggtacaacagatgcagtctgtgtgctctgattgtaatggagaaggtatgtgtgccagtacttctctgcttttatgttggaatggattgggaatgcagatattggagaggtttacaattttttatttcaaagggtatttgtatacatcttattaaagaaaaaggaggccgggtgcgttagctcattcctataattccagcactttgggagacagaggtggattgctcgagcccaggagtttgaggccagcttgggcaatatagggagacctcattactataggaaaaaaaagtgtggaaaaatatgtaatgaggggctcaggtaattctcctgccccagcctcccaaagggctgggattacaggtgttagccaccactcttggcctgcttttattttattataattgctaactcccactatcaagaa

SEQ ID NO: 312826 - DNA, 896 bp, Homo sapiens
caaatgaaccaactgattctcacaaccgaagggagaattgacacctcccattgagggtgtcttgagtgctgtaactcccaagcactgggctagcctgacttctgtatctccctaccaccacccccttaaaaaaataaggtaacagcaaatctatagtaaaaccatgtctgcatagaacgtgttcaaatcctctgttttcattaaatgtaaaagatgctgtctccattaagttgaatatttggaattggagaagccattgattattattttgagtttctgtaatgttttatagaaaagtaagatgcttattcagaatttaagaatgaaggcaactgaaatatgcattgttgtagttatttatatttcaaactaaaaataagcaaaaaaaaaaggctggtttgagaaaaatcaggtaaaattgatgaaacggatgttgtgtttctctttccatcatctggtttttaccatttcactcagtaggtatttttagaacacacttatttgaggaaagagacatcagatgcacaattttacatttataaaggaacaaatggggaaaactgaaaactaaaaattttaaatgtattaaatgccatccctgagcctaaatctagtatttgtagtttatttctaggtctgctagaacctgaaaacctgaatgaaaaaaggtgtgctgacactaatcaagtcctgtgaggtttaaattattgacctatccactctacctccattgtacaaaaaatattttacaacaagcctgggtaagattcaacagcatagtagttttgtatccaaggttacttccccacaaccactttaaacataagaaatgtggtggcaatataaagtttgtagcctttccaataaaggtttataaaacagttaaaaagtgtagt

SEQ ID NO: 312827 - DNA, 573 bp, Homo sapiens
ctcgggcgctcgggggcgggctctgcacagcgacgtcacgggcaccgtgcgctgcggaaagttcagccccgcccccgcttccccctcgctgtctccctcggcctgtgccgccgccgacgccgcttgtgggcccgactccgctctgtctgcttcgccaccttctccccgagcactgcccggccggccgccatggctaacgtggctgacacgaagctgtacgacatcctgggcgtcccgcccggcgccagcgagaacgagctgaagaaggcatacagaaagttagccaaggaatatcatcctgataagaatccaaatgcaggagacaaatttaaagaaataagttttgcatatgaagtactatcaaatcctgagaagcgtgagttatatgacagatacggagagcaaggtcttcgggaaggcagcggcggaggtggtggcatggatgatattttctctcacatttttggtgggggattgttcggcttcatgggcaatcagagtagaagtcgatggcacacagagcactcgcgcatgccgcactcactcgcccccaccagccgtccgcccacgccc

SEQ ID NO: 312828 - DNA, 482 bp, Homo sapiens
cagggatgtcttcttcagccaggccgcgctactgggctgcccgcgagccggcgcccggccgtgactggcccgggctgggagtcggcggcggcggcgggaccggcctcgccgcgagccgcgcactccggcctcggctgaccttggggccgccggccccgcccgcccgcagatgcagcaaataaaactcactcctgcgcaaacacgatgggagcccttccttcctccctccttgaacgagcgccgggggctggtatcccccgggaggcagcagctcgcccggtccttcgcgtcgaggtcaccaccccggaaaaacaggttggaccgaggtgctcagcgcatcccggccccgagagagaagctgtccgccccgcggccgtcggccccgggtctggtgctccgcggggaggaacggcggggaggtcgaggccgcccccacagagcgcctcgggcggatggggttgtttcctgggttccgcggccgc

SEQ ID NO: 312829 - DNA, 2009 bp, Homo sapiens
acacaaaacacaaatagtcaagtcgagccgatgttaatcggcacagggcgcgcgacgccgcttgtgggcccgactccgctctgtctgcttcgccaccttctccccgagcactgcccggccggccgccatggctaacgtggctgacacgaagctgtacgacatcctgggcgtcccgcccggcgccagcgagaacgagctgaagaaggcatacagaaagttagccaaggaatatcatcctgataagaatccaaatgcaggagacaaatttaaagaaataagttttgcatatgaagtactatcaaatcctgagaagcgtgagttatatgacagatacggagagcaaggtcttcgggaaggcagcggcggaggtggtggcatggatgatattttctctcacatttttggtgggggattgttcggcttcatgggcaatcagagtagaagtcgaaatggcagaagaagaggagaggacatgatgcatccactcaaagtatctttagaagatctgtataatggcaagacaaccaaactacaacttagcaagaatgtgctctgtagtgcatgcagtggccaaggcggaaagtctggagctgtccaaaagtgtagtgcttgtcgaggtcgaggtgtgcgcatcatgatcagacagctggctccagggatggtacaacagatgcagtctgtgtgctctgattgtaatggagaaggagaggtaattaatgaaaaagaccgctgtaaaaaatgtgaagggaagaaggtgattaaagaagtcaagattcttgaagtccacgtagacaaaggcatgaaacatggacagagaattacattcactggggaagcagaccaggccccaggagtggaacccggagacattgttcttttgctacaggagaaagaacatgaggtatttcagagagatgggaatgatttgcacatgacatataaaataggacttgttgaagctctatgtggatttcagttcacatttaagcaccttgatggacgtcagattgtggtgaaatacccccctggcaaagtaattgaaccagggtgtgttcgtgtagttcgaggtgaagggatgccgcagtatcgtaatccctttgaaaaaggtgatctttacataaagtttgatgtgcagtttcctgaaaacaactggatcaacccagacaagctttctgaactagaagatcttctgccatctagaccggaagttcctaacataattggagaaacagaggaggtagagcttcaggaatttgatagcactcgaggctcaggaggtggtcagaggcgtgaagcctataatgatagctctgatgaagaaagcagcagccatcatggacctggagtgcagtgtgcccatcagtaaactctgcaaacaaattgcacaggtggattttctttccacatttgcctgatttgttctcagcaatccagctggagtgtcttatcaatccagatgaactgagggacatctgttggtctatgtataacttttaaaattggtatagtatctacagagtgtataatttaaactaaccacaaagctttacatcttcattttgactgttccatagcagaataaagcacttgaaaggaaacaagactccctttcacacatggattattataagtttcaatcctggtatctgtgcttgatttttatcagttttgtgtagatttttatgtttcatattttaaatttaaatcccacattgtaaagtttgtacaatttgtcctgaagctttgtgtttggctgcacctgcataagctgctacaaatagaataaagaatttcatagcctgtatctatcatttagatgcatggaaaaaaatgggctttgcacacaatgggtttggagctgactgggaacaatggaaaaaattacattagctgtggttgtaaagtttttttgtttttggttttgttttttttttcttttttcttttttttttttttaccatcttgtgaaaggtttctgaaactcgataataaaaagcggttggtgtaaa

SEQ ID NO: 312830 - DNA, 1866 bp, Homo sapiens
ctcgggcgctcgggggcgggctctgcacagcgacgtcacgggcaccgtgcgctgcggaaagttcagccccgcccccgcttccccctcgctgtctccctcggcctgtgccgccgccgacgccgcttgtgggcccgactccgctctgtctgcttcgccaccttctccccgagcactgcccggccggccgccatggctaacgtggctgacacgaagctgtacgacatcctgggcgtcccgcccggcgccagcgagaacgagctgaagaaggcatacagaaagttagccaaggaatatcatcctgataagaatccaaatgcaggagacaaatttaaagaaataagttttgcatatgaagtactatcaaatcctgagaagcgtgagttatatgacagatacggagagcaaggtcttcgggaaggcagcggcggaggtggtggcatggatgatattttctctcacatttttggtgggggattgttcggcttcatgggcaatcagagtagaagtcgaaatggcagaagaagaggagaggacatgatgcatccactcaaagtatctttagaagatctgtataatggcaagacaaccaaactacaacttagcaagaatgtgctctgtagtgcatgcagtggccaaggcggaaagtctggagctgtccaaaagtgtagtgcttgtcgaggtcgaggtgtgcgcatcatgatcagacagctggctccagggatggtacaacagatgcagtctgtgtgctctgattgtaatggagaaggagaggtaattaatgaaaaagaccgctgtaaaaaatgtgaagggaagaaggtgattaaagaagtcaagattcttgaagtccacgtagacaaaggcatgaaacatggacagagaattacattcactggggaagcagaccaggccccaggagtggaacccggagacattgttcttttgctacaggagaaagaacatgaggtatttcagagagatgggaatgatttgcacatgacatataaaataggacttgttgaagctctatgtggatttcagttcacatttaagcaccttgatggacgtcagattgtggtgaaatacccccctggcaaagtaattgaaccagggtgtgttcgtgtagttcgaggtgaagggatgccgcagtatcgtaatccctttgaaaaaggtgatctttacataaagtttgatgtgcagtttcctgaaaacaactggatcaacccagacaagctttctgaactagaagatcttctgccatctagaccggaagttcctaacataattggagaaacagaggaggtagagcttcaggaatttgatagcactcgaggctcaggaggtggtcagaggcgtgaagcctataatgatagctctgatgaagaaagcagcagccatcatggacctggagtgcagtgtgcccatcagtaaactctgcaaacaaattgcacaggtggattttctttccacatttgcctgatttgttctcagcaatccagctggagtgtcttatcaatccagatgaactgagggacatctgttggtctatgtataacttttaaaattggtatagtatctacagagtgtataatttaaactaaccacaaagctttacatcttcattttgactgttccatagcagaataaagcacttgaaaggaaacaagactccctttcacacatggattattataagtttcaatcctggtatctgtgcttgatttttatcagttttgtgtagatttttatgtttcatattttaaatttaaatcccacattgtaaagtttgtacaatttgtcctgaagctttgtgtttggctgcacctgcataagctgctacaaatagaataaagaatttcatagcctgta

SEQ ID NO: 312831 - DNA, 4091 bp, Homo sapiens
ggcaggtaatggtaaagtcctggaactgcatcggagaaagacggaggtcacagccaaagagaaatgtgtaggatagtaggaagacatgaaggaggtctaataatactaattggcaaagagagcaaatgtttcatctcaggatttcaaagcacacgaggcatttaagccccacagcatcctcaccaggctaagagcatccagatttgtaagccgagaaaaatgagaatgctccttaggcagtgagaagagtacagtggacttcctgttaccttaccggaaatgctagtctgtattatataattcacgagcctccgtgaatgaagatttaagtgctttaggacccaaacacctcgttgagagtgtgtgcaacttctctaccaccgaagttgccaccacgaccccagttaaccaccacgtgcaaataaaacaccaaaagacgctaactaggaccacctttactttttcatgatgttacagttagaaggaaggcgtgagccatcgggagcaggaattgtgactttagcttgatttatagtaatgttttgcagtccgcaaagcttaacagtcatttatctcgaatttattagggtcgtcttggtctggttacttggccatcaaagacacttgacaatagggaaaatatggataatgtttgaacgttttgtttttccctgtggcattgcttcattgttttatctggttttcacgtcactgtaacctgttttcaagtatagctgctgtctacttggttatattacattagtaaacagtatcgcgagaaagtgccgaagaatccctacgaatagaaaatatttttgaaaggttataactctagaacattacttctcagaaaagtggatattaagttattacaaaacttttaactggtgtttagttataaccttttttgtttttatccattttcaaaggcatacagaaagttagccaaggaatatcatcctgataagaatccaaatgcaggagacaaagtaagttatttgcaccttttttattccgggggttttagctttaacttaaattgccctccttgaaaaagaggaatgttgcaggaaaaaaatccaactatgcccacacagccacattttcataatgtcaagagtattttagttttagaataagagtactaccattctgaggagcggtgggtggtaaatagaaccagaatcaagtcaaaggtaacttgtccctttttttttttttttagaattaaatggattctggattcctgtagcttctccccactcttctacttgaaaatgcaattatttttatttttaccttttctttatagtttaaagaaataagttttgcatatgaagtactatcaaatcctgagaagcgtgagttatatgacagatacggagagcaaggtcttcgggaaggcagcggcggaggtggtggcatggatgatattttctctcacatttttggtgggggattgttcggcttcatgggcaatcagagtagaagtcgaaatggcagaagaagaggagaggacatgatgcatccactcaaagtatctttagaagatctgtataatggcaagacaaccaaactacaacttagcaagaatgtgctctgtagtgcatgcagtggccaaggcggaaagtctggagctgtccaaaagtgtagtgcttgtcgaggtcgaggtgtgcgcatcatgatcagacagctggctccagggatggtacaacagatgcagtctgtgtgctctgattgtaatggagaaggagaggtaattaatgaaaaagaccgctgtaaaaaatgtgaagggaagaaggtgattaaagaagtcaagattcttgaagtccacgtagacaaaggcatgaaacatggacagagaattacattcactggggaagcagaccaggccccaggagtggaacccggagacattgttcttttgctacaggagaaagaacatgaggtatttcagagagatgggaatgatttgcacatgacatataaaataggacttgttgaagctctatgtggatttcagttcacatttaagcaccttgatggacgtcagattgtggtgaaatacccccctggcaaagtaattgaaccagggtgtgttcgtgtagttcgaggtgaagggatgccgcagtatcgtaatccctttgaaaaaggtgatctttacataaagtttgatgtgcagtttcctgaaaacaactggatcaacccagacaagctttctgaactagaagatcttctgccatctagaccggaagttcctaacataattggagaaacagaggaggtagagcttcaggaatttgatagcactcgaggctcaggaggtggtcagaggcgtgaagcctataatgatagctctgatgaagaaagcagcagccatcatggacctggagtgcagtgtgcccatcagtaaactctgcaaacaaattgcacaggtggattttctttccacatttgcctgatttgttctcagcaatccagctggagtgtcttatcaatccagatgaactgagggacatctgttggtctatgtataacttttaaaattggtatagtatctacagagtgtataatttaaactaaccacaaagctttacatcttcattttgactgttccatagcagaataaagcacttgaaaggaaacaagactccctttcacacatggattattataagtttcaatcctggtatctgtgcttgatttttatcagttttgtgtagatttttatgtttcatattttaaatttaaatcccacattgtaaagtttgtacaatttgtcctgaagctttgtgtttggctgcacctgcataagctgctacaaatagaataaagaatttcatagcctgtatctatcatttagatgcatggaaaaaaatgggctttgcacacaatgggtttggagctgactgggaacaatggaaaaaattacattagctgtggttgtaaagtttttttgtttttggttttgttttttttttcttttttcttttttttttttttaccatcttgtgaaaggtttctgaaactcgataataaaaagcggttggtgtaaattattcttttgtgtcacatttttagaaggaaaaacataaaagaatgtatccttagtactggttcttaaacagcccataaaaacccattggcctgaagcttatatctcaggcctatgcccatcttatagtcttggaagacaaaaggctggtagagacagtcttcagtggcttcagtgatgctctgtagaggccagggtgtcttgagtgctgtaactcccaagcactgggctagcctgacttctgtatctccctaccaccacccccttaaaaaaataaggtaacagcaaatctatagtaaaaccatgtctgcatagaacgtgttcaaatcctctgttttcattaaatgtaaaagatgctgtctccattaagttgaatatttggaattggagaagccattgattattattttgagtttctgtaatgttttatagaaaagtaagatgcttattcagaatttaagaatgaaggcaactgaaatatgcattgttgtagttatttatatttcaaactaaaaataagcaaaaaaaaaaggctggtttgagaaaaatcaggtaaaattgatgaaacggatgttgtgtttctctttccatcatctggtttttaccatttcactcagtaggtatttttagaacacacttatttgaggaaagagacatcagatgcacaattttacatttataaaggaacaaatggggaaaactgaaaactaaaaattttaaatgtattaaatgccatccctgagcctaaatctagtatttgtagtttatttctaggtctgctagaacctgaaaacctgaatgaaaaaaggtgtgctgacactaatcaagtcctgtgaggtttaaattattgacctatccactctacctccattgtacaaaaaatattttacaacaagcctgggtaagattcaacagcatagtagttttgtatccaaggttacttccccacaaccactttaaacataagaaatgtggtggcaatataaagtttgtagcctttccaataaaggtttataaaacagttaaaaagtgtagt

SEQ ID NO: 312832 - DNA, 2437 bp, Homo sapiens
ggcacgagctccttctccattacaatcagagcacacagactgcatctgttgtaccatccctggagccagctgtctgatcatgattgtaatggagaaggagaggtaattaatgaaaaagaccgctgtaaaaaatgtgaagggaagaaggtgattaaagaagtcaagattcttgaagtccacgtagacaaaggcatgaaacatggacagagaattacattcactggggaagcagaccaggccccaggagtggaacccggagacattgttcttttgctacaggagaaagaacatgaggtatttcagagagatgggaatgatttgcacatgacatataaaataggacttgttgaagctctatgtggatttcagttcacatttaagcaccttgatggacgtcagattgtggtgaaatacccccctggcaaagtaattgaaccagggtgtgttcgtgtagttcgaggtgaagggatgccgcagtatcgtaatccctttgaaaaaggtgatctttacataaagtttgatgtgcagtttcctgaaaacaactggatcaacccagacaagctttctgaactagaagatcttctgccatctagaccggaagttcctaacataattggagaaacagaggaggtagagcttcaggaatttgatagcactcgaggctcaggaggtggtcagaggcgtgaagcctataatgatagctctgatgaagaaagcagcagccatcatggacctggagtgcagtgtgcccatcagtaaactctgcaaacaaattgcacaggtggattttctttccacatttgcctgatttgttctcagcaatccagctggagtgtcttatcaatccagatgaactgagggacatctgttggtctatgtataacttttaaaattggtatagtatctacagagtgtataatttaaactaaccacaaagctttacatcttcattttgactgttccatagcagaataaagcacttgaaaggaaacaagactccctttcacacatggattattataagtttcaatcctggtatctgtgcttgatttttatcagttttgtgtagatttttatgtttcatattttaaatttaaatcccacattgtaaagtttgtacaatttgtcctgaagctttgtgtttggctgcacctgcataagctgctacaaatagaataaagaatttcatagcctgtatctatcatttagatgcatggaaaaaaatgggctttgcacacaatgggtttggagctgactgggaacaatggaaaaaattacattagctgtggttgtaaagtttttttgtttttggttttgttttttttttcttttttcttttttttttttttaccatcttgtgaaaggtttctgaaactcgataataaaaagcggttggtgtaaattattcttttgtgtcacatttttagaaggaaaaacataaaagaatgtatccttagtactggttcttaaacagcccataaaaacccattggcctgaagcttatatctcaggcctatgcccatcttatagtcttggaagacaaaaggctggtagagacagtcttcagtggcttcagtgatgctctgtagaggccagggtgtcttgagtgctgtaactcccaagcactgggctagcctgacttctgtatctccctaccaccacccccttaaaaaaataaggtaacagcaaatctatagtaaaaccatgtctgcatagaacgtgttcaaatcctctgttttcattaaatgtaaaagatgctgtctccattaagttgaatatttggaattggagaagccattgattattattttgagtttctgtaatgttttatagaaaagtaagatgcttattcagaatttaagaatgaaggcaactgaaatatgcattgttgtagttatttatatttcaaactaaaaataagcaaaaaaaaaaggctggtttgagaaaaatcaggtaaaattgatgaaacggatgttgtgtttctctttccatcatctggtttttaccatttcactcagtaggtatttttagaacacacttatttgaggaaagagacatcagatgcacaattttacatttataaaggaacaaatggggaaaactgaaaactaaaaattttaaatgtattaaatgccatccctgagcctaaatctagtatttgtagtttatttctaggtctgctagaacctgaaaacctgaatgaaaaaaggtgtgctgacactaatcaagtcctgtgaggtttaaattattgacctatccactctacctccattgtacaaaaaatattttacaacaagcctgggtaagattcaacagcatagtagttttgtatccaaggttacttccccacaaccactttaaacataagaaatgtggtggcaatataaagtttgtagcctttccaataaaggtttataaaacagttaaaaagtgtagt

SEQ ID NO: 312833 - DNA, 1384 bp, Homo sapiens
ctcgggcgctcgggggcgggctctgcacagcgacgtcacgggcaccgtgcgctgcggaaagttcagccccgcccccgcttccccctcgctgtctccctcggcctgtgccgccgccgacgccgcttgtgggcccgactccgctctgtctgcttcgccaccttctccccgagcactgcccggccggccgccatggctaacgtggctgacacgaagctgtacgacatcctgggcgtcccgcccggcgccagcgagaacgagctgaagaaggcatacagaaagttagccaaggaatatcatcctgataagaatccaaatgcaggagacaaatttaaagaaataagttttgcatatgaagtactatcaaatcctgagaagcgtgagttatatgacagatacggagagcaaggtcttcgggaaggcagcggcggaggtggtggcatggatgatattttctctcacatttttggtgggggattgttcggcttcatgggcaatcagagtagaagtcgaaatggcagaagaagaggagaggacatgatgcatccactcaaagtatctttagaagatctgtataatggcaagacaaccaaactacaacttagcaagaatgtgctctgtagtgcatgcagtggccaaggcggaaagtctggagctgtccaaaagtgtagtgcttgtcgaggtcgaggtgtgcgcatcatgatcagacagctggctccagggatggtacaacagatgcagtctgtgtgctctgattgtaatggagaaggagaggtaattaatgaaaaagaccgctgtaaaaaatgtgaagggaagaaggtgattaaagaagtcaagattcttgaagtccacgtagacaaaggcatgaaacatggacagagaattacattcactggggaagcagaccaggccccaggagtggaacccggagacattgttcttttgctacaggagaaagaacatgaggtatttcagagagatgggaatgatttgcacatgacatataaaataggacttgttgaagctctatgtggatttcagttcacatttaagcaccttgatggacgtcagattgtggtgaaatacccccctggcaaagtaattgaaccagggtgtgttcgtgtagttcgaggtgaagggatgccgcagtatcgtaatccctttgaaaaaggtgatctttacataaagtttgatgtgcagtttcctgaaaacaactggatcaacccagacaagctttctgaactagaagatcttctgccatctagaccggaagttcctaacataattggagaaacagaggaggtagagcttcaggaatttgatggctgctgctttcttcatcagagctatcattgatagcttcacgcctctgaccacctcctgtcga

SEQ ID NO: 312834 - DNA, 1306 bp, Homo sapiens
ctcgggcgctcgggggcgggctctgcacagcgacgtcacgggcaccgtgcgctgcggaaagttcagccccgcccccgcttccccctcgctgtctccctcggcctgtgccgccgccgacgccgcttgtgggcccgactccgctctgtctgcttcgccaccttctccccgagcactgcccggccggccgccatggctaacgtggctgacacgaagctgtacgacatcctgggcgtcccgcccggcgccagcgagaacgagctgaagaaggcatacagaaagttagccaaggaatatcatcctgataagaatccaaatgcaggagacaaatttaaagaaataagttttgcatatgaagtactatcaaatcctgagaagcgtgagttatatgacagatacggagagcaaggtcttcgggaaggcagcggcggaggtggtggcatggatgatattttctctcacatttttggtgggggattgttcggcttcatgggcaatcagagtagaagtcgaaatggcagaagaagaggagaggacatgatgcatccactcaaagtatctttagaagatctgtataatggcaagacaaccaaactacaacttagcaagaatgtgctctgtagtgcatgcagtggccaaggcggaaagtctggagctgtccaaaagtgtagtgcttgtcgaggtcgaggtgtgcgcatcatgatcagacagctggctccagggatggtacaacagatgcagtctgtgtgctctgattgtaatggagaaggagaggtaattaatgaaaaagaccgctgtaaaaaatgtgaagggaagaaggtgattaaagaagtcaagattcttgaagtccacgtagacaaaggcatgaaacatggacagagaattacattcactggggaagcagaccaggccccaggagtggaacccggagacattgttcttttgctacaggagaaagaacatgaggtatttcagagagatgggaatgatttgcacatgacatataaaataggacttgttgaagctctatgtggatttcagttcacatttaagcaccttgatggacgtcagattgtggtgaaatacccccctggcaaagtaattgaaccagggtgtgttcgtgtagttcgaggtgaagggatgccgcagtatcgtaatccctttgaaaaaggtgatctttacataaagtttgatgtgcagtttcctgaaaacaactggatcaacccagacaagctttctgaaccagaagaagaggagaggacatgatgcatccactcaaagtatctttagaagatctgtataatggcaa

SEQ ID NO: 312835 - DNA, 676 bp, Homo sapiens
  misc_feature (29)..(29): n is a, c, g, or t
tgcactgtagatcgctcccgtgaagaaanttctaacagagcatctgtccctctgcaccaggagggaaggaggaagagaggtctggggaaagctggggtagggagtggctcttagcatgagtctgatgatatctcgcaggcggcaactggtgtgtttaaagggtgtatgcaaagatcactgaaatcggatttgtcattaaagcccagttttacgaaaatgcaaattgtattacctagaaaaattaacatgtgttcaaaggtttactgatggcatttctctgccctcatttcttacagaaatgaaccggagaagaatcccaattgggaattgcggaaaacaggactctagggtagagaaaggttgtagaaccaatagggtttgaggtaatactgtgaaaattcttagagcaatcatttggtgtttgagccctcaagacagaagttttgtgagcgcttattactctgcatatgtcacgagtagtagattaaaagccagtgttttaaaggcaaacttctcagtaatatatattcaaaggaaaaaagaaaaacccaaatctcctgacttttatatggttgcagtgtgatcttttaacatgtacaatagtatatacagtggcatgcagtttgttccatgggtgtgtgggtagagagggaacatattagaacttctatttaga

SEQ ID NO: 312836 - DNA, 441 bp, Homo sapiens
gactcatgtccctcttccttagtgcaagatgcaagactaatttactttaatttttaaggtaaaaatggatggacatagtacctaaagtttaattagccttgttagatttattttgttgagtttaatatatatggaacttgatttacctcattgttactataaatatttgttcagacctgatggccaaaagaaaggaagaaaatttttcctctcctaaaaatgccaaaaggccaagacaagaagaattggaggattttgataaagatggtgacgaagacgaatgtaaaggtactactttggtaagcgaaaaattacaaaattatgctttttgatatgtttttcttgtaacattcatcatatcacattctgtgataacttaaaatcaagaaaaagtaatatgattttttaaaagttgaggtaaaatctgttctgggtaatttt

SEQ ID NO: 312837 - DNA, 444 bp, Homo sapiens
atttctctatatttgtgtagtcttgaacctttaattcctttgctcttcatctgaagagtatttggccatttttatagtgcagaaattcacaaaattattggacttactaaaagtataccaaagaatcaagaataattttaaaaaatagaagttatttttaaacgaatatttatgtagtacttgtttaggcattgtttttaaaagaaatagatttgcaaaaatgtgttttttcaacattaataaaaaatacgtccgttctgttttctttttttaagcggcttactgaactaaagcgccagtgtgtagagaaagagaagcccctatgaatgtaatgaatgtggcaaagcttctcagtgagacagtcagtcctaagataacactcagcgaactcactcacggggtgaaccatataatgtaaccagttggaggggatactctagatcg

SEQ ID NO: 312838 - DNA, 4990 bp, Homo sapiens
agccaaggaagttaagacttcattacttctgacgtttatttagggggtttacactctaggttaccgtgggggaaagactgattgtaaataactacaataccttaaagtaataactataacagaactatatccgaaatacaaggttaacacggaaaagggaacacccaactgtgcctatggggaccagggagggctctcccgggatggctttgagcgaggcgtgggaattatccccatcgcatgcccgggggaagcacagcgggacccagcagcttcggccaagcgcaagcggccggagaacgcgcagctttcccgaggcggggtgacgcagggccctcgcgagtggaaaacaggggccaagtcgcggcctggcggctcggttcggacttcctactttattcaaagggagtcattgaaggcgttttcggaggagcagcgaacaaagagctcgtccgtaagccagatggtcaaaggaatcagtgggaggacccgggcggcgccgtctctccacgtcccgcgggacttacccggacaacccttcctccttggctctggaagaagccccttcgtcatttaccagtttggcctgaatcctaactactgtgcctccaaatttctgaattttctcaaaaggaaaaaaaaaaaaggaaagtcctctttctttacccaagcaaagactagctccccgggctcaaccgccaggcccaggagcaccaggaagcgtttcgaatccagcgccgggcccgcgcgccccgcctcttccgggaagtgactgacccctttcccccaatggggcccgctcggctttccctcgtctgctcccagccggcctagcggacgcatgcgtagaccagctgccgggggcgctcaattatctttcccttttacttaggcaaatcactcacctcccccgagtccggtcactgcggagccgcccgtgcctaccagcttcccccacccgctaaggggcacttccggcctctcagactccggcggcgcgaaaccccgcaaactgcgcaggcgcgggcggagcccgaagggagggagggcggggcgcaggcgcggttagtaccgcggtgggcgccggggctcccgggaatctaccttctcctgcggccggcacgcggttcccagggggccagcggcggtcagccgaggtcgagacgcccgcagggtggccttagcggccggtcgtaccacggcagccccgccgatcaggttcctttgggagacttcgacttgttggcgaaatgaaccggagaagaatcccaattgggaattgcggaaaacaggactctagggtagagaaaggttgtagaaccaatagggtttgagacctgatggccaaaagaaaggaagaaaatttttcctctcctaaaaatgccaaaaggccaagacaagaagaattggaggattttgataaagatggtgacgaagacgaatgtaaaggtactactttgactgcagcagaagttggaataattgagagtattcacctaaaaaacttcatgtgtcattcaatgcttggaccttttaagtttggttctaatgtcaactttgttgttggcaacaatggaagtgggaagagtgcagtactcacagctctcatagtcggtcttggtggaagagcagttgctactaatagaggatcctctttaaaaggttttgtgaaagatggacagaactctgcagatatctcaataacattgaggaacagaggagatgatgcctttaaagccagtgtgtatggtaactctatacttatacagcaacacatcagcatagatggaagtcgatcttataaacttaaaagtgcaacaggctccgtggtttccacgaggaaagaagagctgattgcaattcttgatcattttaacatccaggtggataatccagtttctgttttaacacaagaaatgagcaagcagttcttacagtctaaaaatgaaggagacaaatacaaattcttcatgaaagcaacgcaacttgaacagatgaaggaagattattcatacattatggaaacgaaagaaagaacaaaggagcagatacatcaaggagaagagcggcttactgaactaaagcgccagtgtgtagagaaagaggaacgttttcaaagtattgctggtttaagtacaatgaagactaatttagagtccttgaaacatgaaatggcttgggcagtggtcaatgaaattgaaaaacaattgaatgccatcagagataatatcaaaattggagaagatcgtgctgctagacttgacaggaaaatggaagaacagcaggtcagacttaatgaggcagaacaaaagtacaaggatattcaagacaaactagaaaagattagtgaagagacaaatgcacgagcaccagaatgtatggcattgaaagcagatgttgttgctaagaaaagggcctataatgaagctgaggttttatataaccgatccttaaacgaatataaagcattaaagaaagatgatgagcagctttgtaaacgaattgaagagctgaaaaaaagtactgaccaatctttggaacctgaacggttggaaagacaaaaaaaaatatcttggttaaaagagagagtaaaggcctttcaaaatcaagaaaattcagtcaatcaagagatcgaacagtttcagcaagccatagaaaaggacaaagaagaacatggcaaaattaagagagaagaattagatgtgaagcatgcactgagctacaatcagaggcaactgaaagaattgaaagatagtaaaactgatcgactcaaaagatttggccctaatgttccagctcttcttgaagccatagatgatgcttatagacaaggacattttacctataaacctgtaggccctttaggagcttgcattcatcttcgggacccagaacttgctttggctattgaatcttgcttaaaagggcttctgcaggcctattgttgccataatcatgctgatgaaagggtccttcaggcactcatgaaaaggttttatttaccagggacctcacggccaccgataatagtttctgagtttcggaatgagatatatgatgtaagacacagagctgcttatcatccagactttccaacagttctgacagctttagaaatagataatgcggttgtggcaaatagcctaattgacatgagaggcatagagacagtgctactaatcaaaaataattctgtagctcgtgcagtaatgcagtcccaaaagccacccaaaaattgtagagaagcttttactgctgatggtgatcaagtttttgcaggacgttattattcatctgaaaatacaagacctaagttcctaagcagagatgtggattctgaaataagtgacttggagaatgaggttgaaaataagacggcccagatattaaatcttcagcaacatttatctgcccttgaaaaagatattaaacacaatgaggaacttcttaaaaggtgccaactacattataaagaactaaagatgaaaataagaaaaaatatttctgaaattcgggaacttgagaacatagaagaacaccagtctgtagatattgcaactttggaagatgaagctcaggaaaataaaagcaaaatgaaaatggttgaggaacatatggagcaacaaaaagaaaatatggagcatcttaaaagtctgaaaatagaagcagaaaataagtatgatgcaattaaattcaaaattaatcaactatcggagctagcagacccacttaaggatgaattaaaccttgctgattctgaagtggataaccaaaaacgagggaaacgacattatgaagaaaaacaaaaagaacacttggataccttaaataaaaagaaacgagaactggatatgaaagagaaagaactagaggagaaaatgtcacaagcaagacaaatctgcccagagcgtatagaagtagaaaaatctgcatcaattctggacaaagaaattaatcgattaaggcagaagatacaggcagaacatgctagtcatggagatcgagaggaaataatgaggcagtaccaagaagcaagagagacctatcttgatctggatagtaaagtgaggactttaaaaaagtttattaaattactgggagaaatcatggagcacagattcaagacatatcaacaatttagaaggtgtttgactttacgatgcaaattatactttgacaacttactatctcagcgggcctattgtggaaaaatgaattttgaccacaagaatgaaactctaagtatatcagttcagcctggagaaggaaataaagctgctttcaatgacatgagagccttgtctggaggtgaacgttctttctccacagtgtgttttattctttccctgtggtccatcgcagaatctcctttcagatgcctggatgaatttgatgtctacatggatatggttaataggagaattgccatggacttgatactgaagatggcagattcccagcgttttagacagtttatcttgctcacacctcaaagcatgagttcacttccatccagtaaactgataagaattctccgaatgtctgatcctgaaagaggacaaactacattgcctttcagacctgtgactcaagaagaagatgatgaccaaaggtgatttgtaacttaacatgccttgtcctgatgttgaaggatttgtgaagggaaaaaaaattctggactctttgatataataaaatgagactggaggcattctgaaatgaaagaaactcctttatatatccaaccacaatcaaacatataaataagcctggaaaaccaactacaaccagcaatttaagattactattactttaagaaaatcaatttcatagtattggttttaaatctttttaagtttttttaatacgatctatttttataggttctttttcagaagtaaaattttgtacatatatacatgtacatatctgtttagtttgggttcatttctataacattttgtaagaaaataaaagtttgagcacctga

SEQ ID NO: 312839 - DNA, 4873 bp, Homo sapiens
agccaaggaagttaagacttcattacttctgacgtttatttagggggtttacactctaggttaccgtgggggaaagactgattgtaaataactacaataccttaaagtaataactataacagaactatatccgaaatacaaggttaacacggaaaagggaacacccaactgtgcctatggggaccagggagggctctcccgggatggctttgagcgaggcgtgggaattatccccatcgcatgcccgggggaagcacagcgggacccagcagcttcggccaagcgcaagcggccggagaacgcgcagctttcccgaggcggggtgacgcagggccctcgcgagtggaaaacaggggccaagtcgcggcctggcggctcggttcggacttcctactttattcaaagggagtcattgaaggcgttttcggaggagcagcgaacaaagagctcgtccgtaagccagatggtcaaaggaatcagtgggaggacccgggcggcgccgtctctccacgtcccgcgggacttacccggacaacccttcctccttggctctggaagaagccccttcgtcatttaccagtttggcctgaatcctaactactgtgcctccaaatttctgaattttctcaaaaggaaaaaaaaaaaaggaaagtcctctttctttacccaagcaaagactagctccccgggctcaaccgccaggcccaggagcaccaggaagcgtttcgaatccagcgccgggcccgcgcgccccgcctcttccgggaagtgactgacccctttcccccaatggggcccgctcggctttccctcgtctgctcccagccggcctagcggacgcatgcgtagaccagctgccgggggcgctcaattatctttcccttttacttaggcaaatcactcacctcccccgagtccggtcactgcggagccgcccgtgcctaccagcttcccccacccgctaaggggcacttccggcctctcagactccggcggcgcgaaaccccgcaaactgcgcaggcgcgggcggagcccgaagggagggagggcggggcgcaggcgcggttagtaccgcggtgggcgccggggctcccgggaatctaccttctcctgcggccggcacgcggttcccagggggccagcggcggtcagccgaggtcgagacgcccgcagggtggccttagcggccggtcgtaccacggcagccccgccgatcagacctgatggccaaaagaaaggaagaaaatttttcctctcctaaaaatgccaaaaggccaagacaagaagaattggaggattttgataaagatggtgacgaagacgaatgtaaaggtactactttgactgcagcagaagttggaataattgagagtattcacctaaaaaacttcatgtgtcattcaatgcttggaccttttaagtttggttctaatgtcaactttgttgttggcaacaatggaagtgggaagagtgcagtactcacagctctcatagtcggtcttggtggaagagcagttgctactaatagaggatcctctttaaaaggttttgtgaaagatggacagaactctgcagatatctcaataacattgaggaacagaggagatgatgcctttaaagccagtgtgtatggtaactctatacttatacagcaacacatcagcatagatggaagtcgatcttataaacttaaaagtgcaacaggctccgtggtttccacgaggaaagaagagctgattgcaattcttgatcattttaacatccaggtggataatccagtttctgttttaacacaagaaatgagcaagcagttcttacagtctaaaaatgaaggagacaaatacaaattcttcatgaaagcaacgcaacttgaacagatgaaggaagattattcatacattatggaaacgaaagaaagaacaaaggagcagatacatcaaggagaagagcggcttactgaactaaagcgccagtgtgtagagaaagaggaacgttttcaaagtattgctggtttaagtacaatgaagactaatttagagtccttgaaacatgaaatggcttgggcagtggtcaatgaaattgaaaaacaattgaatgccatcagagataatatcaaaattggagaagatcgtgctgctagacttgacaggaaaatggaagaacagcaggtcagacttaatgaggcagaacaaaagtacaaggatattcaagacaaactagaaaagattagtgaagagacaaatgcacgagcaccagaatgtatggcattgaaagcagatgttgttgctaagaaaagggcctataatgaagctgaggttttatataaccgatccttaaacgaatataaagcattaaagaaagatgatgagcagctttgtaaacgaattgaagagctgaaaaaaagtactgaccaatctttggaacctgaacggttggaaagacaaaaaaaaatatcttggttaaaagagagagtaaaggcctttcaaaatcaagaaaattcagtcaatcaagagatcgaacagtttcagcaagccatagaaaaggacaaagaagaacatggcaaaattaagagagaagaattagatgtgaagcatgcactgagctacaatcagaggcaactgaaagaattgaaagatagtaaaactgatcgactcaaaagatttggccctaatgttccagctcttcttgaagccatagatgatgcttatagacaaggacattttacctataaacctgtaggccctttaggagcttgcattcatcttcgggacccagaacttgctttggctattgaatcttgcttaaaagggcttctgcaggcctattgttgccataatcatgctgatgaaagggtccttcaggcactcatgaaaaggttttatttaccagggacctcacggccaccgataatagtttctgagtttcggaatgagatatatgatgtaagacacagagctgcttatcatccagactttccaacagttctgacagctttagaaatagataatgcggttgtggcaaatagcctaattgacatgagaggcatagagacagtgctactaatcaaaaataattctgtagctcgtgcagtaatgcagtcccaaaagccacccaaaaattgtagagaagcttttactgctgatggtgatcaagtttttgcaggacgttattattcatctgaaaatacaagacctaagttcctaagcagagatgtggattctgaaataagtgacttggagaatgaggttgaaaataagacggcccagatattaaatcttcagcaacatttatctgcccttgaaaaagatattaaacacaatgaggaacttcttaaaaggtgccaactacattataaagaactaaagatgaaaataagaaaaaatatttctgaaattcgggaacttgagaacatagaagaacaccagtctgtagatattgcaactttggaagatgaagctcaggaaaataaaagcaaaatgaaaatggttgaggaacatatggagcaacaaaaagaaaatatggagcatcttaaaagtctgaaaatagaagcagaaaataagtatgatgcaattaaattcaaaattaatcaactatcggagctagcagacccacttaaggatgaattaaaccttgctgattctgaagtggataaccaaaaacgagggaaacgacattatgaagaaaaacaaaaagaacacttggataccttaaataaaaagaaacgagaactggatatgaaagagaaagaactagaggagaaaatgtcacaagcaagacaaatctgcccagagcgtatagaagtagaaaaatctgcatcaattctggacaaagaaattaatcgattaaggcagaagatacaggcagaacatgctagtcatggagatcgagaggaaataatgaggcagtaccaagaagcaagagagacctatcttgatctggatagtaaagtgaggactttaaaaaagtttattaaattactgggagaaatcatggagcacagattcaagacatatcaacaatttagaaggtgtttgactttacgatgcaaattatactttgacaacttactatctcagcgggcctattgtggaaaaatgaattttgaccacaagaatgaaactctaagtatatcagttcagcctggagaaggaaataaagctgctttcaatgacatgagagccttgtctggaggtgaacgttctttctccacagtgtgttttattctttccctgtggtccatcgcagaatctcctttcagatgcctggatgaatttgatgtctacatggatatggttaataggagaattgccatggacttgatactgaagatggcagattcccagcgttttagacagtttatcttgctcacacctcaaagcatgagttcacttccatccagtaaactgataagaattctccgaatgtctgatcctgaaagaggacaaactacattgcctttcagacctgtgactcaagaagaagatgatgaccaaaggtgatttgtaacttaacatgccttgtcctgatgttgaaggatttgtgaagggaaaaaaaattctggactctttgatataataaaatgagactggaggcattctgaaatgaaagaaactcctttatatatccaaccacaatcaaacatataaataagcctggaaaaccaactacaaccagcaatttaagattactattactttaagaaaatcaatttcatagtattggttttaaatctttttaagtttttttaatacgatctatttttataggttctttttcagaagtaaaattttgtacatatatacatgtacatatctgtttagtttgggttcatttctataacattttgtaagaaaataaaagtttgagcacctga

SEQ ID NO: 312840 - DNA, 6304 bp, Homo sapiens
agccaaggaagttaagacttcattacttctgacgtttatttagggggtttacactctaggttaccgtgggggaaagactgattgtaaataactacaataccttaaagtaataactataacagaactatatccgaaatacaaggttaacacggaaaagggaacacccaactgtgcctatggggaccagggagggctctcccgggatggctttgagcgaggcgtgggaattatccccatcgcatgcccgggggaagcacagcgggacccagcagcttcggccaagcgcaagcggccggagaacgcgcagctttcccgaggcggggtgacgcagggccctcgcgagtggaaaacaggggccaagtcgcggcctggcggctcggttcggacttcctactttattcaaagggagtcattgaaggcgttttcggaggagcagcgaacaaagagctcgtccgtaagccagatggtcaaaggaatcagtgggaggacccgggcggcgccgtctctccacgtcccgcgggacttacccggacaacccttcctccttggctctggaagaagccccttcgtcatttaccagtttggcctgaatcctaactactgtgcctccaaatttctgaattttctcaaaaggaaaaaaaaaaaaggaaagtcctctttctttacccaagcaaagactagctccccgggctcaaccgccaggcccaggagcaccaggaagcgtttcgaatccagcgccgggcccgcgcgccccgcctcttccgggaagtgactgacccctttcccccaatggggcccgctcggctttccctcgtctgctcccagccggcctagcggacgcatgcgtagaccagctgccgggggcgctcaattatctttcccttttacttaggcaaatcactcacctcccccgagtccggtcactgcggagccgcccgtgcctaccagcttcccccacccgctaaggggcacttccggcctctcagactccggcggcgcgaaaccccgcaaactgcgcaggcgcgggcggagcccgaagggagggagggcggggcgcaggcgcggttagtaccgcggtgggcgccggggctcccgggaatctaccttctcctgcggccggcacgcggttcccagggggccagcggcggtcagccgaggtcgagacgcccgcagggtggccttagcggccggtcgtaccacggcagccccgccgatcaggttcctttgggagacttcgacttgttggcgaaatgaaccggagaagaatcccaattgggaattgcggaaaacaggactctagggtagagaaaggttgtagaaccaatagggtttgagacctgatggccaaaagaaaggaagaaaatttttcctctcctaaaaatgccaaaaggccaagacaagaagaattggaggattttgataaagatggtgacgaagacgaatgtaaaggtactactttgactgcagcagaagttggaataattgagagtattcacctaaaaaacttcatgtgtcattcaatgcttggaccttttaagtttggttctaatgtcaactttgttgttggcaacaatggaagtgggaagagtgcagtactcacagctctcatagtcggtcttggtggaagagcagttgctactaatagaggatcctctttaaaaggttttgtgaaagatggacagaactctgcagatatctcaataacattgaggaacagaggagatgatgcctttaaagccagtgtgtatggtaactctatacttatacagcaacacatcagcatagatggaagtcgatcttataaacttaaaagtgcaacaggctccgtggtttccacgaggaaagaagagctgattgcaattcttgatcattttaacatccaggtggataatccagtttctgttttaacacaagaaatgagcaagcagttcttacagtctaaaaatgaaggagacaaatacaaattcttcatgaaagcaacgcaacttgaacagatgaaggaagattattcatacattatggaaacgaaagaaagaacaaaggagcagatacatcaaggagaagagcggcttactgaactaaagcgccagtgtgtagagaaagaggaacgttttcaaagtattgctggtttaagtacaatgaagactaatttagagtccttgaaacatgaaatggcttgggcagtggtcaatgaaattgaaaaacaattgaatgccatcagagataatatcaaaattggagaagatcgtgctgctagacttgacaggaaaatggaagaacagcaggtcagacttaatgaggcagaacaaaagtacaaggatattcaagacaaactagaaaagattagtgaagagacaaatgcacgagcaccagaatgtatggcattgaaagcagatgttgttgctaagaaaagggcctataatgaagctgaggttttatataaccgatccttaaacgaatataaagcattaaagaaagatgatgagcagctttgtaaacgaattgaagagctgaaaaaaagtactgaccaatctttggaacctgaacggttggaaagacaaaaaaaaatatcttggttaaaagagagagtaaaggcctttcaaaatcaagaaaattcagtcaatcaagagatcgaacagtttcagcaagccatagaaaaggacaaagaagaacatggcaaaattaagagagaagaattagatgtgaagcatgcactgagctacaatcagaggcaactgaaagaattgaaagatagtaaaactgatcgactcaaaagatttggccctaatgttccagctcttcttgaagccatagatgatgcttatagacaaggacattttacctataaacctgtaggccctttaggagcttgcattcatcttcgggacccagaacttgctttggctattgaatcttgcttaaaagggcttctgcaggcctattgttgccataatcatgctgatgaaagggtccttcaggcactcatgaaaaggttttatttaccagggacctcacggccaccgataatagtttctgagtttcggaatgagatatatgatgtaagacacagagctgcttatcatccagactttccaacagttctgacagctttagaaatagataatgcggttgtggcaaatagcctaattgacatgagaggcatagagacagtgctactaatcaaaaataattctgtagctcgtgcagtaatgcagtcccaaaagccacccaaaaattgtagagaagcttttactgctgatggtgatcaagtttttgcaggacgttattattcatctgaaaatacaagacctaagttcctaagcagagatgtggattctgaaataagtgacttggagaatgaggttgaaaataagacggcccagatattaaatcttcagcaacatttatctgcccttgaaaaagatattaaacacaatgaggaacttcttaaaaggtgccaactacattataaagaactaaagatgaaaataagaaaaaatatttctgaaattcgggaacttgagaacatagaagaacaccagtctgtagatattgcaactttggaagatgaagctcaggaaaataaaagcaaaatgaaaatggttgaggaacatatggagcaacaaaaagaaaatatggagcatcttaaaagtctgaaaatagaagcagaaaataagtatgatgcaattaaattcaaaattaatcaactatcggagctagcagacccacttaaggatgaattaaaccttgctgattctgaagtggataaccaaaaacgagggaaacgacattatgaagaaaaacaaaaagaacacttggataccttaaataaaaagaaacgagaactggatatgaaagagaaagaactagaggagaaaatgtcacaagcaagacaaatctgcccagagcgtatagaagtagaaaaatctgcatcaattctggacaaagaaattaatcgattaaggcagaagatacaggcagaacatgctagtcatggagatcgagaggaaataatgaggcagtaccaagaagcaagagagacctatcttgatctggatagtaaagtgaggactttaaaaaagtttattaaattactgggagaaatcatggagcacagattcaagacatatcaacaatttagaaggtgtttgactttacgatgcaaattatactttgacaacttactatctcagcgggcctattgtggaaaaatgaattttgaccacaagaatgaaactctaagtatatcagttcagcctggagaaggaaataaagctgctttcaatgacatgagagccttgtctggaggtgaacgttctttctccacagtgtgttttattctttccctgtggtccatcgcagaatctcctttcagatgcctggatgaatttgatgtctacatggatatggttaataggagaattgccatggacttgatactgaagatggcagattcccagcgttttagacagtttatcttgctcacacctcaaagcatgagttcacttccatccagtaaactgataagaattctccgaatgtctgatcctgaaagaggacaaactacattgcctttcagacctgtgactcaagaagaagatgatgaccaaaggtgatttgtaacttaacatgccttgtcctgatgttgaaggatttgtgaagggaaaaaaaattctggactctttgatataataaaatgagactggaggcattctgaaatgaaagaaactcctttatatatccaaccacaatcaaacatataaataagcctggaaaaccaactacaaccagcaatttaagattactattactttaagaaaatcaatttcatagtattggttttaaatctttttaagtttttttaatacgatctatttttataggttctttttcagaagtaaaattttgtacatatatacatgtacatatctgtttagtttgggttcatttctataacattttgtaagaaaataaaagtttgagcacctgattatatttagttttgcttttccagatattacattctatagttaccaaaaatggttgaagggagggatttctcattgcagagggtggggtgcaagggaataagacacttgtacggaacactgaagctttgccaacttctacacatgccttttttgcagtcctttaactgtccaccctaccaagagcttataaccagtatcagaactggataatgacgcagtttttcactccgacctccatcatgcttgcctgatttaaaagccctcagtttgcagtccagggactgttcaggcttgtcctcagctgagaggacacaggctagagggactgtgcagaaccaggctgggagaagggctgggaaaactgggagtggagggtggatcctcatggagcaggagagtagctcatggctccaggagcctgaggccatgcagttgatggtgagctgacatcaattctaagactcatcctaattgaggggtgttaaaaagtgtgctgcttagaatgaccaaatatagttattgtaaaaaatgatatttatgaactttttattttagaaaacatgaattttattgctccctgtattatttgtttgatactaggattcatgctaaactttttaagaatgtatgggatatcaagaagcattccttacattagtagcaataaatattagaataaatatgaaattgaactattttcagaaaaagggcagtatattaagagcagggactgttctctagttattgaggaaaactggactttgtttgtgtttttggtggaggaagaagtttaagatactttagtcttaaattgaggtttgccaaatgagaagttcaaaaacttgggctttctaatcagaatttccaggaggaggaaagtgtgtgctgaatattttaaacatttcccactgatcatacaaagtctgatttttaaatttacacttataatgcctttgtattaaaattatttttaacatgtgcttttccaaattaaaaatgaagtagagtataccaaatgcataaactttcattagctaaggaactcatgtctgaattttgttgtagttttgaatgttgtgctctttcatacagaacgggaaacataatcctcaggtatcccagcatctcttgttgaattgaagattattcattgctttggcctcacaaagttttgatttcaactatcataagtgaaaatatcttcctttaatgttctaagtagtgataatattactagaatgaaagaataaaaagaaattgttcttttaaaatatgtgtaacttctaaaaataaaacttaaaatttatatgtaa

SEQ ID NO: 312841 - DNA, 1515 bp, Homo sapiens
  misc_feature (79)..(79): n is a, c, g, or t
gtgactgcgcgatgcgatgcagagtgagggcggaggagaggagaggggcttagctggaaccactctcttaattctccancgctacagcgaagatgaagctcaggaaaataaaagcaaaatgaaaatggttgaggaacatatggagcaacaaaaagaaaatatggagcatcttaaaagtctgaaaatagaagcagaaaataagtatgatgcaattaaattcaaaattaatcaactatcggagctagcagacccacttaaggatgaattaaaccttgctgattctgaagtggataaccaaaaacgagggaaacgacattatgaagaaaaacaaaaagaacacttggataccttaaataaaaagaaacgagaactggatatgaaagagaaagaactagaggagaaaatgtcacaagcaagacaaatctgcccagagcgtatagaagtagaaaaatctgcatcaattctggacaaagaaattaatcgattaaggcagaagatacaggcagaacatgctagtcatggagatcgagaggaaataatgaggcagtaccaagaagcaagagagacctatcttgatctggatagtaaagtgaggactttaaaaaagtttattaaattactgggagaaatcatggagcacagattcaagacatatcaacaatttagaaggtgtttgactttacgatgcaaattatactttgacaacttactatctcagcgggcctattgtggaaaaatgaattttgaccacaagaatgaaactctaagtatatcagttcagcctggagaaggaaataaagctgctttcaatgacatgagagccttgtctggaggtgaacgttctttctccacagtgtgttttattctttccctgtggtccatcgcagaatctcctttcagatgcctggatgaatttgatgtctacatggatatggttaataggagaattgccatggacttgatactgaagatggcagattcccagcgttttagacagtttatcttgctcacacctcaaagcatgagttcacttccatccagtaaactgataagaattctccgaatgtctgatcctgaaagaggacaaactacattgcctttcagacctgtgactcaagaagaagatgatgaccaaaggtgatttgtaacttaacatgccttgtcctgatgttgaaggatttgtgaagggaaaaaaaattctggactctttgatataataaaatgagactggaggcattctgaaatgaaagaaactcctttatatatccaaccacaatcaaacatataaataagcctggaaaaccaactacaaccagcaatttaagattactattactttaagaaaatcaatttcatagtattggttttaaatctttttaagtttttttaatacgatctatttttataggttctttttcagaagtaaaattttgtacatatatacatgtacatatctgtttagtttgggttcatttctataacattttgtaagaaaataaaagtttgagcacctga

SEQ ID NO: 312842 - DNA, 1027 bp, Homo sapiens
agaggatccctcataggttcgcaggactacctggagatcgagaggaaataatgaggcagtaccaagaagcaagagagacctatcttgatctggatagtaaagtgaggactttaaaaaagtttattaaattactgggagaaatcatggagcacagattcaagacatatcaacaatttagaaggtgtttgactttacgatgcaaattatactttgacaacttactatctcagcgggcctattgtggaaaaatgaattttgaccacaagaatgaaactctaagtatatcagttcagcctggagaaggaaataaagctgctttcaatgacatgagagccttgtctggaggtgaacgttctttctccacagtgtgttttattctttccctgtggtccatcgcagaatctcctttcagatgcctggatgaatttgatgtctacatggatatggttaataggagaattgccatggacttgatactgaagatggcagattcccagcgttttagacagtttatcttgctcacacctcaaagcatgagttcacttccatccagtaaactgataagaattctccgaatgtctgatcctgaaagaggacaaactacattgcctttcagacctgtgactcaagaagaagatgatgaccaaaggtgatttgtaacttaacatgccttgtcctgatgttgaaggatttgtgaagggaaaaaaaattctggactctttgatataataaaatgagactggaggcattctgaaatgaaagaaactcctttatatatccaaccacaatcaaacatataaataagcctggaaaaccaactacaaccagcaatttaagattactattactttaagaaaatcaatttcatagtattggttttaaatctttttaagtttttttaatacgatctatttttataggttctttttcagaagtaaaattttgtacatatatacatgtacatatctgtttagtttgggttcatttctataacattttgtaagaaaataaaagtttgagcacctga

SEQ ID NO: 312843 - DNA, 1474 bp, Homo sapiens
tattataacgaagcattattctttgtctataccctgatgtgctatttaacttatttaaagatataattgagaaattggtctgtaagttcaaattggtttatattgtacaaatggtagaggtaatggggagaggcagactttttaaaacttaacctttatcattgagggaaaatttgagagacttaatgaatttgagactagccacttttgttaccattaccctgactcattaaccattactgtacaaattagatttattctctaacatttagttgtgtcaggagaatattttctgattatttcaattgctacacgtatttgagggagggggctgtgtatacaaatattttgactatagaaattacctgaaagacatatttattcagttattgtccccgaagagtttctcttttttcccttagagatgggctttcactctgtcattcaggctagagtacaatggtgcgatcatagcttactgtacccttgagttcctgggctcaagtgatcctcctgcctcggcctcccgagtagctaggatgacaggcatgcaccaccatgcccaactttttttttttttttggtagagacagggtctcgctattatacacaggctggtctcgaactcctgacctcaattgatcctgtgacctccacctctcaaagcattgggattacaaacatgagccactgcacccagccaattttctcctaatagtttctggtatttcttttccagtataatagatttcttgggacatcatagataatgtaatgactgatcccgtggatgaaaatccaggagcttgtatcagcccacagaatgctgcttttacagaaatgtgacttacacaatagcaatcctaacttttgcctttgtttttcaggatatggttaataggagaattgccatggacttgatactgaagatggcagattcccagcgttttagacagtttatcttgctcacacctcaaagcatgagttcacttccatccagtaaactgataagaattctccgaatgtctgatcctgaaagaggacaaactacattgcctttcagacctgtgactcaagaagaagatgatgaccaaaggtgatttgtaacttaacatgccttgtcctgatgttgaaggatttgtgaagggaaaaaaaattctggactctttgatataataaaatgagactggaggcattctgaaatgaaagaaactcctttatatatccaaccacaatcaaacatataaataagcctggaaaaccaactacaaccagcaatttaagattactattactttaagaaaatcaatttcatagtattggttttaaatctttttaagtttttttaatacgatctatttttataggttctttttcagaagtaaaattttgtacatatatacatgtacatatctgtttagtttgggttcatttctataacattttgtaagaaaataaaagtttgagcacctga

SEQ ID NO: 312844 - DNA, 192 bp, Homo sapiens
actgcagcagaagttggaataattgagagtattcacctaaaaaacttcatgtgtcattcaatgcttggaccttttaagtttggttctaatgtcaactttgttgttggcaacaatggaagtaagtgttttttcccttctcgtttgactttgagcagtactttgagattagagtacgttaactttttgaaatag

SEQ ID NO: 312845 - DNA, 420 bp, Homo sapiens
ggcacgcggttcccagggggccagcggcggtcagccgaggtcgagacgcccgcagggtggccttagcggccggtcgtaccacggcagccccgccgatcaggttcctttgggagacttcgacttgttggcggtagggtgaaggcgcgcgctgtcgctttcccttgctccggggttcatcctccgcccgctgcccccttggctggcgacccccagccacccgggagaggcagggtcagctgagctgcggcggtgttcatggtcgtccttgcgggcccgggcgggagatgtccgttcctcgggcgggtcgggcggccggcggcaccttcgcgcgctctccgaggcggcaccggtctcctgagccgcgggaaacctggcgtctgctccgggccgtcccctcccaggcggccgtcccctcccagg

SEQ ID NO: 312846 - DNA, 262 bp, Homo sapiens
cagaaactaaatttttctttttctttttaacagttctatggaagtttacaaactcctaattgcgtttttttttgttattgataatagttcttcatgaaagcaacgcaacttgaacagatgaaggaagattattcatacattatggaaacgaaagaaagaacaaaggagcagatacatcaaggagaagaggtttgtaaacagttaatgtaaatctttttgagatcagccaaattcttatagtacttacagtaaatgatattgt

SEQ ID NO: 312847 - DNA, 4716 bp, Homo sapiens
agccaaggaagttaagacttcattacttctgacgtttatttagggggtttacactctaggttaccgtgggggaaagactgattgtaaataactacaataccttaaagtaataactataacagaactatatccgaaatacaaggttaacacggaaaagggaacacccaactgtgcctatggggaccagggagggctctcccgggatggctttgagcgaggcgtgggaattatccccatcgcatgcccgggggaagcacagcgggacccagcagcttcggccaagcgcaagcggccggagaacgcgcagctttcccgaggcggggtgacgcagggccctcgcgagtggaaaacaggggccaagtcgcggcctggcggctcggttcggacttcctactttattcaaagggagtcattgaaggcgttttcggaggagcagcgaacaaagagctcgtccgtaagccagatggtcaaaggaatcagtgggaggacccgggcggcgccgtctctccacgtcccgcgggacttacccggacaacccttcctccttggctctggaagaagccccttcgtcatttaccagtttggcctgaatcctaactactgtgcctccaaatttctgaattttctcaaaaggaaaaaaaaaaaaggaaagtcctctttctttacccaagcaaagactagctccccgggctcaaccgccaggcccaggagcaccaggaagcgtttcgaatccagcgccgggcccgcgcgccccgcctcttccgggaagtgactgacccctttcccccaatggggcccgctcggctttccctcgtctgctcccagccggcctagcggacgcatgcgtagaccagctgccgggggcgctcaattatctttcccttttacttaggcaaatcactcacctcccccgagtccggtcactgcggagccgcccgtgcctaccagcttcccccacccgctaaggggcacttccggcctctcagactccggcggcgcgaaaccccgcaaactgcgcaggcgcgggcggagcccgaagggagggagggcggggcgcaggcgcggttagtaccgcggtgggcgccggggctcccgggaatctaccttctcctgcggccggcacgcggttcccagggggccagcggcggtcagccgaggtcgagacgcccgcagggtggccttagcggccggtcgtaccacggcagccccgccgatcaggttcctttgggagacttcgacttgttggcgaaatgaaccggagaagaatcccaattgggaattgcggaaaacaggactctagggtagagaaaggttgtagaaccaatagggtttgagacctgatggccaaaagaaaggaagaaaatttttcctctcctaaaaatgccaaaaggccaagacaagaagaattggaggattttgataaagatggtgacgaagacgaatgtaaaggtactactttgactgcagcagaagttggaataattgagagtattcacctaaaaaacttcatgtgtcattcaatgcttggaccttttaagtttggttctaatgtcaactttgttgttggcaacaatggaagtgggaagagtgcagtactcacagctctcatagtcggtcttggtggaagagcagttgctactaatagaggatcctctttaaaaggttttgtgaaagatggacagaactctgcagatatctcaataacattgaggaacagaggagatgatgcctttaaagccagtgtgtatggtaactctatacttatacagcaacacatcagcatagatggaagtcgatcttataaacttaaaagtgcaacaggctccgtggtttccacgaggaaagaagagctgattgcaattcttgatcattttaacatccaggtggataatccagtttctgttttaacacaagaaatgagcaagcagttcttacagtctaaaaatgaaggagacaaatacaaattcttcatgaaagcaacgcaacttgaacagatgaaggaagattattcatacattatggaaacgaaagaaagaacaaaggagcagatacatcaaggagaagagcggcttactgaactaaagcgccagtgtgtagagaaagaggaacgttttcaaagtattgctggtttaagtacaatgaagactaatttagagtccttgaaacatgaaatggcttgggcagtggtcaatgaaattgaaaaacaattgaatgccatcagagataatatcaaaattggagaagatcgtgctgctagacttgacaggaaaatggaagaacagcaggtcagacttaatgaggcagaacaaaagtacaaggatattcaagacaaactagaaaagattagtgaagagacaaatgcacgagcaccagaatgtatggcattgaaagcagatgttgttgctaagaaaagggcctataatgaagctgaggttttatataaccgatccttaaacgaatataaagcattaaagaaagatgatgagcagctttgtaaacgaattgaagagctgaaaaaaagtactgaccaatctttggaacctgaacggttggaaagacaaaaaaaaatatcttggttaaaagagagagtaaaggcctttcaaaatcaagaaaattcagtcaatcaagagatcgaacagtttcagcaagccatagaaaaggacaaagaagaacatggcaaaattaagagagaagaattagatgtgaagcatgcactgagctacaatcagaggcaactgaaagaattgaaagatagtaaaactgatcgactcaaaagatttggccctaatgttccagctcttcttgaagccatagatgatgcttatagacaaggacattttacctataaacctgtaggccctttaggagcttgcattcatcttcgggacccagaacttgctttggctattgaatcttgcttaaaagggcttctgcaggcctattgttgccataatcatgctgatgaaagggtccttcaggcactcatgaaaaggttttatttaccagggacctcacggccaccgataatagtttctgagtttcggaatgagatatatgatgtaagacacagagctgcttatcatccagactttccaacagttctgacagctttagaaatagataatgcggttgtggcaaatagcctaattgacatgagaggcatagagacagtgctactaatcaaaaataattctgtagctcgtgcagtaatgcagtcccaaaagccacccaaaaattgtagagaagcttttactgctgatggtgatcaagtttttgcaggacgttattattcatctgaaaatacaagacctaagttcctaagcagagatgtggattctgaaataagtgacttggagaatgaggttgaaaataagacggcccagatattaaatcttcagcaacatttatctgcccttgaaaaagatattaaacacaatgaggaacttcttaaaaggtgccaactacattataaagaactaaagatgaaaataagaaaaaatatttctgaaattcgggaacttgagaacatagaagaacaccagtctgtagatattgcaactttggaagatgaagctcaggaaaataaaagcaaaatgaaaatggttgaggaacatatggagcaacaaaaagaaaatatggagcatcttaaaagtctgaaaatagaagcagaaaataagtatgatgcaattaaattcaaaattaatcaactatcggagctagcagacccacttaaggatgaattaaaccttgctgattctgaagtggataaccaaaaacgagggaaacgacattatgaagaaaaacaaaaagaacacttggataccttaaataaaaagaaacgagaactggatatgaaagagaaagaactagaggagaaaatgtcacaagcaagacaaatctgcccagagcgtatagaagtagaaaaatctgcatcaattctggacaaagaaattaatcgattaaggcagaagatacaggcagaacatgctagtcatggagatcgagaggaaataatgaggcagtaccaagaagcaagagagacctatcttgatctggatagtaaagtgaggactttaaaaaagtttattaaattactgggagaaatcatggagcacagattcaagacatatcaacaatttagaaggtgtttgactttacgatgcaaattatactttgacaacttactatctcagcgggcctattgtggaaaaatgaattttgaccacaagaatgaaactctaagtatatcagttcagcctggagaaggaaataaagctgctttcaatgacatgagagccttgtctggaggtgaacgttctttctccacagtgtgttttattctttccctgtggtccatcgcagaatctcctttcagatgcctggatgaatttgatgtctacatggatatggttaataggagaattgccatggacttgatactgaagatggcagattcccagcgttttagacagtttatcttgctcacacctcaaagcatgagttcacttccatccagtaaactgataagaattctccgaatgtctgatcctgaaagaggacaaactacattgcctttcagacctgtgactcaagaagaagatgatgaccaaaggtgatttgtaacttaacatgccttgtcctgatgttgaaggatttgtgaagggaaaaaaaattctggactctttgatataataaaatgagactggaggcattctg

SEQ ID NO: 312848 - DNA, 4903 bp, Homo sapiens
agccaaggaagttaagacttcattacttctgacgtttatttagggggtttacactctaggttaccgtgggggaaagactgattgtaaataactacaataccttaaagtaataactataacagaactatatccgaaatacaaggttaacacggaaaagggaacacccaactgtgcctatggggaccagggagggctctcccgggatggctttgagcgaggcgtgggaattatccccatcgcatgcccgggggaagcacagcgggacccagcagcttcggccaagcgcaagcggccggagaacgcgcagctttcccgaggcggggtgacgcagggccctcgcgagtggaaaacaggggccaagtcgcggcctggcggctcggttcggacttcctactttattcaaagggagtcattgaaggcgttttcggaggagcagcgaacaaagagctcgtccgtaagccagatggtcaaaggaatcagtgggaggacccgggcggcgccgtctctccacgtcccgcgggacttacccggacaacccttcctccttggctctggaagaagccccttcgtcatttaccagtttggcctgaatcctaactactgtgcctccaaatttctgaattttctcaaaaggaaaaaaaaaaaaggaaagtcctctttctttacccaagcaaagactagctccccgggctcaaccgccaggcccaggagcaccaggaagcgtttcgaatccagcgccgggcccgcgcgccccgcctcttccgggaagtgactgacccctttcccccaatggggcccgctcggctttccctcgtctgctcccagccggcctagcggacgcatgcgtagaccagctgccgggggcgctcaattatctttcccttttacttaggcaaatcactcacctcccccgagtccggtcactgcggagccgcccgtgcctaccagcttcccccacccgctaaggggcacttccggcctctcagactccggcggcgcgaaaccccgcaaactgcgcaggcgcgggcggagcccgaagggagggagggcggggcgcaggcgcggttagtaccgcggtgggcgccggggctcccgggaatctaccttctcctgcggccggcacgcggttcccagggggccagcggcggtcagccgaggtcgagacgcccgcagggtggccttagcggccggtcgtaccacggcagccccgccgatcaggttcctttgggagacttcgacttgttggcgacctgatggccaaaagaaaggaagaaaatttttcctctcctaaaaatgccaaaaggccaagacaagaagaattggaggattttgataaagatggtgacgaagacgaatgtaaaggtactactttgactgcagcagaagttggaataattgagagtattcacctaaaaaacttcatgtgtcattcaatgcttggaccttttaagtttggttctaatgtcaactttgttgttggcaacaatggaagtgggaagagtgcagtactcacagctctcatagtcggtcttggtggaagagcagttgctactaatagaggatcctctttaaaaggttttgtgaaagatggacagaactctgcagatatctcaataacattgaggaacagaggagatgatgcctttaaagccagtgtgtatggtaactctatacttatacagcaacacatcagcatagatggaagtcgatcttataaacttaaaagtgcaacaggctccgtggtttccacgaggaaagaagagctgattgcaattcttgatcattttaacatccaggtggataatccagtttctgttttaacacaagaaatgagcaagcagttcttacagtctaaaaatgaaggagacaaatacaaattcttcatgaaagcaacgcaacttgaacagatgaaggaagattattcatacattatggaaacgaaagaaagaacaaaggagcagatacatcaaggagaagagcggcttactgaactaaagcgccagtgtgtagagaaagaggaacgttttcaaagtattgctggtttaagtacaatgaagactaatttagagtccttgaaacatgaaatggcttgggcagtggtcaatgaaattgaaaaacaattgaatgccatcagagataatatcaaaattggagaagatcgtgctgctagacttgacaggaaaatggaagaacagcaggtcagacttaatgaggcagaacaaaagtacaaggatattcaagacaaactagaaaagattagtgaagagacaaatgcacgagcaccagaatgtatggcattgaaagcagatgttgttgctaagaaaagggcctataatgaagctgaggttttatataaccgatccttaaacgaatataaagcattaaagaaagatgatgagcagctttgtaaacgaattgaagagctgaaaaaaagtactgaccaatctttggaacctgaacggttggaaagacaaaaaaaaatatcttggttaaaagagagagtaaaggcctttcaaaatcaagaaaattcagtcaatcaagagatcgaacagtttcagcaagccatagaaaaggacaaagaagaacatggcaaaattaagagagaagaattagatgtgaagcatgcactgagctacaatcagaggcaactgaaagaattgaaagatagtaaaactgatcgactcaaaagatttggccctaatgttccagctcttcttgaagccatagatgatgcttatagacaaggacattttacctataaacctgtaggccctttaggagcttgcattcatcttcgggacccagaacttgctttggctattgaatcttgcttaaaagggcttctgcaggcctattgttgccataatcatgctgatgaaagggtccttcaggcactcatgaaaaggttttatttaccagggacctcacggccaccgataatagtttctgagtttcggaatgagatatatgatgtaagacacagagctgcttatcatccagactttccaacagttctgacagctttagaaatagataatgcggttgtggcaaatagcctaattgacatgagaggcatagagacagtgctactaatcaaaaataattctgtagctcgtgcagtaatgcagtcccaaaagccacccaaaaattgtagagaagcttttactgctgatggtgatcaagtttttgcaggacgttattattcatctgaaaatacaagacctaagttcctaagcagagatgtggattctgaaataagtgacttggagaatgaggttgaaaataagacggcccagatattaaatcttcagcaacatttatctgcccttgaaaaagatattaaacacaatgaggaacttcttaaaaggtgccaactacattataaagaactaaagatgaaaataagaaaaaatatttctgaaattcgggaacttgagaacatagaagaacaccagtctgtagatattgcaactttggaagatgaagctcaggaaaataaaagcaaaatgaaaatggttgaggaacatatggagcaacaaaaagaaaatatggagcatcttaaaagtctgaaaatagaagcagaaaataagtatgatgcaattaaattcaaaattaatcaactatcggagctagcagacccacttaaggatgaattaaaccttgctgattctgaagtggataaccaaaaacgagggaaacgacattatgaagaaaaacaaaaagaacacttggataccttaaataaaaagaaacgagaactggatatgaaagagaaagaactagaggagaaaatgtcacaagcaagacaaatctgcccagagcgtatagaagtagaaaaatctgcatcaattctggacaaagaaattaatcgattaaggcagaagatacaggcagaacatgctagtcatggagatcgagaggaaataatgaggcagtaccaagaagcaagagagacctatcttgatctggatagtaaagtgaggactttaaaaaagtttattaaattactgggagaaatcatggagcacagattcaagacatatcaacaatttagaaggtgtttgactttacgatgcaaattatactttgacaacttactatctcagcgggcctattgtggaaaaatgaattttgaccacaagaatgaaactctaagtatatcagttcagcctggagaaggaaataaagctgctttcaatgacatgagagccttgtctggaggtgaacgttctttctccacagtgtgttttattctttccctgtggtccatcgcagaatctcctttcagatgcctggatgaatttgatgtctacatggatatggttaataggagaattgccatggacttgatactgaagatggcagattcccagcgttttagacagtttatcttgctcacacctcaaagcatgagttcacttccatccagtaaactgataagaattctccgaatgtctgatcctgaaagaggacaaactacattgcctttcagacctgtgactcaagaagaagatgatgaccaaaggtgatttgtaacttaacatgccttgtcctgatgttgaaggatttgtgaagggaaaaaaaattctggactctttgatataataaaatgagactggaggcattctgaaatgaaagaaactcctttatatatccaaccacaatcaaacatataaataagcctggaaaaccaactacaaccagcaatttaagattactattactttaagaaaatcaatttcatagtattggttttaaatctttttaagtttttttaatacgatctatttttataggttctttttcagaagtaaaattttgtacatatatacatgtacatatctgtttagtttgggttcatttctataacattttgtaagaaaataaaagtttgagcacctga

SEQ ID NO: 312849 - DNA, 3482 bp, Homo sapiens
agccaaggaagttaagacttcattacttctgacgtttatttagggggtttacactctaggttaccgtgggggaaagactgattgtaaataactacaataccttaaagtaataactataacagaactatatccgaaatacaaggttaacacggaaaagggaacacccaactgtgcctatggggaccagggagggctctcccgggatggctttgagcgaggcgtgggaattatccccatcgcatgcccgggggaagcacagcgggacccagcagcttcggccaagcgcaagcggccggagaacgcgcagctttcccgaggcggggtgacgcagggccctcgcgagtggaaaacaggggccaagtcgcggcctggcggctcggttcggacttcctactttattcaaagggagtcattgaaggcgttttcggaggagcagcgaacaaagagctcgtccgtaagccagatggtcaaaggaatcagtgggaggacccgggcggcgccgtctctccacgtcccgcgggacttacccggacaacccttcctccttggctctggaagaagccccttcgtcatttaccagtttggcctgaatcctaactactgtgcctccaaatttctgaattttctcaaaaggaaaaaaaaaaaaggaaagtcctctttctttacccaagcaaagactagctccccgggctcaaccgccaggcccaggagcaccaggaagcgtttcgaatccagcgccgggcccgcgcgccccgcctcttccgggaagtgactgacccctttcccccaatggggcccgctcggctttccctcgtctgctcccagccggcctagcggacgcatgcgtagaccagctgccgggggcgctcaattatctttcccttttacttaggcaaatcactcacctcccccgagtccggtcactgcggagccgcccgtgcctaccagcttcccccacccgctaaggggcacttccggcctctcagactccggcggcgcgaaaccccgcaaactgcgcaggcgcgggcggagcccgaagggagggagggcggggcgcaggcgcggttagtaccgcggtgggcgccggggctcccgggaatctaccttctcctgcggccggcacgcggttcccagggggccagcggcggtcagccgaggtcgagacgcccgcagggtggccttagcggccggtcgtaccacggcagccccgccgatcaggttcctttgggagacttcgacttgttggcgaaatgaaccggagaagaatcccaattgggaattgcggaaaacaggactctagggtagagaaaggttgtagaaccaatagggtttgagacctgatggccaaaagaaaggaagaaaatttttcctctcctaaaaatgccaaaaggccaagacaagaagaattggaggattttgataaagatggtgacgaagacgaatgtaaaggtactactttgactgcagcagaagttggaataattgagagtattcacctaaaaaacttcatgtgtcattcaatgcttggaccttttaagtttggttctaatgtcaactttgttgttggcaacaatggaagtgggaagagtgcagtactcacagctctcatagtcggtcttggtggaagagcagttgctactaatagaggatcctctttaaaaggttttgtgaaagatggacagaactctgcagatatctcaataacattgaggaacagaggagatgatgcctttaaagccagtgtgtatggtaactctatacttatacagcaacacatcagcatagatggaagtcgatcttataaacttaaaagtgcaacaggctccgtggtttccacgaggaaagaagagctgattgcaattcttgatcattttaacatccaggtggataatccagtttctgttttaacacaagaaatgagcaagcagttcttacagtctaaaaatgaaggagacaaatacaaattcttcatgaaagcaacgcaacttgaacagatgaaggaagattattcatacattatggaaacgaaagaaagaacaaaggagcagatacatcaaggagaagagcggcttactgaactaaagcgccagtgtgtagagaaagaggaacgttttcaaagtattgctggtttaagtacaatgaagactaatttagagtccttgaaacatgaaatggcttgggcagtggtcaatgaaattgaaaaacaattgaatgccatcagagataatatcaaaattggagaagatcgtgctgctagacttgacaggaaaatggaagaacagcaggtcagacttaatgaggcagaacaaaagtacaaggatattcaagacaaactagaaaagattagtgaagagacaaatgcacgagcaccagaatgtatggcattgaaagcagatgttgttgctaagaaaagggcctataatgaagctgaggttttatataaccgatccttaaacgaatataaagcattaaagaaagatgatgagcagctttgtaaacgaattgaagagctgaaaaaaagtactgaccaatctttggaacctgaacggttggaaagacaaaaaaaaatatcttggttaaaagagagagtaaaggcctttcaaaatcaagaaaattcagtcaatcaagagatcgaacagtttcagcaagccatagaaaaggacaaagaagaacatggcaaaattaagagagaagaattagatgtgaagcatgcactgagctacaatcagaggcaactgaaagaattgaaagatagtaaaactgatcgactcaaaagatttggccctaatgttccagctcttcttgaagccatagatgatgcttatagacaaggacattttacctataaacctgtaggccctttaggagcttgcattcatcttcgggacccagaacttgctttggctattgaatcttgcttaaaagggcttctgcaggcctattgttgccataatcatgctgatgaaagggtccttcaggcactcatgaaaaggttttatttaccagggacctcacggccaccgataatagtttctgagtttcggaatgagatatatgatgtaagacacagagctgcttatcatccagactttccaacagttctgacagctttagaaatagataatgcggttgtggcaaatagcctaattgacatgagaggcatagagacagtgctactaatcaaaaataattctgtagctcgtgcagtaatgcagtcccaaaagccacccaaaaattgtagagaagcttttactgctgatggtgatcaagtttttgcaggacgttattattcatctgaaaatacaagacctaagttcctaagcagagatgtggattctgaaataagtgacttggagaatgaggttgaaaataagacggcccagatattaaatcttcagcaacatttatctgcccttgaaaaagatattaaacacaatgaggaacttcttaaaaggtgccaactacattataaagaactaaag

SEQ ID NO: 312850 - DNA, 2559 bp, Homo sapiens
agccaaggaagttaagacttcattacttctgacgtttatttagggggtttacactctaggttaccgtgggggaaagactgattgtaaataactacaataccttaaagtaataactataacagaactatatccgaaatacaaggttaacacggaaaagggaacacccaactgtgcctatggggaccagggagggctctcccgggatggctttgagcgaggcgtgggaattatccccatcgcatgcccgggggaagcacagcgggacccagcagcttcggccaagcgcaagcggccggagaacgcgcagctttcccgaggcggggtgacgcagggccctcgcgagtggaaaacaggggccaagtcgcggcctggcggctcggttcggacttcctactttattcaaagggagtcattgaaggcgttttcggaggagcagcgaacaaagagctcgtccgtaagccagatggtcaaaggaatcagtgggaggacccgggcggcgccgtctctccacgtcccgcgggacttacccggacaacccttcctccttggctctggaagaagccccttcgtcatttaccagtttggcctgaatcctaactactgtgcctccaaatttctgaattttctcaaaaggaaaaaaaaaaaaggaaagtcctctttctttacccaagcaaagactagctccccgggctcaaccgccaggcccaggagcaccaggaagcgtttcgaatccagcgccgggcccgcgcgccccgcctcttccgggaagtgactgacccctttcccccaatggggcccgctcggctttccctcgtctgctcccagccggcctagcggacgcatgcgtagaccagctgccgggggcgctcaattatctttcccttttacttaggcaaatcactcacctcccccgagtccggtcactgcggagccgcccgtgcctaccagcttcccccacccgctaaggggcacttccggcctctcagactccggcggcgcgaaaccccgcaaactgcgcaggcgcgggcggagcccgaagggagggagggcggggcgcaggcgcggttagtaccgcggtgggcgccggggctcccgggaatctaccttctcctgcggccggcacgcggttcccagggggccagcggcggtcagccgaggtcgagacgcccgcagggtggccttagcggccggtcgtaccacggcagccccgccgatcaggttcctttgggagacttcgacttgttggcgaaatgaaccggagaagaatcccaattgggaattgcggaaaacaggactctagggtagagaaaggttgtagaaccaatagggtttgagacctgatggccaaaagaaaggaagaaaatttttcctctcctaaaaatgccaaaaggccaagacaagaagaattggaggattttgataaagatggtgacgaagacgaatgtaaaggtactactttgactgcagcagaagttggaataattgagagtattcacctaaaaaacttcatgtgtcattcaatgcttggaccttttaagtttggttctaatgtcaactttgttgttggcaacaatggaagtgggaagagtgcagtactcacagctctcatagtcggtcttggtggaagagcagttgctactaatagaggatcctctttaaaaggttttgtgaaagatggacagaactctgcagatatctcaataacattgaggaacagaggagatgatgcctttaaagccagtgtgtatggtaactctatacttatacagcaacacatcagcatagatggaagtcgatcttataaacttaaaagtgcaacaggctccgtggtttccacgaggaaagaagagctgattgcaattcttgatcattttaacatccaggtggataatccagtttctgttttaacacaagaaatgagcaagcagttcttacagtctaaaaatgaaggagacaaatacaaattcttcatgaaagcaacgcaacttgaacagatgaaggaagattattcatacattatggaaacgaaagaaagaacaaaggagcagatacatcaaggagaagagcggcttactgaactaaagcgccagtgtgtagagaaagaggaacgttttcaaagtattgctggtttaagtacaatgaagactaatttagagtccttgaaacatgaaatggcttgggcagtggtcaatgaaattgaaaaacaattgaatgccatcagagataatatcaaaattggagaagatcgtgctgctagacttgacaggaaaatggaagaacagcaggtcagacttaatgaggcagaacaaaagtacaaggatattcaagacaaactagaaaagattagtgaagagacaaatgcacgagcaccagaatgtatggcattgaaagcagatgttgttgctaagaaaagggcctataatgaagctgaggttttatataaccgatccttaaacgaatataaagcattaaagaaagatgatgagcagctttgtaaacgaattgaagagctgaaaaaaaggtaggggtagaaaacaaaacacacacaaaacacaaaat

SEQ ID NO: 312851 - DNA, 2707 bp, Homo sapiens
gggagaaacgttctcactcgctctctgctcgctgcgggcgctccccgccctctgctgccagaaccttggggatgtgcctagacccggcgcagcacacgtccgggccaaccgcgagcagaacaaacctttggcgggcggccaggaggctccctcccagccaccgcccccctccagcgcctttttttccccccatacaatacaagatcttccttcctcagttcccttaaagcacagcccagggaaacctcctcacagttttcatccagccacgggccagcatgtctgggggcaaatacgtagactcggagggacatctctacaccgttcccatccgggaacagggcaacatctacaagcccaacaacaaggccatggcagacgagctgagcgagaagcaagtgtacgacgcgcacaccaaggagatcgacctggtcaaccgcgaccctaaacacctcaacgatgacgtggtcaagattgactttgaagatgtgattgcagaaccagaagggacacacagttttgacggcatttggaaggccagcttcaccaccttcactgtgacgaaatactggttttaccgcttgctgtctgccctctttggcatcccgatggcactcatctggggcatttacttcgccattctctctttcctgcacatctgggcagttgtaccatgcattaagagcttcctgattgagattcagtgcatcagccgtgtctattccatctacgtccacaccgtctgtgacccactctttgaagctgttgggaaaatattcagcaatgtccgcatcaacttgcagaaagaaatataaatgacatttcaaggatagaagtatacctgattttttttccttttaattttcctggtgccaatttcaagttccaagttgctaatacagcaacaatttatgaattgaattatcttggttgaaaataaaaagatcactttctcagttttcataagtattatgtctcttctgagctatttcatctatttttggcagtctgaatttttaaaacccatttaaatttttttccttacctttttatttgcatgtggatcaaccatcgctttattggctgagatatgaacatattgttgaaaggtaatttgagagaaatatgaagaactgaggaggaaaaaaaaaaaaagaaaagaaccaacaacctcaactgcctactccaaaatgttggtcattttatgttaagggaagaattccagggtatggccatggagtgtacaagtatgtgggcagattttcagcaaactcttttcccactgtttaaggagttagtggattactgccattcacttcataatccagtaggatccagtgatccttacaagttagaaaacataatcttctgccttctcatgatccaactaatgccttactcttcttgaaattttaacctatgatattttctgtgcctgaatatttgttatgtagataacaagacctcagtgccttcctgtttttcacattttccttttcaaatagggtctaactcagcaactcgctttaggtcagcagcctccctgaagaccaaaattagaatatccatgacctagttttccatgcgtgtttctgactctgagctacagagtctggtgaagctcacttctgggcttcatctggcaacatctttatccgtagtgggtatggttgacactagcccaatgaaatgaattaaagtggaccaatagggctgagctctctgtgggctggcagtcctggaagccagctttccctgcctctcatcaactgaatgaggtcagcatgtctattcagcttcgtttattttcaagaataatcacgctttcctgaatccaaactaatccatcaccggggtggtttagtggctcaacattgtgttcccatttcagctgatcagtgggcctccaaggaggggctgtaaaatggaggccattgtgtgagcctatcagagttgctgcaaacctgacccctgctcagtaaagcacttgcaaccgtctgttatgctgtgacacatggcccctccccctgccaggagctttggacctaatccaagcatccctttgcccagaaagaagatgggggaggaggcagtaataaaaagattgaagtattttgctggaataagttcaaattcttctgaactcaaactgaggaatttcacctgtaaacctgagtcgtacagaaagctgcctggtatatccaaaagctttttattcctcctgctcatattgtgattctgcctttggggacttttcttaaaccttcagttatgatttttttttcatacacttattggaactctgcttgatttttgcctcttccagtcttcctgacactttaattaccaacctgttacctactttgactttttgcatttaaaacagacactggcatggatatagttttacttttaaactgtgtacataactgaaaatgtgctatactgcatactttttaaatgtaaagatatttttatctttatatgaagaaaatcacttaggaaatggctttgtgattcaatctgtaaactgtgtattccaagacatgtctgttctacatagatgcttagtccctcatgcaaatcaattactggtccaaaagattgctgaaattttatatgcttactgatatattttacaattttttatcatgcatgtcctgtaaaggttacaagcctgcacaataaaaatgtttaacgggttaaa

SEQ ID NO: 312852 - DNA, 598 bp, Homo sapiens
ctctgcgagatcctcttaaaaagctggctacgcgcaggcggtttctgtgcacggagccgtagctgtcggagcggttagttcgatttcgagctcgaggtttcccccgccgccaggctgacttctcatcgcttgtttttctttttgcatttttcctcccaccgccgttgccgccctccccgtcctggccgtccgccctccgccctctgcagggacatctctacaccgttcccatccgggaacagggcaacatctacaagcccaacaacaaggccatggcagacgagctgagcgagaagcaagtgtacgacgcgcacaccaaggagatcgacctggtcaaccgcgaccctaaacacctcaacgatgacgtggtcaagattgactttgaagatgtgattgcagaaccagaagggacacacagttttgacggcatttggaaggccagcttcaccaccttcacgtgttggaccgaaaatttactgtgggagttttataccccggctttggctggtctggccctcttgtggcatcccgatgggcacttcattcctgggggggccattttaacgttccgacccatttcttcttcttttcctgggca

SEQ ID NO: 312853 - DNA, 2608 bp, Homo sapiens
ctctgcgagatcctcttaaaaagctggctacgcgcaggcggtttctgtgcacggagccgtagctgtcggagcggttagttcgatttcgagctcgaggtttcccccgccgccaggctgacttctcatcgcttgtttttctttttgcatttttcctcccaccgccgttgccgccctccccgtcctggccgtccgccctccgccctctgcagggacatctctacaccgttcccatccgggaacagggcaacatctacaagcccaacaacaaggccatggcagacgagctgagcgagaagcaagtgtacgacgcgcacaccaaggagatcgacctggtcaaccgcgaccctaaacacctcaacgatgacgtggtcaagattgactttgaagatgtgattgcagaaccagaagggacacacagttttgacggcatttggaaggccagcttcaccaccttcactgtgacgaaatactggttttaccgcttgctgtctgccctctttggcatcccgatggcactcatctggggcatttacttcgccattctctctttcctgcacatctgggcagttgtaccatgcattaagagcttcctgattgagattcagtgcatcagccgtgtctattccatctacgtccacaccgtctgtgacccactctttgaagctgttgggaaaatattcagcaatgtccgcatcaacttgcagaaagaaatataaatgacatttcaaggatagaagtatacctgattttttttccttttaattttcctggtgccaatttcaagttccaagttgctaatacagcaacaatttatgaattgaattatcttggttgaaaataaaaagatcactttctcagttttcataagtattatgtctcttctgagctatttcatctatttttggcagtctgaatttttaaaacccatttaaatttttttccttacctttttatttgcatgtggatcaaccatcgctttattggctgagatatgaacatattgttgaaaggtaatttgagagaaatatgaagaactgaggaggaaaaaaaaaaaaagaaaagaaccaacaacctcaactgcctactccaaaatgttggtcattttatgttaagggaagaattccagggtatggccatggagtgtacaagtatgtgggcagattttcagcaaactcttttcccactgtttaaggagttagtggattactgccattcacttcataatccagtaggatccagtgatccttacaagttagaaaacataatcttctgccttctcatgatccaactaatgccttactcttcttgaaattttaacctatgatattttctgtgcctgaatatttgttatgtagataacaagacctcagtgccttcctgtttttcacattttccttttcaaatagggtctaactcagcaactcgctttaggtcagcagcctccctgaagaccaaaattagaatatccatgacctagttttccatgcgtgtttctgactctgagctacagagtctggtgaagctcacttctgggcttcatctggcaacatctttatccgtagtgggtatggttgacactagcccaatgaaatgaattaaagtggaccaatagggctgagctctctgtgggctggcagtcctggaagccagctttccctgcctctcatcaactgaatgaggtcagcatgtctattcagcttcgtttattttcaagaataatcacgctttcctgaatccaaactaatccatcaccggggtggtttagtggctcaacattgtgttcccatttcagctgatcagtgggcctccaaggaggggctgtaaaatggaggccattgtgtgagcctatcagagttgctgcaaacctgacccctgctcagtaaagcacttgcaaccgtctgttatgctgtgacacatggcccctccccctgccaggagctttggacctaatccaagcatccctttgcccagaaagaagatgggggaggaggcagtaataaaaagattgaagtattttgctggaataagttcaaattcttctgaactcaaactgaggaatttcacctgtaaacctgagtcgtacagaaagctgcctggtatatccaaaagctttttattcctcctgctcatattgtgattctgcctttggggacttttcttaaaccttcagttatgatttttttttcatacacttattggaactctgcttgatttttgcctcttccagtcttcctgacactttaattaccaacctgttacctactttgactttttgcatttaaaacagacactggcatggatatagttttacttttaaactgtgtacataactgaaaatgtgctatactgcatactttttaaatgtaaagatatttttatctttatatgaagaaaatcacttaggaaatggctttgtgattcaatctgtaaactgtgtattccaagacatgtctgttctacatagatgcttagtccctcatgcaaatcaattactggtccaaaagattgctgaaattttatatgcttactgatatattttacaattttttatcatgcatgtcctgtaaaggttacaagcctgcacaataaaaatgtttaacgggttaaa

SEQ ID NO: 312854 - DNA, 3232 bp, Homo sapiens
  misc_feature (3232)..(3232): n is a, c, g, or t
gggagaaacgttctcactcgctctctgctcgctgcgggcgctccccgccctctgctgccagaaccttggggatgtgcctagacccggcgcagcacacgtccgggccaaccgcgagcagaacaaacctttggcgggcggccaggaggctccctcccagccaccgcccccctccagcgcctttttttccccccatacaatacaagatcttccttcctcagttcccttaaagcacagcccagggaaacctcctcacagttttcatccagccacgggccagcatgtctgggggcaaatacgtagactcggagggacatctctacaccgttcccatccgggaacagggcaacatctacaagcccaacaacaaggccatggcagacgagctgagcgagaagcaagtgtacgacgcgcacaccaaggagatcgacctggtcaaccgcgaccctaaacacctcaacgatgacgtggtcaagattgactttgaagatgtgattgcagaaccagaagggacacacagttttgacggcatttggaaggccagcttcaccaccttcactgtgacgaaatactggttttaccgcttgctgtctgccctctttggcatcccgatggcactcatctggggcatttacttcgccattctctctttcctgcacatctgggcagttgtaccatgcattaagagcttcctgattgagattcagtgcatcagccgtgtctattccatctacgtccacaccgtctgtgacccactctttgaagctgttgggaaaatattcagcaatgtccgcatcaacttgcagaaagaaatataaatgacatttcaaggatagaagtatacctgattttttttccttttaattttcctggtgccaatttcaagttccaagttgctaatacagcaacaatttatgaattgaattatcttggttgaaaataaaaagatcactttctcagttttcataagtattatgtctcttctgagctatttcatctatttttggcagtctgaatttttaaaacccatttaaatttttttccttacctttttatttgcatgtggatcaaccatcgctttattggctgagatatgaacatattgttgaaaggtaatttgagagaaatatgaagaactgaggaggaaaaaaaaaaaaagaaaagaaccaacaacctcaactgcctactccaaaatgttggtcattttatgttaagggaagaattccagggtatggccatggagtgtacaagtatgtgggcagattttcagcaaactcttttcccactgtttaaggagttagtggattactgccattcacttcataatccagtaggatccagtgatccttacaagttagaaaacataatcttctgccttctcatgatccaactaatgccttactcttcttgaaattttaacctatgatattttctgtgcctgaatatttgttatgtagataacaagacctcagtgccttcctgtttttcacattttccttttcaaatagggtctaactcagcaactcgctttaggtcagcagcctccctgaagaccaaaattagaatatccatgacctagttttccatgcgtgtttctgactctgagctacagagtctggtgaagctcacttctgggcttcatctggcaacatctttatccgtagtgggtatggttgacactagcccaatgaaatgaattaaagtggaccaatagggctgagctctctgtgggctggcagtcctggaagccagctttccctgcctctcatcaactgaatgaggtcagcatgtctattcagcttcgtttattttcaagaataatcacgctttcctgaatccaaactaatccatcaccggggtggtttagtggctcaacattgtgttcccatttcagctgatcagtgggcctccaaggaggggctgtaaaatggaggccattgtgtgagcctatcagagttgctgcaaacctgacccctgctcagtaaagcacttgcaaccgtctgttatgctgtgacacatggcccctccccctgccaggagctttggacctaatccaagcatccctttgcccagaaagaagatgggggaggaggcagtaataaaaagattgaagtattttgctggaataagttcaaattcttctgaactcaaactgaggaatttcacctgtaaacctgagtcgtacagaaagctgcctggtatatccaaaagctttttattcctcctgctcatattgtgattctgcctttggggacttttcttaaaccttcagttatgatttttttttcatacacttattggaactctgcttgatttttgcctcttccagtcttcctgacactttaattaccaacctgttacctactttgactttttgcatttaaaacagacactggcatggatatagttttacttttaaactgtgtacataactgaaaatgtgctatactgcatactttttaaatgtaaagatatttttatctttatatgaagaaaatcacttaggaaatggctttgtgattcaatctgtaaactgtgtattccaagacatgtctgttctacatagatgcttagtccctcatgcaaatcaattactggtccaaaagattgctgaaattttatatgcttactgatatattttacaattttttatcatgcatgtcctgtaaaggttacaagcctgcacaataaaaatgtttaacgggttaaaaaaaaaaaaaaaaaaaaaaaaaaaaaaaaaaaaaaaaaaaaaaaaaaaaaaaaaaaaaaaaaaaaaaaaaaaaaaagggggggggcgccgaaaaaaataattccccggggggggccccaactttagcgctacgcaccccagtttttgttggacaaaaagagcggcccccaatatatggaaggctgattatataaagaaagccaaggcagcggcgcgttgttaaaccaaaagcgctcgagagggggaaaaaaacggcgatcgggtgacgacatctccttggtggaagaggcaccccccccttactggggggggaggagaaacatatggtggggcaaacacacctccactaccgagagaagattaattagcagcgcccagggaggggacataatactacaacctgtggacgagcgagtctaataggtgggtctaacaccccaccaccgcaacataattcgtcgccgcagtaaaaaaatgttgctcacacgaaacaaatagcttcaggaaacattttttacgcaggcn

SEQ ID NO: 312855 - DNA, 1882 bp, Homo sapiens
tggggccccccccccaaaaaatttttttctttaacaaaaaaagggtgtttcccccaaaaaaggtgttgctaatacagcaacaatttatgaattgaattatcttggttgaaaataaaaagatcactttctcagttttcataagtattatgtctcttctgagctatttcatctatttttggcagtctgaatttttaaaacccatttaaatttttttccttacctttttatttgcatgtggatcaaccatcgctttattggctgagatatgaacatattgttgaaaggtaatttgagagaaatatgaagaactgaggaggaaaaaaaaaaaaagaaaagaaccaacaacctcaactgcctactccaaaatgttggtcattttatgttaagggaagaattccagggtatggccatggagtgtacaagtatgtgggcagattttcagcaaactcttttcccactgtttaaggagttagtggattactgccattcacttcataatccagtaggatccagtgatccttacaagttagaaaacataatcttctgccttctcatgatccaactaatgccttactcttcttgaaattttaacctatgatattttctgtgcctgaatatttgttatgtagataacaagacctcagtgccttcctgtttttcacattttccttttcaaatagggtctaactcagcaactcgctttaggtcagcagcctccctgaagaccaaaattagaatatccatgacctagttttccatgcgtgtttctgactctgagctacagagtctggtgaagctcacttctgggcttcatctggcaacatctttatccgtagtgggtatggttgacactagcccaatgaaatgaattaaagtggaccaatagggctgagctctctgtgggctggcagtcctggaagccagctttccctgcctctcatcaactgaatgaggtcagcatgtctattcagcttcgtttattttcaagaataatcacgctttcctgaatccaaactaatccatcaccggggtggtttagtggctcaacattgtgttcccatttcagctgatcagtgggcctccaaggaggggctgtaaaatggaggccattgtgtgagcctatcagagttgctgcaaacctgacccctgctcagtaaagcacttgcaaccgtctgttatgctgtgacacatggcccctccccctgccaggagctttggacctaatccaagcatccctttgcccagaaagaagatgggggaggaggcagtaataaaaagattgaagtattttgctggaataagttcaaattcttctgaactcaaactgaggaatttcacctgtaaacctgagtcgtacagaaagctgcctggtatatccaaaagctttttattcctcctgctcatattgtgattctgcctttggggacttttcttaaaccttcagttatgatttttttttcatacacttattggaactctgcttgatttttgcctcttccagtcttcctgacactttaattaccaacctgttacctactttgactttttgcatttaaaacagacactggcatggatatagttttacttttaaactgtgtacataactgaaaatgtgctatactgcatactttttaaatgtaaagatatttttatctttatatgaagaaaatcacttaggaaatggctttgtgattcaatctgtaaactgtgtattccaagacatgtctgttctacatagatgcttagtccctcatgcaaatcaattactggtccaaaagattgctgaaattttatatgcttactgatatattttacaattttttatcatgcatgtcctgtaaaggttacaagcctgcacaataaaaatgtttaacgggttaaa

SEQ ID NO: 312856 - DNA, 2389 bp, Homo sapiens
gggagaaacgttctcactcgctctctgctcgctgcgggcgctccccgccctctgctgccagaaccttggggatgtgcctagacccggcgcagcacacgtccgggccaaccgcgagcagaacaaacctttggcgggcggccaggaggctccctcccagccaccgcccccctccagcgcctttttttccccccatacaatacaagatcttccttcctcagttcccttaaagcacagcccagggaaacctcctcacagttttcatccagccacgggccagcatgtctgggggcaaatacgtagactcggagggacatctctacaccgttcccatccgggaacagggcaacatctacaagcccaacaacaaggccatggcagacgagctgagcgagaagcaagtgtacgacgcgcacaccaaggagatcgacctggtcaaccgcgaccctaaacacctcaacgatgacgtggtcaagattgactttgaagatgtgattgcagaaccagaagggacacacagttttgacggcatttggaaggccagcttcaccaccttcactgtgacgaaatactggttttaccgcttgctgtctgccctctttggcatcccgatggcactcatctggggcatttacttcgccattctctctttcctgcacatctgggcagttgtaccatgcattaagagcttcctgattgagattcagtgcatcagccgtgtctattccatctacgtccacaccgtctgtgacccactctttgaagctgttgggaaaatattcagcaatgtccgcatcaacttgcagaaagaaatataaatgacatttcaaggatagaagtatacctgattttttttccttttaattttcctggtgccaatttcaagttccaagttgctaatacagcaacaatttatgaattgaattatcttggttgaaaataaaaagatcactttctcagttttcataagtattatgtctcttctgagctatttcatctatttttggcagtctgaatttttaaaacccatttaaatttttttccttacctttttatttgcatgtggatcaaccatcgctttattggctgagatatgaacatattgttgaaaggtaatttgagagaaatatgaagaactgaggaggaaaaaaaaaaaaagaaaagaaccaacaacctcaactgcctactccaaaatgttggtcattttatgttaagggaagaattccagggtatggccatggagtgtacaagtatgtgggcagattttcagcaaactcttttcccactgtttaaggagttagtggattactgccattcacttcataatccagtaggatccagtgatccttacaagttagaaaacataatcttctgccttctcatgatccaactaatgccttactcttcttgaaattttaacctatgatattttctgtgcctgaatatttgttatgtagataacaagacctcagtgccttcctgtttttcacattttccttttcaaatagggtctaactcagcaactcgctttaggtcagcagcctccctgaagaccaaaattagaatatccatgacctagttttccatgcgtgtttctgactctgagctacagagtctggtgaagctcacttctgggcttcatctggcaacatctttatccgtagtgggtatggttgacactagcccaatgaaatgaattaaagtggaccaatagggctgagctctctgtgggctggcagtcctggaagccagctttccctgcctctcatcaactgaatgaggtcagcatgtctattcagcttcgtttattttcaagaataatcacgctttcctgaatccaaactaatccatcaccggggtggtttagtggctcaacattgtgttcccatttcagctgatcagtgggcctccaaggaggggctgtaaaatggaggccattgtgtgagcctatcagagttgctgcaaacctgacccctgctcagtaaagcacttgcaaccgtctgttatgctgtgacacatggcccctccccctgccaggagctttggacctaatccaagcatccctttgcccagaaagaagatgggggaggaggcagtaataaaaagattgaagtattttgctggaataagttcaaattcttctgaactcaaactgaggaatttcacctgtaaacctgagtcgtacagaaagctgcctggtatatccaaaagctttttattcctcctgctcatattgtgattctgcctttggggacttttcttaaaccttcagttatgatttttttttcatataaagataaaaactatctttacatctataaagtatgcagtatagcacagttttcgagtgatgtacacagtttaaaacgtaaaactatatccatgccagtgt

SEQ ID NO: 312857 - DNA, 2304 bp, Homo sapiens
  misc_feature (2284)..(2284): n is a, c, g, or t
gggagaaacgttctcactcgctctctgctcgctgcgggcgctccccgccctctgctgccagaaccttggggatgtgcctagacccggcgcagcacacgtccgggccaaccgcgagcagaacaaacctttggcgggcggccaggaggctccctcccagccaccgcccccctccagcgcctttttttccccccatacaatacaagatcttccttcctcagttcccttaaagcacagcccagggaaacctcctcacagttttcatccagccacgggccagcatgtctgggggcaaatacgtagactcggagggacatctctacaccgttcccatccgggaacagggcaacatctacaagcccaacaacaaggccatggcagacgagctgagcgagaagcaagtgtacgacgcgcacaccaaggagatcgacctggtcaaccgcgaccctaaacacctcaacgatgacgtggtcaagattgactttgaagatgtgattgcagaaccagaagggacacacagttttgacggcatttggaaggccagcttcaccaccttcactgtgacgaaatactggttttaccgcttgctgtctgccctctttggcatcccgatggcactcatctggggcatttacttcgccattctctctttcctgcacatctgggcagttgtaccatgcattaagagcttcctgattgagattcagtgcatcagccgtgtctattccatctacgtccacaccgtctgtgacccactctttgaagctgttgggaaaatattcagcaatgtccgcatcaacttgcagaaagaaatataaatgacatttcaaggatagaagtatacctgattttttttccttttaattttcctggtgccaatttcaagttccaagttgctaatacagcaacaatttatgaattgaattatcttggttgaaaataaaaagatcactttctcagttttcataagtattatgtctcttctgagctatttcatctatttttggcagtctgaatttttaaaacccatttaaatttttttccttacctttttatttgcatgtggatcaaccatcgctttattggctgagatatgaacatattgttgaaaggtaatttgagagaaatatgaagaactgaggaggaaaaaaaaaaaaagaaaagaaccaacaacctcaactgcctactccaaaatgttggtcattttatgttaagggaagaattccagggtatggccatggagtgtacaagtatgtgggcagattttcagcaaactcttttcccactgtttaaggagttagtggattactgccattcacttcataatccagtaggatccagtgatccttacaagttagaaaacataatcttctgccttctcatgatccaactaatgccttactcttcttgaaattttaacctatgatattttctgtgcctgaatatttgttatgtagataacaagacctcagtgccttcctgtttttcacattttccttttcaaatagggtctaactcagcaactcgctttaggtcagcagcctccctgaagaccaaaattagaatatccatgacctagttttccatgcgtgtttctgactctgagctacagagtctggtgaagctcacttctgggcttcatctggcaacatctttatccgtagtgggtatggttgacactagcccaatgaaatgaattaaagtggaccaatagggctgagctctctgtgggctggcagtcctggaagccagctttccctgcctctcatcaactgaatgaggtcagcatgtctattcagcttcgtttattttcaagaataatcacgctttcctgaatccaaactaatccatcaccggggtggtttagtggctcaacattgtgttcccatttcagctgatcagtgggcctccaaggaggggctgtaaaatggaggccattgtgtgagcctatcagagttgctgcaaacctgacccctgctcagtaaagcacttgcaaccgtctgttatgctgtgacacatggcccctccccctgccaggagctttggacctaatccaagcatccctttgcccagaaagaagatgggggaggaggcagtaataaaaagattgaagtattttgctggaataagttcaaattcttctgaactcaaactgaggaatttcacctgtaaacctgagtcgtacagaaagctgcctggtatatccaaaagctttttattcctcctgctcatattgtgattctgcctttgggtcagcgggttgcattgggccaggcggtgccattgngccagcgggggggatcctct

SEQ ID NO: 312858 - DNA, 959 bp, Homo sapiens
gggagaaacgttctcactcgctctctgctcgctgcgggcgctccccgccctctgctgccagaaccttggggatgtgcctagacccggcgcagcacacgtccgggccaaccgcgagcagaacaaacctttggcgggcggccaggaggctccctcccagccaccgcccccctccagcgcctttttttccccccatacaatacaagatcttccttcctcagttcccttaaagcacagcccagggaaacctcctcacagttttcatccagccacgggccagcatgtctgggggcaaatacgtagactcggagggacatctctacaccgttcccatccgggaacagggcaacatctacaagcccaacaacaaggccatggcagacgagctgagcgagaagcaagtgtacgacgcgcacaccaaggagatcgacctggtcaaccgcgaccctaaacacctcaacgatgacgtggtcaagattgactttgaagatgtgattgcagaaccagaagggacacacagttttgacggcatttggaaggccagcttcaccaccttcactgtgacgaaatactggttttaccgcttgctgtctgccctctttggcatcccgatggcactcatctggggcatttacttcgccattctctctttcctgcacatctgggcagttgtaccatgcattaagagcttcctgattgagattcagtgcatcagccgtgtctattccatctacgtccacaccgtctgtgacccactctttgaagctgttgggaaaatattcagcaatgtccgcatcaacttgcagaaagaaatataaatgacatttcaaggatagaagtatacctgattttttttccttttaattttcctggtgccaatttcaagttccaagttgctaatacagcaacaatttatgaattgaattatcttggttgaaaataaaaagatcactttctcagtt

SEQ ID NO: 312859 - DNA, 860 bp, Homo sapiens
ctctgcgagatcctcttaaaaagctggctacgcgcaggcggtttctgtgcacggagccgtagctgtcggagcggttagttcgatttcgagctcgaggtttcccccgccgccaggctgacttctcatcgcttgtttttctttttgcatttttcctcccaccgccgttgccgccctccccgtcctggccgtccgccctccgccctctgcagggacatctctacaccgttcccatccgggaacagggcaacatctacaagcccaacaacaaggccatggcagacgagctgagcgagaagcaagtgtacgacgcgcacaccaaggagatcgacctggtcaaccgcgaccctaaacacctcaacgatgacgtggtcaagattgactttgaagatgtgattgcagaaccagaagggacacacagttttgacggcatttggaaggccagcttcaccaccttcactgtgacgaaatactggttttaccgcttgctgtctgccctctttggcatcccgatggcactcatctggggcatttacttcgccattctctctttcctgcacatctgggcagttgtaccatgcattaagagcttcctgattgagattcagtgcatcagccgtgtctattccatctacgtccacaccgtctgtgacccactctttgaagctgttgggaaaatattcagcaatgtccgcatcaacttgcagaaagaaatataaatgacatttcaaggatagaagtatacctgattttttttccttttaattttcctggtgccaatttcaagttccaagttgctaatacagcaacaatttatgaattgaattatcttggttgaaaataaaaagatcactttctcagtt

SEQ ID NO: 312860 - DNA, 3420 bp, Homo sapiens
gggagaaacgttctcactcgctctctgctcgctgcgggcgctccccgccctctgctgccagaaccttggggatgtgcctagacccggcgcagcacacgtccgggccaaccgcgagcagaacaaacctttggcgggcggccaggaggctccctcccagccaccgcccccctccagcgcctttttttccccccatacaatacaagatcttccttcctcagttcccttaaagcacagcccagggaaacctcctcacagttttcatccagccacgggccagcatgtctgggggcaaatacgtagactcggaggtaggcatccgtgggggggcgccggctcgggcgtgcggggagtgtccgcttctgctatctgcctctccaaatatcccgactgctgccctggccccagccctctctccacttcggagcactcctctggcgttggcaccgctgaggaatgggcctgggcggggaggtgaagagaagccaggaatgttttatgttttcctaatggagagggggcctcgggagcccctgagctaggaggacacggaaaaggggattggggtcctgagattgggtctgttgggcccaggacgcgttttctggatgggtctaggatgctcccctgtcgcgggacccccgcggtccggccctgcctgctgggggttcgaagaggtggagtgcagggtggaggtgttatttacccgagtcctggggacagtccccgggactctccgccaggcgcccagaccggcaggtcccgcaggcggcgcgcggtgtgtttgcactttccaaagttcttgaaccatctcaagaactccttctgcatcttggcgtctggcaggggtgttccgagagaggtagacctcccctccccaaactgccaccatcacttccaacgccctccacgcgctggagctctgcccgggtgtggaaacctcgtcttccaacacgtagctgcccttcagccacccgcccgcagcctgggagtgccctgagggtgggtcgggggagctgcgcagggacatctctacaccgttcccatccgggaacagggcaacatctacaagcccaacaacaaggccatggcagacgagctgagcgagaagcaagtgtacgacgcgcacaccaaggagatcgacctggtcaaccgcgaccctaaacacctcaacgatgacgtggtcaagattgactttgaagatgtgattgcagaaccagaagggacacacagttttgacggcatttggaaggccagcttcaccaccttcactgtgacgaaatactggttttaccgcttgctgtctgccctctttggcatcccgatggcactcatctggggcatttacttcgccattctctctttcctgcacatctgggcagttgtaccatgcattaagagcttcctgattgagattcagtgcatcagccgtgtctattccatctacgtccacaccgtctgtgacccactctttgaagctgttgggaaaatattcagcaatgtccgcatcaacttgcagaaagaaatataaatgacatttcaaggatagaagtatacctgattttttttccttttaattttcctggtgccaatttcaagttccaagttgctaatacagcaacaatttatgaattgaattatcttggttgaaaataaaaagatcactttctcagttttcataagtattatgtctcttctgagctatttcatctatttttggcagtctgaatttttaaaacccatttaaatttttttccttacctttttatttgcatgtggatcaaccatcgctttattggctgagatatgaacatattgttgaaaggtaatttgagagaaatatgaagaactgaggaggaaaaaaaaaaaaagaaaagaaccaacaacctcaactgcctactccaaaatgttggtcattttatgttaagggaagaattccagggtatggccatggagtgtacaagtatgtgggcagattttcagcaaactcttttcccactgtttaaggagttagtggattactgccattcacttcataatccagtaggatccagtgatccttacaagttagaaaacataatcttctgccttctcatgatccaactaatgccttactcttcttgaaattttaacctatgatattttctgtgcctgaatatttgttatgtagataacaagacctcagtgccttcctgtttttcacattttccttttcaaatagggtctaactcagcaactcgctttaggtcagcagcctccctgaagaccaaaattagaatatccatgacctagttttccatgcgtgtttctgactctgagctacagagtctggtgaagctcacttctgggcttcatctggcaacatctttatccgtagtgggtatggttgacactagcccaatgaaatgaattaaagtggaccaatagggctgagctctctgtgggctggcagtcctggaagccagctttccctgcctctcatcaactgaatgaggtcagcatgtctattcagcttcgtttattttcaagaataatcacgctttcctgaatccaaactaatccatcaccggggtggtttagtggctcaacattgtgttcccatttcagctgatcagtgggcctccaaggaggggctgtaaaatggaggccattgtgtgagcctatcagagttgctgcaaacctgacccctgctcagtaaagcacttgcaaccgtctgttatgctgtgacacatggcccctccccctgccaggagctttggacctaatccaagcatccctttgcccagaaagaagatgggggaggaggcagtaataaaaagattgaagtattttgctggaataagttcaaattcttctgaactcaaactgaggaatttcacctgtaaacctgagtcgtacagaaagctgcctggtatatccaaaagctttttattcctcctgctcatattgtgattctgcctttggggacttttcttaaaccttcagttatgatttttttttcatacacttattggaactctgcttgatttttgcctcttccagtcttcctgacactttaattaccaacctgttacctactttgactttttgcatttaaaacagacactggcatggatatagttttacttttaaactgtgtacataactgaaaatgtgctatactgcatactttttaaatgtaaagatatttttatctttatatgaagaaaatcacttaggaaatggctttgtgattcaatctgtaaactgtgtattccaagacatgtctgttctacatagatgcttagtccctcatgcaaatcaattactggtccaaaagattgctgaaattttatatgcttactgatatattttacaattttttatcatgcatgtcctgtaaaggttacaagcctgcacaataaaaatgtttaacgggttaaa

SEQ ID NO: 312861 - DNA, 2875 bp, Homo sapiens
gggagaaacgttctcactcgctctctgctcgctgcgggcgctccccgccctctgctgccagaaccttggggatgtgcctagacccggcgcagcacacgtccgggccaaccgcgagcagaacaaacctttggcgggcggccaggaggctccctcccagccaccgcccccctccagcgcctttttttccccccatacaatacaagatcttccttcctcagttcccttaaagcacagcccagggaaacctcctcacagttttcatccagccacgggccagcatgtctgggggcaaatacgtagactcggagggacatctctacaccgttcccatccgggaacagggcaacatctacaagcccaacaacaaggccatggcagacgagctgagcgagaagcaagtgtacgacgcgcacaccaaggagatcgacctggtcaaccgcgaccctaaacacctcaacgatgacgtggtcaagattgactttgaagatgtgattgcagaaccagaagggacacacagttttgacggcatttggaaggccagcttcaccaccttcactgtgacgaaatactggttttaccgcttgctgtctgccctctttggcatcccgatggcactcatctggggcatttacttcgccattctctctttcctgcacatctgggcagttgtaccatgcattaagagcttcctgattgagattcagtgcatcagccgtgtctattccatctacgtccacaccgtctgtgacccactctttgaagctgttgggaaaatattcagcaatgtccgcatcaacttgcagaaagaaatataaatgacatttcaaggatagaagtatacctgattttttttccttttaattttcctggtgccaatttcaagttccaagttgctaatacagcaacaatttatgaattgaattatcttggttgaaaataaaaagatcactttctcagttttcataagtattatgtctcttctgagctatttcatctatttttggcagtctgaatttttaaaacccatttaaatttttttccttacctttttatttgcatgtggatcaaccatcgctttattggctgagatatgaacatattgttgaaaggtaatttgagagaaatatgaagaactgaggaggaaaaaaaaaaaaagaaaagaaccaacaacctcaactgcctactccaaaatgttggtcattttatgttaagggaagaattccagggtatggccatggagtgtacaagtatgtgggcagattttcagcaaactcttttcccactgtttaaggagttagtggattactgccattcacttcataatccagtaggatccagtgatccttacaagttagaaaacataatcttctgccttctcatgatccaactaatgccttactcttcttgaaattttaacctatgatattttctgtgcctgaatatttgttatgtagataacaagacctcagtgccttcctgtttttcacattttccttttcaaatagggtctaactcagcaactcgctttaggtcagcagcctccctgaagaccaaaattagaatatccatgacctagttttccatgcgtgtttctgactctgagctacagagtctggtgaagctcacttctgggcttcatctggcaacatctttatccgtagtgggtatggttgacactagcccaatgaaatgaattaaagtggaccaatagggctgagctctctgtgggctggcagtcctggaagccagctttccctgcctctcatcaactgaatgaggtcagcatgtctattcagcttcgtttattttcaagaataatcacgctttcctgaatccaaactaatccatcaccggggtggtttagtggctcaacattgtgttcccatttcagctgatcagtgggcctccaaggaggggctgtaaaatggaggccattgtgtgagcctatcagagttgctgcaaacctgacccctgctcagtaaagcacttgcaaccgtctgttatgctgtgacacatggcccctccccctgccaggagctttggacctaatccaagcatccctttgcccagaaagaagatgggggaggaggcagtaataaaaagattgaagtattttgctggaataagttcaaattcttctgaactcaaactgaggaatttcacctgtaaacctgagtcgtacagaaagctgcctggtatatccaaaagctttttattcctcctgctcatattgtgattctgcctttggggacttttcttaaaccttcagttatgatttttttttcatacacttattggaactctgcttgatttttgcctcttccagtcttcctgacactttaattaccaacctgttacctactttgactttttgcatttaaaacagacactggcatggatatagttttacttttaaactgtgtacataactgaaaatgtgctatactgcatactttttaaatgtaaagatatttttatctttatatgaagaaaatcacttaggaaatggctttgtgattcaatctgtaaactgtgtattccaagacatgtctgttctacatagatgcttagtccctcatgcaaatcaattactggtccaaaagattgctgaaattttatatgcttactgatatattttacaattttttatcatgcatgtcctgtaaaggttacaagcctgcacaataaaaatgtttaacgggttaaaaaaaacacgcagagacgaagacaagacatgaagaggacacaggccaacgagaagcggaacacacaacaaaggagggggggcatataatatccggaggcgcaaaatgaaacccaataatagagagggcccacagaggggaataaacaagagggcgcgaaaaggtgggaa

SEQ ID NO: 312862 - DNA, 2689 bp, Homo sapiens
gggagaaacgttctcactcgctctctgctcgctgcgggcgctccccgccctctgctgccagaaccttggggatgtgcctagacccggcgcagcacacgtccgggccaaccgcgagcagaacaaacctttggcgggcggccaggaggctccctcccagccaccgcccccctccagcgcctttttttccccccatacaatacaagatcttccttcctcagttcccttaaagcacagcccagggaaacctcctcacagttttcatccagccacgggccagcatgtctgggggcaaatacgtagactcggagggacatctctacaccgttcccatccgggaacagggcaacatctacaagcccaacaacaaggccatggcagacgagctgagcgagaagcaagtgtacgacgcgcacaccaaggagatcgacctggtcaaccgcgaccctaaacacctcaacgatgacgtggtcaagattgactttgaagatgtgattgcagaaccagaagggacacacagttttgacggcatttggaaggccagcttcaccaccttcactgtgacgaaatactggttttaccgcttgctgtctgccctctttggcatcccgatggcactcatctggggcatttacttcgccattctctctttcctgcacatctgggcagttgtaccatgcattaagagcttcctgattgagattcagtgcatcagccgtgtctattccatctacgtccacaccgtctgtgacccactctttgaagctgttgggaaaatattcagcaatgtccgcatcaacttgcagaaagaaatataaatgacatttcaaggatagaagtatacctgattttttttccttttaattttcctggtgccaatttcaagttccaagttgctaatacagcaacaatttatgaattgaattatcttggttgaaaataaaaagatcactttctcagttttcataagtattatgtctcttctgagctatttcatctatttttggcagtctgaatttttaaaacccatttaaatttttttccttacctttttatttgcatgtggatcaaccatcgctttattggctgagatatgaacatattgttgaaaggtaatttgagagaaatatgaagaactgaggaggaaaaaaaaaaaaagaaaagaaccaacaacctcaactgcctactccaaaatgttggtcattttatgttaagggaagaattccagggtatggccatggagtgtacaagtatgtgggcagattttcagcaaactcttttcccactgtttaaggagttagtggattactgccattcacttcataatccagtaggatccagtgatccttacaagttagaaaacataatcttctgccttctcatgatccaactaatgccttactcttcttgaaattttaacctatgatattttctgtgcctgaatatttgttatgtagataacaagacctcagtgccttcctgtttttcacattttccttttcaaatagggtctaactcagcaactcgctttaggtcagcagcctccctgaagaccaaaattagaatatccatgacctagttttccatgcgtgtttctgactctgagctacagagtctggtgaagctcacttctgggcttcatctggcaacatctttatccgtagtgggtatggttgacactagcccaatgaaatgaattaaagtggaccaatagggctgagctctctgtgggctggcagtcctggaagccagctttccctgcctctcatcaactgaatgaggtcagcatgtctattcagcttcgtttattttcaagaataatcacgctttcctgaatccaaactaatccatcaccggggtggtttagtggctcaacattgtgttcccatttcagctgatcagtgggcctccaaggaggggctgtaaaatggaggccattgtgtgagcctatcagagttgctgcaaacctgacccctgctcagtaaagcacttgcaaccgtctgttatgctgtgacacatggcccctccccctgccaggagctttggacctaatccaagcatccctttgcccagaaagaagatgggggaggaggcagtaataaaaagattgaagtattttgctggaataagttcaaattcttctgaactcaaactgaggaatttcacctgtaaacctgagtcgtacagaaagctgcctggtatatccaaaagctttttattcctcctgctcatattgtgattctgcctttggggacttttcttaaaccttcagttatgatttttttttcatacacttattggaactctgcttgatttttgcctcttccagtcttcctgacactttaattaccaacctgttacctactttgactttttgcatttaaaacagacactggcatggatatagttttacttttaaactgtgtacataactgaaaatgtgctatactgcatactttttaaatgtaaagatatttttatctttatatgaagaaaatcacttaggaaatggctttgtgattcaatctgtaaactgtgtattccaagacatgtctgttctacatagatgcttagtccctcatgcaaatcaattactggtccaaaagattgctgaaattttttttttaaccgttaaacatttttattgtgcaggcttgtaacctttacaggacatgcatgataaaaaatttta

SEQ ID NO: 312863 - DNA, 2152 bp, Homo sapiens
tactattatatataaaccccccctgataaaatattgtgtcctaatatataacttccccatgagccaaactgtttctcacggcgcccccgcacatattgcccgcttctggtatgataccaccactaataaaccctcctcgaaatgtttaatatatttatcctcttagtgagccttcttaatatattctctataggggaggtttgttcaccaacaatgtgccacccccaccgactgagtatagtggttccccttcaccaccaggtgtcccaccggttagacaccgttttcgcccgcctccagccgccttgttgttaccccccgcgcccccggtctcctctcgtctttattatattagaccgtccctcatctatgtgggcgcccccttttaccaccaaacggctgcggtcgccgcgcgttaacgtcggggccccctcaggggtgatttttgcgccccccccctttttttttttttttttttttttttttttttctttttatttgcatgtggatcaaccatcgctttattggctgagatatgaacatattgttgaaaggtaatttgagagaaatatgaagaactgaggaggaaaaaaaaaaaaagaaaagaaccaacaacctcaactgcctactccaaaatgttggtcattttatgttaagggaagaattccagggtatggccatggagtgtacaagtatgtgggcagattttcagcaaactcttttcccactgtttaaggagttagtggattactgccattcacttcataatccagtaggatccagtgatccttacaagttagaaaacataatcttctgccttctcatgatccaactaatgccttactcttcttgaaattttaacctatgatattttctgtgcctgaatatttgttatgtagataacaagacctcagtgccttcctgtttttcacattttccttttcaaatagggtctaactcagcaactcgctttaggtcagcagcctccctgaagaccaaaattagaatatccatgacctagttttccatgcgtgtttctgactctgagctacagagtctggtgaagctcacttctgggcttcatctggcaacatctttatccgtagtgggtatggttgacactagcccaatgaaatgaattaaagtggaccaatagggctgagctctctgtgggctggcagtcctggaagccagctttccctgcctctcatcaactgaatgaggtcagcatgtctattcagcttcgtttattttcaagaataatcacgctttcctgaatccaaactaatccatcaccggggtggtttagtggctcaacattgtgttcccatttcagctgatcagtgggcctccaaggaggggctgtaaaatggaggccattgtgtgagcctatcagagttgctgcaaacctgacccctgctcagtaaagcacttgcaaccgtctgttatgctgtgacacatggcccctccccctgccaggagctttggacctaatccaagcatccctttgcccagaaagaagatgggggaggaggcagtaataaaaagattgaagtattttgctggaataagttcaaattcttctgaactcaaactgaggaatttcacctgtaaacctgagtcgtacagaaagctgcctggtatatccaaaagctttttattcctcctgctcatattgtgattctgcctttggggacttttcttaaaccttcagttatgatttttttttcatacacttattggaactctgcttgatttttgcctcttccagtcttcctgacactttaattaccaacctgttacctactttgactttttgcatttaaaacagacactggcatggatatagttttacttttaaactgtgtacataactgaaaatgtgctatactgcatactttttaaatgtaaagatatttttatctttatatgaagaaaatcacttaggaaatggctttgtgattcaatctgtaaactgtgtattccaagacatgtctgttctacatagatgcttagtccctcatgcaaatcaattactggtccaaaagattgctgaaattttatatgcttactgatatattttacaattttttatcatgcatgtcctgtaaaggttacaagcctgcacaataaaaatgtttaacgggttaaa

SEQ ID NO: 312864 - DNA, 535 bp, Homo sapiens
  misc_feature (480)..(480): n is a, c, g, or t
  misc_feature (500)..(500): n is a, c, g, or t
gggagaaacgttctcactcgctctctgctcgctgcgggcgctccccgccctctgctgccagaaccttggggatgtgcctagacccggcgcagcacacgtccgggccaaccgcgagcagaacaaacctttggcgggcggccaggaggctccctcccagccaccgcccccctccagcgcctttttttccccccatacaatacaagatcttccttcctcagttcccttaaagcacagcccagggaaacctcctcacagttttcatccagccacgggccagcatgtctgggggcaaatacgtagactcggagggacatctctacaccgttcccatccgggaacagggcaacatctacaagcccaacaacaaggccatggcagacgagctgagcgagaagcaagtgtacgacgcgcacaccaaggagatcgacctggtcaaccgcgaccctaaacacctcaacgatgacgtggtcaagaatttgncttttgaagatgttgatttncagaacccagaaggggggcaacaaaagttttttgt

SEQ ID NO: 312865 - DNA, 2045 bp, Homo sapiens
tgtgtgctaaagtcaacagtcgcttggtttgagctcaaataaatgcggggatgcctcggctcggagcagtcggcctcctccctccgcgagctggacgctccgcagcccgcccgccagccggcccgccggccgccgcaggaatccctggataaagaccagctcaaccatcgctgagaaaacagacctaggcttcccagggcggttaacccgccggcctctgggcagagactacaaaacaaaataaaacaacaacaaaaaactcccagtgtgtttcctactcttctttgtcttggaggaaagcaaagggagagaaatggacttcaccagtggtctttggcttcatcaattcacaggaaatggcatcaagatggttcaactaagacatgatcactaaaaacattataataatacctttttgaaaaactcagtttctcctgtttactaaatatttatttcatcaacatgggctgcgttccactgtgtcaggattctgcatgtgggtggagcactgttccagcctgagaagatggttctgaggccacttagcaagacattttccagcatgagcaggtttctctgtggaaatagtgacacctgttctggtgtgttgtctttcctcagggaacttaaggggtacaaagctcctgaaaatgttctttatgctggttgaagctcttatgtcgctgtactgattccctacgatgcagatttgaatcacagagtaattaaaatatggatcaaataaggctggggctcaccaaggctgaaagctgtagccattcaaggcatcatttctgtcatgaaaatataggaccttttcaaaacatgccttcaggaaggtgttctcttttcaaacaaaagtctaatgactgcataactcttcttgaccacatcttacactttctctagacttgcttatttacagctactggaacaaaaagatgaaatgaataaagcacactgattgtcctaagagtcttctgtgactaaaagcacatgagcttctccccaggctgagctttgaccctcccaagcatttccccaaaggccatgacactgcatcagattgctcctggacactttcctcagagttttcaacaaatataaactgaggagtggagcacagcaccagatttgctaatcaagaggcaatggtcccagtccaaatgggtgctgtgtgtgaatacagagcccaggagaagggaaggaggtctgtgaacatcaggaattgcaaaatcttgctgaaccaatagaccaacagccattaacatttgtcaatgcaaagatcctaaaatatacaagtgtggagttgtcctgccctaagagctgaagctgtgacaatcacgctgccatggtagatatttaagctcccctgaggttactgaatctaacaatgaataaacaatgaagagtagctaatttttggaaatctctttctatgaccggaaaatattcacaaactcagagtgattgtttggggtgaaagatggtcccatgccttgtgggcctctctttgctatctatacaacgttggaaatgaacccctcccttacaggaaagtgaacagcaaccaaggtgagcccaccctgggagggcagagtgggtgtactttcctcgaagagccctgaacacaacagggcacacaaacagccacagcaccctcaacaatgccccaccatctgcccaccagggcacacagattcacgcagattcagtgacacattccaaaaaaagggaattaaggaggacccatggcatggctaatggggagagagctttactacttttagcaccattgctaattattggagcaaagaaaggcatacaaggaatggaacccaacctgtttaaagtaataaatgtcaaccctaaagtgcatggaaccatctctccttcccttttgaggactgtgtgcttcacaagctgggcgtttgctgcatggggttttctaatgtaatgtgaattttcaatgtgctttgtctctgtagagtggctttaaaaagcccttgaagtcctcagctttaaatccatgctaataggggaag

SEQ ID NO: 312866 - DNA, 1990 bp, Homo sapiens
tgtgtgctaaagtcaacagtcgcttggtttgagctcaaataaatgcggggatgcctcggctcggagcagtcggcctcctccctccgcgagctggacgctccgcagcccgcccgccagccggcccgccggccgccgcaggaatccctggataaagaccagctcaaccatcgctgagaaaacagacctaggcttcccagggcggttaacccgccggcctctgggcagagactacaaaacaaaataaaacaacaacaaaaaactcccagtgtgtttcctactcttctttgtcttggaggaaagcaaagggagagaaatggacttcaccagtggtctttggcttcatcaattcacaggaaatggcatcaagatggttcaactaagacatgatcactaaaaacattataataatacctttttgaaaaactcagtttctcctgtttactaaatatttatttcatcaacatgggctgcgttccactgtgtcaggattctgcatgtgggtggagcactgttccagcctgagaagatggttctgaggccacttagcaagacattttccagcatgagcaggtttctctgtggaaatagtgacacctgttctggtgtgttgtctttcctcagggaacttaaggggtacaaagctcctgaaaatgttctttatgctggttgaagctcttatgtcgctgtactgattccctacgatgcagatttgaatcacagagtaattaaaatatggatcaaataaggctggggctcaccaaggctgaaagctgtagccattcaaggcatcatttctgtcatgaaaatataggaccttttcaaaacatgccttcaggaaggtgttctcttttcaaacaaaagtctaatgactgcataactcttcttgaccacatcttacactttctctagacttgcttatttacagctactggaacaaaaagatgaaatgaataaagcacactgattgtcctaagagtcttctgtgactaaaagccatgacactgcatcagattgctcctggacactttcctcagagttttcaacaaatataaactgaggagtggagcacagcaccagatttgctaatcaagaggcaatggtcccagtccaaatgggtgctgtgtgtgaatacagagcccaggagaagggaaggaggtctgtgaacatcaggaattgcaaaatcttgctgaaccaatagaccaacagccattaacatttgtcaatgcaaagatcctaaaatatacaagtgtggagttgtcctgccctaagagctgaagctgtgacaatcacgctgccatggtagatatttaagctcccctgaggttactgaatctaacaatgaataaacaatgaagagtagctaatttttggaaatctctttctatgaccggaaaatattcacaaactcagagtgattgtttggggtgaaagatggtcccatgccttgtgggcctctctttgctatctatacaacgttggaaatgaacccctcccttacaggaaagtgaacagcaaccaaggtgagcccaccctgggagggcagagtgggtgtactttcctcgaagagccctgaacacaacagggcacacaaacagccacagcaccctcaacaatgccccaccatctgcccaccagggcacacagattcacgcagattcagtgacacattccaaaaaaagggaattaaggaggacccatggcatggctaatggggagagagctttactacttttagcaccattgctaattattggagcaaagaaaggcatacaaggaatggaacccaacctgtttaaagtaataaatgtcaaccctaaagtgcatggaaccatctctccttcccttttgaggactgtgtgcttcacaagctgggcgtttgctgcatggggttttctaatgtaatgtgaattttcaatgtgctttgtctctgtagagtggctttaaaaagcccttgaagtcctcagctttaaatccatgctaataggggaag

SEQ ID NO: 312867 - DNA, 3428 bp, Homo sapiens
ggccggatcagctgactcgcctggctctgagccccgccgccgcgctcgggctccgtcagtttcctcggcagcggtaggcgagagcacgcggaggagcgtgcgcgggggccccgggagacggcggcggtggcggcgcgggcagagcaaggacgcggcggatcccactcgcacagcagcgcactcggtgccccgcgcagggtcgcgatgctgcccggtttggcactgctcctgctggccgcctggacggctcgggcgctggaggtacccactgatggtaatgctggcctgctggctgaaccccagattgccatgttctgtggcagactgaacatgcacatgaatgtccagaatgggaagtgggattcagatccatcagggaccaaaacctgcattgataccaaggaaggcatcctgcagtattgccaagaagtctaccctgaactgcagatcaccaatgtggtagaagccaaccaaccagtgaccatccagaactggtgcaagcggggccgcaagcagtgcaagacccatccccactttgtgattccctaccgctgcttagttggtgagtttgtaagtgatgcccttctcgttcctgacaagtgcaaattcttacaccaggagaggatggatgtttgcgaaactcatcttcactggcacaccgtcgccaaagagacatgcagtgagaagagtaccaacttgcatgactacggcatgttgctgccctgcggaattgacaagttccgaggggtagagtttgtgtgttgcccactggctgaagaaagtgacaatgtggattctgctgatgcggaggaggatgactcggatgtctggtggggcggagcagacacagactatgcagatgggagtgaagacaaagtagtagaagtagcagaggaggaagaagtggctgaggtggaagaagaagaagccgatgatgacgaggacgatgaggatggtgatgaggtagaggaagaggctgaggaaccctacgaagaagccacagagagaaccaccagcattgccaccaccaccaccaccaccacagagtctgtggaagaggtggttcgagttcctacaacagcagccagtacccctgatgccgttgacaagtatctcgagacacctggggatgagaatgaacatgcccatttccagaaagccaaagagaggcttgaggccaagcaccgagagagaatgtcccaggtcatgagagaatgggaagaggcagaacgtcaagcaaagaacttgcctaaagctgataagaaggcagttatccagcatttccaggagaaagtggaatctttggaacaggaagcagccaacgagagacagcagctggtggagacacacatggccagagtggaagccatgctcaatgaccgccgccgcctggccctggagaactacatcaccgctctgcaggctgttcctcctcggcctcgtcacgtgttcaatatgctaaagaagtatgtccgcgcagaacagaaggacagacagcacaccctaaagcatttcgagcatgtgcgcatggtggatcccaagaaagccgctcagatccggtcccaggttatgacacacctccgtgtgatttatgagcgcatgaatcagtctctctccctgctctacaacgtgcctgcagtggccgaggagattcaggatgaagttgatgagctgcttcagaaagagcaaaactattcagatgacgtcttggccaacatgattagtgaaccaaggatcagttacggaaacgatgctctcatgccatctttgaccgaaacgaaaaccaccgtggagctccttcccgtgaatggagagttcagcctggacgatctccagccgtggcattcttttggggctgactctgtgccagccaacacagaaaacgaagttgagcctgttgatgcccgccctgctgccgaccgaggactgaccactcgaccaggttctgggttgacaaatatcaagacggaggagatctctgaagtgaagatggatgcagaattccgacatgactcaggatatgaagttcatcatcaaaaattggtgttctttgcagaagatgtgggttcaaacaaaggtgcaatcattggactcatggtgggcggtgttgtcatagcgacagtgatcgtcatcaccttggtgatgctgaagaagaaacagtacacatccattcatcatggtgtggtggaggttgacgccgctgtcaccccagaggagcgccacctgtccaagatgcagcagaacggctacgaaaatccaacctacaagttctttgagcagatgcagaactagacccccgccacagcagcctctgaagttggacagcaaaaccattgcttcactacccatcggtgtccatttatagaataatgtgggaagaaacaaacccgttttatgatttactcattatcgccttttgacagctgtgctgtaacacaagtagatgcctgaacttgaattaatccacacatcagtaatgtattctatctctctttacattttggtctctatactacattattaatgggttttgtgtactgtaaagaatttagctgtatcaaactagtgcatgaatagattctctcctgattatttatcacatagccccttagccagttgtatattattcttgtggtttgtgacccaattaagtcctactttacatatgctttaagaatcgatgggggatgcttcatgtgaacgtgggagttcagctgcttctcttgcctaagtattcctttcctgatcactatgcattttaaagttaaacatttttaagtatttcagatgctttagagagattttttttccatgactgcattttactgtacagattgctgcttctgctatatttgtgatataggaattaagaggatacacacgtttgtttcttcgtgcctgttttatgtgcacacattaggcattgagacttcaagcttttctttttttgtccacgtatctttgggtctttgataaagaaaagaatccctgttcattgtaagcacttttacggggcgggtggggaggggtgctctgctggtcttcaattaccaagaattctccaaaacaattttctgcaggatgattgtacagaatcattgcttatgacatgatcgctttctacactgtattacataaataaattaaataaaataaccccgggcaagacttttctttgaaggatgactacagacattaaataatcgaagtaattttgggtggggagaagaggcagattcaattttctttaaccagtctgaagtttcatttatgatacaaaagaagatgaaaatggaagtggcaatataaggggatgaggaaggcatgcctggacaaacccttcttttaagatgtgtcttcaatttgtataaaatggtgttttcatgtaaataaatacattcttggaggagcaaaaaaaaaatggtgtg

SEQ ID NO: 312868 - DNA, 3653 bp, Homo sapiens
ggccggatcagctgactcgcctggctctgagccccgccgccgcgctcgggctccgtcagtttcctcggcagcggtaggcgagagcacgcggaggagcgtgcgcgggggccccgggagacggcggcggtggcggcgcgggcagagcaaggacgcggcggatcccactcgcacagcagcgcactcggtgccccgcgcagggtcgcgatgctgcccggtttggcactgctcctgctggccgcctggacggctcgggcgctggaggtacccactgatggtaatgctggcctgctggctgaaccccagattgccatgttctgtggcagactgaacatgcacatgaatgtccagaatgggaagtgggattcagatccatcagggaccaaaacctgcattgataccaaggaaggcatcctgcagtattgccaagaagtctaccctgaactgcagatcaccaatgtggtagaagccaaccaaccagtgaccatccagaactggtgcaagcggggccgcaagcagtgcaagacccatccccactttgtgattccctaccgctgcttagttggtgagtttgtaagtgatgcccttctcgttcctgacaagtgcaaattcttacaccaggagaggatggatgtttgcgaaactcatcttcactggcacaccgtcgccaaagagacatgcagtgagaagagtaccaacttgcatgactacggcatgttgctgccctgcggaattgacaagttccgaggggtagagtttgtgtgttgcccactggctgaagaaagtgacaatgtggattctgctgatgcggaggaggatgactcggatgtctggtggggcggagcagacacagactatgcagatgggagtgaagacaaagtagtagaagtagcagaggaggaagaagtggctgaggtggaagaagaagaagccgatgatgacgaggacgatgaggatggtgatgaggtagaggaagaggctgaggaaccctacgaagaagccacagagagaaccaccagcattgccaccaccaccaccaccaccacagagtctgtggaagaggtggttcgagaggtgtgctctgaacaagccgagacggggccgtgccgagcaatgatctcccgctggtactttgatgtgactgaagggaagtgtgccccattcttttacggcggatgtggcggcaaccggaacaactttgacacagaagagtactgcatggccgtgtgtggcagcgccatgtcccaaagtttactcaagactacccaggaacctcttgcccgagatcctgttaaacttcctacaacagcagccagtacccctgatgccgttgacaagtatctcgagacacctggggatgagaatgaacatgcccatttccagaaagccaaagagaggcttgaggccaagcaccgagagagaatgtcccaggtcatgagagaatgggaagaggcagaacgtcaagcaaagaacttgcctaaagctgataagaaggcagttatccagcatttccaggagaaagtggaatctttggaacaggaagcagccaacgagagacagcagctggtggagacacacatggccagagtggaagccatgctcaatgaccgccgccgcctggccctggagaactacatcaccgctctgcaggctgttcctcctcggcctcgtcacgtgttcaatatgctaaagaagtatgtccgcgcagaacagaaggacagacagcacaccctaaagcatttcgagcatgtgcgcatggtggatcccaagaaagccgctcagatccggtcccaggttatgacacacctccgtgtgatttatgagcgcatgaatcagtctctctccctgctctacaacgtgcctgcagtggccgaggagattcaggatgaagttgatgagctgcttcagaaagagcaaaactattcagatgacgtcttggccaacatgattagtgaaccaaggatcagttacggaaacgatgctctcatgccatctttgaccgaaacgaaaaccaccgtggagctccttcccgtgaatggagagttcagcctggacgatctccagccgtggcattcttttggggctgactctgtgccagccaacacagaaaacgaagttgagcctgttgatgcccgccctgctgccgaccgaggactgaccactcgaccaggttctgggttgacaaatatcaagacggaggagatctctgaagtgaagatggatgcagaattccgacatgactcaggatatgaagttcatcatcaaaaattggtgttctttgcagaagatgtgggttcaaacaaaggtgcaatcattggactcatggtgggcggtgttgtcatagcgacagtgatcgtcatcaccttggtgatgctgaagaagaaacagtacacatccattcatcatggtgtggtggaggttgacgccgctgtcaccccagaggagcgccacctgtccaagatgcagcagaacggctacgaaaatccaacctacaagttctttgagcagatgcagaactagacccccgccacagcagcctctgaagttggacagcaaaaccattgcttcactacccatcggtgtccatttatagaataatgtgggaagaaacaaacccgttttatgatttactcattatcgccttttgacagctgtgctgtaacacaagtagatgcctgaacttgaattaatccacacatcagtaatgtattctatctctctttacattttggtctctatactacattattaatgggttttgtgtactgtaaagaatttagctgtatcaaactagtgcatgaatagattctctcctgattatttatcacatagccccttagccagttgtatattattcttgtggtttgtgacccaattaagtcctactttacatatgctttaagaatcgatgggggatgcttcatgtgaacgtgggagttcagctgcttctcttgcctaagtattcctttcctgatcactatgcattttaaagttaaacatttttaagtatttcagatgctttagagagattttttttccatgactgcattttactgtacagattgctgcttctgctatatttgtgatataggaattaagaggatacacacgtttgtttcttcgtgcctgttttatgtgcacacattaggcattgagacttcaagcttttctttttttgtccacgtatctttgggtctttgataaagaaaagaatccctgttcattgtaagcacttttacggggcgggtggggaggggtgctctgctggtcttcaattaccaagaattctccaaaacaattttctgcaggatgattgtacagaatcattgcttatgacatgatcgctttctacactgtattacataaataaattaaataaaataaccccgggcaagacttttctttgaaggatgactacagacattaaataatcgaagtaattttgggtggggagaagaggcagattcaattttctttaaccagtctgaagtttcatttatgatacaaaagaagatgaaaatggaagtggcaatataaggggatgaggaaggcatgcctggacaaacccttcttttaagatgtgtcttcaatttgtataaaatggtgttttcatgtaaataaatacattcttggaggagcaaaaaaaaaatggtgtg

SEQ ID NO: 312869 - DNA, 661 bp, Homo sapiens
ggccggatcagctgactcgcctggctctgagccccgccgccgcgctcgggctccgtcagtttcctcggcagcggtaggcgagagcacgcggaggagcgtgcgcgggggccccgggagacggcggcggtggcggcgcgggcagagcaaggacgcggcggatcccactcgcacagcagcgcactcggtgccccgcgcagggtcgcgatgctgcccggtttggcactgctcctgctggccgcctggacggctcgggcgctggaggtggcgtttcgctcttgttacctgggccggagtgcagtggtgcgatcttggctcaccgcaacctccgcctcctgggttcaagcgattctcctgcctcagcctcctgagtagctgggattacgggtggcctcttactatctttacatccatgtgaatgtgtgtgctttgatgtgtacatatgagagacaagaacaaaagtaaatgtcaaatatccgaattcctgtttcagtgagctttcacggagtaaattctttttgtctacttgcctgtgatctcttctaatatgacttgcgttaatgacctttaagaaatcttttaataaaataaaaaattttattaaaatcttttaataaaaaaattttattaaaatcttctaataaaaaattttattaaaatcttc

SEQ ID NO: 312870 - DNA, 3023 bp, Homo sapiens
tgagatgaagtataaagcgttgagctcaacgctttatacttcccagaatgggaagtgggattcagatccatcagggaccaaaacctgcattgataccaaggaaggcatcctgcagtattgccaagaagtctaccctgaactgcagatcaccaatgtggtagaagccaaccaaccagtgaccatccagaactggtgcaagcggggccgcaagcagtgcaagacccatccccactttgtgattccctaccgctgcttagttggtgagtttgtaagtgatgcccttctcgttcctgacaagtgcaaattcttacaccaggagaggatggatgtttgcgaaactcatcttcactggcacaccgtcgccaaagagacatgcagtgagaagagtaccaacttgcatgactacggcatgttgctgccctgcggaattgacaagttccgaggggtagagtttgtgtgttgcccactggctgaagaaagtgacaatgtggattctgctgatgcggaggaggatgactcggatgtctggtggggcggagcagacacagactatgcagatgggagtgaagacaaagtagtagaagtagcagaggaggaagaagtggctgaggtggaagaagaagaagccgatgatgacgaggacgatgaggatggtgatgaggtagaggaagaggctgaggaaccctacgaagaagccacagagagaaccaccagcattgccaccaccaccaccaccaccacagagtctgtggaagaggtggttcgagaggtgtgctctgaacaagccgagacggggccgtgccgagcaatgatctcccgctggtactttgatgtgactgaagggaagtgtgccccattcttttacggcggatgtggcggcaaccggaacaactttgacacagaagagtactgcatggccgtgtgtggcagcgccattcctacaacagcagccagtacccctgatgccgttgacaagtatctcgagacacctggggatgagaatgaacatgcccatttccagaaagccaaagagaggcttgaggccaagcaccgagagagaatgtcccaggtcatgagagaatgggaagaggcagaacgtcaagcaaagaacttgcctaaagctgataagaaggcagttatccagcatttccaggagaaagtggaatctttggaacaggaagcagccaacgagagacagcagctggtggagacacacatggccagagtggaagccatgctcaatgaccgccgccgcctggccctggagaactacatcaccgctctgcaggctgttcctcctcggcctcgtcacgtgttcaatatgctaaagaagtatgtccgcgcagaacagaaggacagacagcacaccctaaagcatttcgagcatgtgcgcatggtggatcccaagaaagccgctcagatccggtcccaggttatgacacacctccgtgtgatttatgagcgcatgaatcagtctctctccctgctctacaacgtgcctgcagtggccgaggagattcaggatgaagttgatgagctgcttcagaaagagcaaaactattcagatgacgtcttggccaacatgattagtgaaccaaggatcagttacggaaacgatgctctcatgccatctttgaccgaaacgaaaaccaccgtggagctccttcccgtgaatggagagttcagcctggacgatctccagccgtggcattcttttggggctgactctgtgccagccaacacagaaaacgaagttgagcctgttgatgcccgccctgctgccgaccgaggactgaccactcgaccaggttctgggttgacaaatatcaagacggaggagatctctgaagtgaagatggatgcagaattccgacatgactcaggatatgaagttcatcatcaaaaattggtgttctttgcagaagatgtgggttcaaacaaaggtgcaatcattggactcatggtgggcggtgttgtcatagcgacagtgatcgtcatcaccttggtgatgctgaagaagaaacagtacacatccattcatcatggtgtggtggaggttgacgccgctgtcaccccagaggagcgccacctgtccaagatgcagcagaacggctacgaaaatccaacctacaagttctttgagcagatgcagaactagacccccgccacagcagcctctgaagttggacagcaaaaccattgcttcactacccatcggtgtccatttatagaataatgtgggaagaaacaaacccgttttatgatttactcattatcgccttttgacagctgtgctgtaacacaagtagatgcctgaacttgaattaatccacacatcagtaatgtattctatctctctttacattttggtctctatactacattattaatgggttttgtgtactgtaaagaatttagctgtatcaaactagtgcatgaatagattctctcctgattatttatcacatagccccttagccagttgtatattattcttgtggtttgtgacccaattaagtcctactttacatatgctttaagaatcgatgggggatgcttcatgtgaacgtgggagttcagctgcttctcttgcctaagtattcctttcctgatcactatgcattttaaagttaaacatttttaagtatttcagatgctttagagagattttttttccatgactgcattttactgtacagattgctgcttctgctatatttgtgatataggaattaagaggatacacacgtttgtttcttcgtgcctgttttatgtgcacacattaggcattgagacttcaagcttttctttttttgtccacgtatctttgggtctttgataaagaaaagaatccctgttcattgtaagcacttttacggggcgggtggggaggggtgctctgctggtcttcaattaccaagaattctccaaaacaattttctgcaggatgattgtacagaatcattgcttatgacatgatcgctttctacactgtattacataaataaattaaataaaataac

SEQ ID NO: 312871 - DNA, 3080 bp, Homo sapiens
tgagatgaagtataaagcgttgagctcaacgctttatacttcccagaatgggaagtgggattcagatccatcagggaccaaaacctgcattgataccaaggaaggcatcctgcagtattgccaagaagtctaccctgaactgcagatcaccaatgtggtagaagccaaccaaccagtgaccatccagaactggtgcaagcggggccgcaagcagtgcaagacccatccccactttgtgattccctaccgctgcttagttggtgagtttgtaagtgatgcccttctcgttcctgacaagtgcaaattcttacaccaggagaggatggatgtttgcgaaactcatcttcactggcacaccgtcgccaaagagacatgcagtgagaagagtaccaacttgcatgactacggcatgttgctgccctgcggaattgacaagttccgaggggtagagtttgtgtgttgcccactggctgaagaaagtgacaatgtggattctgctgatgcggaggaggatgactcggatgtctggtggggcggagcagacacagactatgcagatgggagtgaagacaaagtagtagaagtagcagaggaggaagaagtggctgaggtggaagaagaagaagccgatgatgacgaggacgatgaggatggtgatgaggtagaggaagaggctgaggaaccctacgaagaagccacagagagaaccaccagcattgccaccaccaccaccaccaccacagagtctgtggaagaggtggttcgagaggtgtgctctgaacaagccgagacggggccgtgccgagcaatgatctcccgctggtactttgatgtgactgaagggaagtgtgccccattcttttacggcggatgtggcggcaaccggaacaactttgacacagaagagtactgcatggccgtgtgtggcagcgccatgtcccaaagtttactcaagactacccaggaacctcttgcccgagatcctgttaaacttcctacaacagcagccagtacccctgatgccgttgacaagtatctcgagacacctggggatgagaatgaacatgcccatttccagaaagccaaagagaggcttgaggccaagcaccgagagagaatgtcccaggtcatgagagaatgggaagaggcagaacgtcaagcaaagaacttgcctaaagctgataagaaggcagttatccagcatttccaggagaaagtggaatctttggaacaggaagcagccaacgagagacagcagctggtggagacacacatggccagagtggaagccatgctcaatgaccgccgccgcctggccctggagaactacatcaccgctctgcaggctgttcctcctcggcctcgtcacgtgttcaatatgctaaagaagtatgtccgcgcagaacagaaggacagacagcacaccctaaagcatttcgagcatgtgcgcatggtggatcccaagaaagccgctcagatccggtcccaggttatgacacacctccgtgtgatttatgagcgcatgaatcagtctctctccctgctctacaacgtgcctgcagtggccgaggagattcaggatgaagttgatgagctgcttcagaaagagcaaaactattcagatgacgtcttggccaacatgattagtgaaccaaggatcagttacggaaacgatgctctcatgccatctttgaccgaaacgaaaaccaccgtggagctccttcccgtgaatggagagttcagcctggacgatctccagccgtggcattcttttggggctgactctgtgccagccaacacagaaaacgaagttgagcctgttgatgcccgccctgctgccgaccgaggactgaccactcgaccaggttctgggttgacaaatatcaagacggaggagatctctgaagtgaagatggatgcagaattccgacatgactcaggatatgaagttcatcatcaaaaattggtgttctttgcagaagatgtgggttcaaacaaaggtgcaatcattggactcatggtgggcggtgttgtcatagcgacagtgatcgtcatcaccttggtgatgctgaagaagaaacagtacacatccattcatcatggtgtggtggaggttgacgccgctgtcaccccagaggagcgccacctgtccaagatgcagcagaacggctacgaaaatccaacctacaagttctttgagcagatgcagaactagacccccgccacagcagcctctgaagttggacagcaaaaccattgcttcactacccatcggtgtccatttatagaataatgtgggaagaaacaaacccgttttatgatttactcattatcgccttttgacagctgtgctgtaacacaagtagatgcctgaacttgaattaatccacacatcagtaatgtattctatctctctttacattttggtctctatactacattattaatgggttttgtgtactgtaaagaatttagctgtatcaaactagtgcatgaatagattctctcctgattatttatcacatagccccttagccagttgtatattattcttgtggtttgtgacccaattaagtcctactttacatatgctttaagaatcgatgggggatgcttcatgtgaacgtgggagttcagctgcttctcttgcctaagtattcctttcctgatcactatgcattttaaagttaaacatttttaagtatttcagatgctttagagagattttttttccatgactgcattttactgtacagattgctgcttctgctatatttgtgatataggaattaagaggatacacacgtttgtttcttcgtgcctgttttatgtgcacacattaggcattgagacttcaagcttttctttttttgtccacgtatctttgggtctttgataaagaaaagaatccctgttcattgtaagcacttttacggggcgggtggggaggggtgctctgctggtcttcaattaccaagaattctccaaaacaattttctgcaggatgattgtacagaatcattgcttatgacatgatcgctttctacactgtattacataaataaattaaataaaataac

SEQ ID NO: 312872 - DNA, 2990 bp, Homo sapiens
acatgttcatagctgcttcttgagggtaaaacaacgtcaggcgagaccgaactgatttgcttccatgtttcctgagctgcaaaattgcgccaaggtctaccctgaactgcagatcaccaatgtggtagaagccaaccaaccagtgaccatccagaactggtgcaagcggggccgcaagcagtgcaagacccatccccactttgtgattccctaccgctgcttagttggtgagtttgtaagtgatgcccttctcgttcctgacaagtgcaaattcttacaccaggagaggatggatgtttgcgaaactcatcttcactggcacaccgtcgccaaagagacatgcagtgagaagagtaccaacttgcatgactacggcatgttgctgccctgcggaattgacaagttccgaggggtagagtttgtgtgttgcccactggctgaagaaagtgacaatgtggattctgctgatgcggaggaggatgactcggatgtctggtggggcggagcagacacagactatgcagatgggagtgaagacaaagtagtagaagtagcagaggaggaagaagtggctgaggtggaagaagaagaagccgatgatgacgaggacgatgaggatggtgatgaggtagaggaagaggctgaggaaccctacgaagaagccacagagagaaccaccagcattgccaccaccaccaccaccaccacagagtctgtggaagaggtggttcgagaggtgtgctctgaacaagccgagacggggccgtgccgagcaatgatctcccgctggtactttgatgtgactgaagggaagtgtgccccattcttttacggcggatgtggcggcaaccggaacaactttgacacagaagagtactgcatggccgtgtgtggcagcgccattcctacaacagcagccagtacccctgatgccgttgacaagtatctcgagacacctggggatgagaatgaacatgcccatttccagaaagccaaagagaggcttgaggccaagcaccgagagagaatgtcccaggtcatgagagaatgggaagaggcagaacgtcaagcaaagaacttgcctaaagctgataagaaggcagttatccagcatttccaggagaaagtggaatctttggaacaggaagcagccaacgagagacagcagctggtggagacacacatggccagagtggaagccatgctcaatgaccgccgccgcctggccctggagaactacatcaccgctctgcaggctgttcctcctcggcctcgtcacgtgttcaatatgctaaagaagtatgtccgcgcagaacagaaggacagacagcacaccctaaagcatttcgagcatgtgcgcatggtggatcccaagaaagccgctcagatccggtcccaggttatgacacacctccgtgtgatttatgagcgcatgaatcagtctctctccctgctctacaacgtgcctgcagtggccgaggagattcaggatgaagttgatgagctgcttcagaaagagcaaaactattcagatgacgtcttggccaacatgattagtgaaccaaggatcagttacggaaacgatgctctcatgccatctttgaccgaaacgaaaaccaccgtggagctccttcccgtgaatggagagttcagcctggacgatctccagccgtggcattcttttggggctgactctgtgccagccaacacagaaaacgaagttgagcctgttgatgcccgccctgctgccgaccgaggactgaccactcgaccaggttctgggttgacaaatatcaagacggaggagatctctgaagtgaagatggatgcagaattccgacatgactcaggatatgaagttcatcatcaaaaattggtgttctttgcagaagatgtgggttcaaacaaaggtgcaatcattggactcatggtgggcggtgttgtcatagcgacagtgatcgtcatcaccttggtgatgctgaagaagaaacagtacacatccattcatcatggtgtggtggaggttgacgccgctgtcaccccagaggagcgccacctgtccaagatgcagcagaacggctacgaaaatccaacctacaagttctttgagcagatgcagaactagacccccgccacagcagcctctgaagttggacagcaaaaccattgcttcactacccatcggtgtccatttatagaataatgtgggaagaaacaaacccgttttatgatttactcattatcgccttttgacagctgtgctgtaacacaagtagatgcctgaacttgaattaatccacacatcagtaatgtattctatctctctttacattttggtctctatactacattattaatgggttttgtgtactgtaaagaatttagctgtatcaaactagtgcatgaatagattctctcctgattatttatcacatagccccttagccagttgtatattattcttgtggtttgtgacccaattaagtcctactttacatatgctttaagaatcgatgggggatgcttcatgtgaacgtgggagttcagctgcttctcttgcctaagtattcctttcctgatcactatgcattttaaagttaaacatttttaagtatttcagatgctttagagagattttttttccatgactgcattttactgtacagattgctgcttctgctatatttgtgatataggaattaagaggatacacacgtttgtttcttcgtgcctgttttatgtgcacacattaggcattgagacttcaagcttttctttttttgtccacgtatctttgggtctttgataaagaaaagaatccctgttcattgtaagcacttttacggggcgggtggggaggggtgctctgctggtcttcaattaccaagaattctccaaaacaattttctgcaggatgattgtacagaatcattgcttatgacatgatcgctttctacactgtattacataaataaattaaataaaataac

SEQ ID NO: 312873 - DNA, 3294 bp, Homo sapiens
tgagatgaagtataaagcgttgagctcaacgctttatacttcccagaatgggaagtgggattcagatccatcagggaccaaaacctgcattgataccaaggaaggcatcctgcagtattgccaagaagtctaccctgaactgcagatcaccaatgtggtagaagccaaccaaccagtgaccatccagaactggtgcaagcggggccgcaagcagtgcaagacccatccccactttgtgattccctaccgctgcttagttggtgagtttgtaagtgatgcccttctcgttcctgacaagtgcaaattcttacaccaggagaggatggatgtttgcgaaactcatcttcactggcacaccgtcgccaaagagacatgcagtgagaagagtaccaacttgcatgactacggcatgttgctgccctgcggaattgacaagttccgaggggtagagtttgtgtgttgcccactggctgaagaaagtgacaatgtggattctgctgatgcggaggaggatgactcggatgtctggtggggcggagcagacacagactatgcagatgggagtgaagacaaagtagtagaagtagcagaggaggaagaagtggctgaggtggaagaagaagaagccgatgatgacgaggacgatgaggatggtgatgaggtagaggaagaggctgaggaaccctacgaagaagccacagagagaaccaccagcattgccaccaccaccaccaccaccacagagtctgtggaagaggtggttcgagaggtgtgctctgaacaagccgagacggggccgtgccgagcaatgatctcccgctggtactttgatgtgactgaagggaagtgtgccccattcttttacggcggatgtggcggcaaccggaacaactttgacacagaagagtactgcatggccgtgtgtggcagcgccattcctacaacagcagccagtacccctgatgccgttgacaagtatctcgagacacctggggatgagaatgaacatgcccatttccagaaagccaaagagaggcttgaggccaagcaccgagagagaatgtcccaggtcatgagagaatgggaagaggcagaacgtcaagcaaagaacttgcctaaagctgataagaaggcagttatccagcatttccaggagaaagtggaatctttggaacaggaagcagccaacgagagacagcagctggtggagacacacatggccagagtggaagccatgctcaatgaccgccgccgcctggccctggagaactacatcaccgctctgcaggctgttcctcctcggcctcgtcacgtgttcaatatgctaaagaagtatgtccgcgcagaacagaaggacagacagcacaccctaaagcatttcgagcatgtgcgcatggtggatcccaagaaagccgctcagatccggtcccaggttatgacacacctccgtgtgatttatgagcgcatgaatcagtctctctccctgctctacaacgtgcctgcagtggccgaggagattcaggatgaagttgatgagctgcttcagaaagagcaaaactattcagatgacgtcttggccaacatgattagtgaaccaaggatcagttacggaaacgatgctctcatgccatctttgaccgaaacgaaaaccaccgtggagctccttcccgtgaatggagagttcagcctggacgatctccagccgtggcattcttttggggctgactctgtgccagccaacacagaaaacgaagttgagcctgttgatgcccgccctgctgccgaccgaggactgaccactcgaccaggttctgggttgacaaatatcaagacggaggagatctctgaagtgaagatggatgcagaattccgacatgactcaggatatgaagttcatcatcaaaaattggtgttctttgcagaagatgtgggttcaaacaaaggtgcaatcattggactcatggtgggcggtgttgtcatagcgacagtgatcgtcatcaccttggtgatgctgaagaagaaacagtacacatccattcatcatggtgtggtggaggttgacgccgctgtcaccccagaggagcgccacctgtccaagatgcagcagaacggctacgaaaatccaacctacaagttctttgagcagatgcagaactagacccccgccacagcagcctctgaagttggacagcaaaaccattgcttcactacccatcggtgtccatttatagaataatgtgggaagaaacaaacccgttttatgatttactcattatcgccttttgacagctgtgctgtaacacaagtagatgcctgaacttgaattaatccacacatcagtaatgtattctatctctctttacattttggtctctatactacattattaatgggttttgtgtactgtaaagaatttagctgtatcaaactagtgcatgaatagattctctcctgattatttatcacatagccccttagccagttgtatattattcttgtggtttgtgacccaattaagtcctactttacatatgctttaagaatcgatgggggatgcttcatgtgaacgtgggagttcagctgcttctcttgcctaagtattcctttcctgatcactatgcattttaaagttaaacatttttaagtatttcagatgctttagagagattttttttccatgactgcattttactgtacagattgctgcttctgctatatttgtgatataggaattaagaggatacacacgtttgtttcttcgtgcctgttttatgtgcacacattaggcattgagacttcaagcttttctttttttgtccacgtatctttgggtctttgataaagaaaagaatccctgttcattgtaagcacttttacggggcgggtggggaggggtgctctgctggtcttcaattaccaagaattctccaaaacaattttctgcaggatgattgtacagaatcattgcttatgacatgatcgctttctacactgtattacataaataaattaaataaaataaccccgggcaagacttttctttgaaggatgactacagacattaaataatcgaagtaattttgggtggggagaagaggcagattcaattttctttaaccagtctgaagtttcatttatgatacaaaagaagatgaaaatggaagtggcaatataaggggatgaggaaggcatgcctggacaaacccttcttttaagatgtgtcttcaatttgtataaaatggtgttttcatgtaaataaatacattcttggaggagcaaaaaaaaaatggtgtg

SEQ ID NO: 312874 - DNA, 2011 bp, Homo sapiens
ggatctagaggatcccttgcatatggcaagggccaagcacgagagagaatgtcccaggtcatgagagaatgggaagaggcagaacgtcaagcaaagaacttgcctaaagctgataagaaggcagttatccagcatttccaggagaaagtggaatctttggaacaggaagcagccaacgagagacagcagctggtggagacacacatggccagagtggaagccatgctcaatgaccgccgccgcctggccctggagaactacatcaccgctctgcaggctgttcctcctcggcctcgtcacgtgttcaatatgctaaagaagtatgtccgcgcagaacagaaggacagacagcacaccctaaagcatttcgagcatgtgcgcatggtggatcccaagaaagccgctcagatccggtcccaggttatgacacacctccgtgtgatttatgagcgcatgaatcagtctctctccctgctctacaacgtgcctgcagtggccgaggagattcaggatgaagttgatgagctgcttcagaaagagcaaaactattcagatgacgtcttggccaacatgattagtgaaccaaggatcagttacggaaacgatgctctcatgccatctttgaccgaaacgaaaaccaccgtggagctccttcccgtgaatggagagttcagcctggacgatctccagccgtggcattcttttggggctgactctgtgccagccaacacagaaaacgaagttgagcctgttgatgcccgccctgctgccgaccgaggactgaccactcgaccaggttctgggttgacaaatatcaagacggaggagatctctgaagtgaagatggatgcagaattccgacatgactcaggatatgaagttcatcatcaaaaattggtgttctttgcagaagatgtgggttcaaacaaaggtgcaatcattggactcatggtgggcggtgttgtcatagcgacagtgatcgtcatcaccttggtgatgctgaagaagaaacagtacacatccattcatcatggtgtggtggaggttgacgccgctgtcaccccagaggagcgccacctgtccaagatgcagcagaacggctacgaaaatccaacctacaagttctttgagcagatgcagaactagacccccgccacagcagcctctgaagttggacagcaaaaccattgcttcactacccatcggtgtccatttatagaataatgtgggaagaaacaaacccgttttatgatttactcattatcgccttttgacagctgtgctgtaacacaagtagatgcctgaacttgaattaatccacacatcagtaatgtattctatctctctttacattttggtctctatactacattattaatgggttttgtgtactgtaaagaatttagctgtatcaaactagtgcatgaatagattctctcctgattatttatcacatagccccttagccagttgtatattattcttgtggtttgtgacccaattaagtcctactttacatatgctttaagaatcgatgggggatgcttcatgtgaacgtgggagttcagctgcttctcttgcctaagtattcctttcctgatcactatgcattttaaagttaaacatttttaagtatttcagatgctttagagagattttttttccatgactgcattttactgtacagattgctgcttctgctatatttgtgatataggaattaagaggatacacacgtttgtttcttcgtgcctgttttatgtgcacacattaggcattgagacttcaagcttttctttttttgtccacgtatctttgggtctttgataaagaaaagaatccctgttcattgtaagcacttttacggggcgggtggggaggggtgctctgctggtcttcaattaccaagaattctccaaaacaattttctgcaggatgattgtacagaatcattgcttatgacatgatcgctttctacactgtattacataaataaattaaataaaataac

SEQ ID NO: 312875 - DNA, 3264 bp, Homo sapiens
tgagatgaagtataaagcgttgagctcaacgctttatacttcccagaatgggaagtgggattcagatccatcagggaccaaaacctgcattgataccaaggaaggcatcctgcagtattgccaagaagtctaccctgaactgcagatcaccaatgtggtagaagccaaccaaccagtgaccatccagaactggtgcaagcggggccgcaagcagtgcaagacccatccccactttgtgattccctaccgctgcttagttggtgagtttgtaagtgatgcccttctcgttcctgacaagtgcaaattcttacaccaggagaggatggatgtttgcgaaactcatcttcactggcacaccgtcgccaaagagacatgcagtgagaagagtaccaacttgcatgactacggcatgttgctgccctgcggaattgacaagttccgaggggtagagtttgtgtgttgcccactggctgaagaaagtgacaatgtggattctgctgatgcggaggaggatgactcggatgtctggtggggcggagcagacacagactatgcagatgggagtgaagacaaagtagtagaagtagcagaggaggaagaagtggctgaggtggaagaagaagaagccgatgatgacgaggacgatgaggatggtgatgaggtagaggaagaggctgaggaaccctacgaagaagccacagagagaaccaccagcattgccaccaccaccaccaccaccacagagtctgtggaagaggtggttcgagaggtgtgctctgaacaagccgagacggggccgtgccgagcaatgatctcccgctggtactttgatgtgactgaagggaagtgtgccccattcttttacggcggatgtggcggcaaccggaacaactttgacacagaagagtactgcatggccgtgtgtggcagcgccattcctacaacagcagccagtacccctgatgccgttgacaagtatctcgagacacctggggatgagaatgaacatgcccatttccagaaagccaaagagaggcttgaggccaagcaccgagagagaatgtcccaggtcatgagagaatgggaagaggcagaacgtcaagcaaagaacttgcctaaagctgataagaaggcagttatccagcatttccaggagaaagtggaatctttggaacaggaagcagccaacgagagacagcagctggtggagacacacatggccagagtggaagccatgctcaatgaccgccgccgcctggccctggagaactacatcaccgctctgcaggctgttcctcctcggcctcgtcacgtgttcaatatgctaaagaagtatgtccgcgcagaacagaaggacagacagcacaccctaaagcatttcgagcatgtgcgcatggtggatcccaagaaagccgctcagatccggtcccaggttatgacacacctccgtgtgatttatgagcgcatgaatcagtctctctccctgctctacaacgtgcctgcagtggccgaggagattcaggatgaagttgatgagctgcttcagaaagagcaaaactattcagatgacgtcttggccaacatgattagtgaaccaaggatcagttacggaaacgatgctctcatgccatctttgaccgaaacgaaaaccaccgtggagctccttcccgtgaatggagagttcagcctggacgatctccagccgtggcattcttttggggctgactctgtgccagccaacacagaaaacgaagttgagcctgttgatgcccgccctgctgccgaccgaggactgaccactcgaccaggttctgggttgacaaatatcaagacggaggagatctctgaagtgaagatggatgcagaattccgacatgactcaggatatgaagttcatcatcaaaaattggtgttctttgcagaagatgtgggttcaaacaaaggtgcaatcattggactcatggtgggcggtgttgtcatagcgacagtgatcgtcatcaccttggtgatgctgaagaagaaacagtacacatccattcatcatggtgtggtggaggttgacgccgctgtcaccccagaggagcgccacctgtccaagatgcagcagaacggctacgaaaatccaacctacaagttctttgagcagatgcagaactagacccccgccacagcagcctctgaagttggacagcaaaaccattgcttcactacccatcggtgtccatttatagaataatgtgggaagaaacaaacccgttttatgatttactcattatcgccttttgacagctgtgctgtaacacaagtagatgcctgaacttgaattaatccacacatcagtaatgtattctatctctctttacattttggtctctatactacattattaatgggttttgtgtactgtaaagaatttagctgtatcaaactagtgcatgaatagattctctcctgattatttatcacatagccccttagccagttgtatattattcttgtggtttgtgacccaattaagtcctactttacatatgctttaagaatcgatgggggatgcttcatgtgaacgtgggagttcagctgcttctcttgcctaagtattcctttcctgatcactatgcattttaaagttaaacatttttaagtatttcagatgctttagagagattttttttccatgactgcattttactgtacagattgctgcttctgctatatttgtgatataggaattaagaggatacacacgtttgtttcttcgtgcctgttttatgtgcacacattaggcattgagacttcaagcttttctttttttgtccacgtatctttgggtctttgataaagaaaagaatccctgttcattgtaagcacttttacggggcgggtggggaggggtgctctgctggtcttcaattaccaagaattctccaaaacaattttctgcaggatgattgtacagaatcattgcttatgacatgatcgctttctacactgtattacataaataaattaaataaaataaccccgggcaagacttttctttgaaggatgactacagacattaaataatcgaagtaattttgggtggggagaagaggcagattcaattttctttaaccagtctgaagtttcatttatgatacaaaagaagatgaaaatggaagtggcaatataaggggatgaggaaggcatgcctggacaaacccttcttttaagatgtgtcttcaatttgtataaaatggtgttttcatgtaaataaataca

SEQ ID NO: 312876 - DNA, 2969 bp, Homo sapiens
tgagatgaagtataaagcgttgagctcaacgctttatacttcccagaatgggaagtgggattcagatccatcagggaccaaaacctgcattgataccaaggaaggcatcctgcagtattgccaagaagtctaccctgaactgcagatcaccaatgtggtagaagccaaccaaccagtgaccatccagaactggtgcaagcggggccgcaagcagtgcaagacccatccccactttgtgattccctaccgctgcttagttggtgagtttgtaagtgatgcccttctcgttcctgacaagtgcaaattcttacaccaggagaggatggatgtttgcgaaactcatcttcactggcacaccgtcgccaaagagacatgcagtgagaagagtaccaacttgcatgactacggcatgttgctgccctgcggaattgacaagttccgaggggtagagtttgtgtgttgcccactggctgaagaaagtgacaatgtggattctgctgatgcggaggaggatgactcggatgtctggtggggcggagcagacacagactatgcagatgggagtgaagacaaagtagtagaagtagcagaggaggaagaagtggctgaggtggaagaagaagaagccgatgatgacgaggacgatgaggatggtgatgaggtagaggaagaggctgaggaaccctacgaagaagccacagagagaaccaccagcattgccaccaccaccaccaccaccacagagtctgtggaagaggtggttcgagaggtgtgctctgaacaagccgagacggggccgtgccgagcaatgatctcccgctggtactttgatgtgactgaagggaagtgtgccccattcttttacggcggatgtggcggcaaccggaacaactttgacacagaagagtactgcatggccgtgtgtggcagcgccattcctacaacagcagccagtacccctgatgccgttgacaagtatctcgagacacctggggatgagaatgaacatgcccatttccagaaagccaaagagaggcttgaggccaagcaccgagagagaatgtcccaggtcatgagagaatgggaagaggcagaacgtcaagcaaagaacttgcctaaagctgataagaaggcagttatccagcatttccaggagaaagtggaatctttggaacaggaagcagccaacgagagacagcagctggtggagacacacatggccagagtggaagccatgctcaatgaccgccgccgcctggccctggagaactacatcaccgctctgcaggctgttcctcctcggcctcgtcacgtgttcaatatgctaaagaagtatgtccgcgcagaacagaaggacagacagcacaccctaaagcatttcgagcatgtgcgcatggtggatcccaagaaagccgctcagatccggtcccaggttatgacacacctccgtgtgatttatgagcgcatgaatcagtctctctccctgctctacaacgtgcctgcagtggccgaggagattcaggatgaagttgatgagctgcttcagaaagagcaaaactattcagatgacgtcttggccaacatgattagtgaaccaaggatcagttacggaaacgatgctctcatgccatctttgaccgaaacgaaaaccaccgtggagctccttcccgtgaatggagagttcagcctggacgatctccagccgtggcattcttttggggctgactctgtgccagccaacacagaaaacgaaggttctgggttgacaaatatcaagacggaggagatctctgaagtgaagatggatgcagaattccgacatgactcaggatatgaagttcatcatcaaaaattggtgttctttgcagaagatgtgggttcaaacaaaggtgcaatcattggactcatggtgggcggtgttgtcatagcgacagtgatcgtcatcaccttggtgatgctgaagaagaaacagtacacatccattcatcatggtgtggtggaggttgacgccgctgtcaccccagaggagcgccacctgtccaagatgcagcagaacggctacgaaaatccaacctacaagttctttgagcagatgcagaactagacccccgccacagcagcctctgaagttggacagcaaaaccattgcttcactacccatcggtgtccatttatagaataatgtgggaagaaacaaacccgttttatgatttactcattatcgccttttgacagctgtgctgtaacacaagtagatgcctgaacttgaattaatccacacatcagtaatgtattctatctctctttacattttggtctctatactacattattaatgggttttgtgtactgtaaagaatttagctgtatcaaactagtgcatgaatagattctctcctgattatttatcacatagccccttagccagttgtatattattcttgtggtttgtgacccaattaagtcctactttacatatgctttaagaatcgatgggggatgcttcatgtgaacgtgggagttcagctgcttctcttgcctaagtattcctttcctgatcactatgcattttaaagttaaacatttttaagtatttcagatgctttagagagattttttttccatgactgcattttactgtacagattgctgcttctgctatatttgtgatataggaattaagaggatacacacgtttgtttcttcgtgcctgttttatgtgcacacattaggcattgagacttcaagcttttctttttttgtccacgtatctttgggtctttgataaagaaaagaatccctgttcattgtaagcacttttacggggcgggtggggaggggtgctctgctggtcttcaattaccaagaattctccaaaacaattttctgcaggatgattgtacagaatcattgcttatgacatgatcgctttctacactgtattacataaataaattaaataaaataac

SEQ ID NO: 312877 - DNA, 1652 bp, Homo sapiens
tgtcgacacctaagcatcggcattcgcatgtggatccaaaatgcgctcagatcggtcccaggttatgacacacctccgtgtgatttatgagcgcatgaatcagtctctctccctgctctacaacgtgcctgcagtggccgaggagattcaggatgaagttgatgagctgcttcagaaagagcaaaactattcagatgacgtcttggccaacatgattagtgaaccaaggatcagttacggaaacgatgctctcatgccatctttgaccgaaacgaaaaccaccgtggagctccttcccgtgaatggagagttcagcctggacgatctccagccgtggcattcttttggggctgactctgtgccagccaacacagaaaacgaagttgagcctgttgatgcccgccctgctgccgaccgaggactgaccactcgaccaggttctgggttgacaaatatcaagacggaggagatctctgaagtgaagatggatgcagaattccgacatgactcaggatatgaagttcatcatcaaaaattggtgttctttgcagaagatgtgggttcaaacaaaggtgcaatcattggactcatggtgggcggtgttgtcatagcgacagtgatcgtcatcaccttggtgatgctgaagaagaaacagtacacatccattcatcatggtgtggtggaggttgacgccgctgtcaccccagaggagcgccacctgtccaagatgcagcagaacggctacgaaaatccaacctacaagttctttgagcagatgcagaactagacccccgccacagcagcctctgaagttggacagcaaaaccattgcttcactacccatcggtgtccatttatagaataatgtgggaagaaacaaacccgttttatgatttactcattatcgccttttgacagctgtgctgtaacacaagtagatgcctgaacttgaattaatccacacatcagtaatgtattctatctctctttacattttggtctctatactacattattaatgggttttgtgtactgtaaagaatttagctgtatcaaactagtgcatgaatagattctctcctgattatttatcacatagccccttagccagttgtatattattcttgtggtttgtgacccaattaagtcctactttacatatgctttaagaatcgatgggggatgcttcatgtgaacgtgggagttcagctgcttctcttgcctaagtattcctttcctgatcactatgcattttaaagttaaacatttttaagtatttcagatgctttagagagattttttttccatgactgcattttactgtacagattgctgcttctgctatatttgtgatataggaattaagaggatacacacgtttgtttcttcgtgcctgttttatgtgcacacattaggcattgagacttcaagcttttctttttttgtccacgtatctttgggtctttgataaagaaaagaatccctgttcattgtaagcacttttacggggcgggtggggaggggtgctctgctggtcttcaattaccaagaattctccaaaacaattttctgcaggatgattgtacagaatcattgcttatgacatgatcgctttctacactgtattacataaataaattaaataaaataac

SEQ ID NO: 312878 - DNA, 2973 bp, Homo sapiens
tgagatgaagtataaagcgttgagctcaacgctttatacttcccagaatgggaagtgggattcagatccatcagggaccaaaacctgcattgataccaaggaaggcatcctgcagtattgccaagaagtctaccctgaactgcagatcaccaatgtggtagaagccaaccaaccagtgaccatccagaactggtgcaagcggggccgcaagcagtgcaagacccatccccactttgtgattccctaccgctgcttagttggtgagtttgtaagtgatgcccttctcgttcctgacaagtgcaaattcttacaccaggagaggatggatgtttgcgaaactcatcttcactggcacaccgtcgccaaagagacatgcagtgagaagagtaccaacttgcatgactacggcatgttgctgccctgcggaattgacaagttccgaggggtagagtttgtgtgttgcccactggctgaagaaagtgacaatgtggattctgctgatgcggaggaggatgactcggatgtctggtggggcggagcagacacagactatgcagatgggagtgaagacaaagtagtagaagtagcagaggaggaagaagtggctgaggtggaagaagaagaagccgatgatgacgaggacgatgaggatggtgatgaggtagaggaagaggctgaggaaccctacgaagaagccacagagagaaccaccagcattgccaccaccaccaccaccaccacagagtctgtggaagaggtggttcgagaggtgtgctctgaacaagccgagacggggccgtgccgagcaatgatctcccgctggtactttgatgtgactgaagggaagtgtgccccattcttttacggcggatgtggcggcaaccggaacaactttgacacagaagagtactgcatggccgtgtgtggcagcgccattcctacaacagcagccagtacccctgatgccgttgacaagtatctcgagacacctggggatgagaatgaacatgcccatttccagaaagccaaagagaggcttgaggccaagcaccgagagagaatgtcccaggtcatgagagaatgggaagaggcagaacgtcaagcaaagaacttgcctaaagctgataagaaggcagttatccagcatttccaggagaaagtggaatctttggaacaggaagcagccaacgagagacagcagctggtggagacacacatggccagagtggaagccatgctcaatgaccgccgccgcctggccctggagaactacatcaccgctctgcaggctgttcctcctcggcctcgtcacgtgttcaatatgctaaagaagtatgtccgcgcagaacagaaggacagacagcacaccctaaagcatttcgagcatgtgcgcatggtggatcccaagaaagccgctcagatccggtcccaggttatgacacacctccgtgtgatttatgagcgcatgaatcagtctctctccctgctctacaacgtgcctgcagtggccgaggagattcaggatgaagttgatgagctgcttcagaaagagcaaaactattcagatgacgtcttggccaacatgattagtgaaccaaggatcagttacggaaacgatgctctcatgccatctttgaccgaaacgaaaaccaccgtggagctccttcccgtgaatggagagttcagcctggacgatctccagccgtggcattcttttggggctgactctgtgccagccaacacagaaaacgaagttgagcctgttgatgcccgccctgctgccgaccgaggactgaccactcgaccaggttctgggttgacaaatatcaagacggaggagatctctgaagtgaagatggatgcagaattccgacatgactcaggatatgaagttcatcatcaaaaattgcatggtgggcggtgttgtcatagcgacagtgatcgtcatcaccttggtgatgctgaagaagaaacagtacacatccattcatcatggtgtggtggaggttgacgccgctgtcaccccagaggagcgccacctgtccaagatgcagcagaacggctacgaaaatccaacctacaagttctttgagcagatgcagaactagacccccgccacagcagcctctgaagttggacagcaaaaccattgcttcactacccatcggtgtccatttatagaataatgtgggaagaaacaaacccgttttatgatttactcattatcgccttttgacagctgtgctgtaacacaagtagatgcctgaacttgaattaatccacacatcagtaatgtattctatctctctttacattttggtctctatactacattattaatgggttttgtgtactgtaaagaatttagctgtatcaaactagtgcatgaatagattctctcctgattatttatcacatagccccttagccagttgtatattattcttgtggtttgtgacccaattaagtcctactttacatatgctttaagaatcgatgggggatgcttcatgtgaacgtgggagttcagctgcttctcttgcctaagtattcctttcctgatcactatgcattttaaagttaaacatttttaagtatttcagatgctttagagagattttttttccatgactgcattttactgtacagattgctgcttctgctatatttgtgatataggaattaagaggatacacacgtttgtttcttcgtgcctgttttatgtgcacacattaggcattgagacttcaagcttttctttttttgtccacgtatctttgggtctttgataaagaaaagaatccctgttcattgtaagcacttttacggggcgggtggggaggggtgctctgctggtcttcaattaccaagaattctccaaaacaattttctgcaggatgattgtacagaatcattgcttatgacatgatcgctttctacactgtattacataaataaattaaataaaataac

SEQ ID NO: 312879 - DNA, 2987 bp, Homo sapiens
tgagatgaagtataaagcgttgagctcaacgctttatacttcccagaatgggaagtgggattcagatccatcagggaccaaaacctgcattgataccaaggaaggcatcctgcagtattgccaagaagtctaccctgaactgcagatcaccaatgtggtagaagccaaccaaccagtgaccatccagaactggtgcaagcggggccgcaagcagtgcaagacccatccccactttgtgattccctaccgctgcttagttggtgagtttgtaagtgatgcccttctcgttcctgacaagtgcaaattcttacaccaggagaggatggatgtttgcgaaactcatcttcactggcacaccgtcgccaaagagacatgcagtgagaagagtaccaacttgcatgactacggcatgttgctgccctgcggaattgacaagttccgaggggtagagtttgtgtgttgcccactggctgaagaaagtgacaatgtggattctgctgatgcggaggaggatgactcggatgtctggtggggcggagcagacacagactatgcagatgggagtgaagacaaagtagtagaagtagcagaggaggaagaagtggctgaggtggaagaagaagaagccgatgatgacgaggacgatgaggatggtgatgaggtagaggaagaggctgaggaaccctacgaagaagccacagagagaaccaccagcattgccaccaccaccaccaccaccacagagtctgtggaagaggtggttcgagaggtgtgctctgaacaagccgagacggggccgtgccgagcaatgatctcccgctggtactttgatgtgactgaagggaagtgtgccccattcttttacggcggatgtggcggcaaccggaacaactttgacacagaagagtactgcatggccgtgtgtggcagcgccattcctacaacagcagccagtacccctgatgccgttgacaagtatctcgagacacctggggatgagaatgaacatgcccatttccagaaagccaaagagaggcttgaggccaagcaccgagagagaatgtcccaggtcatgagagaatgggaagaggcagaacgtcaagcaaagaacttgcctaaagctgataagaaggcagttatccagcatttccaggagaaagtggaatctttggaacaggaagcagccaacgagagacagcagctggtggagacacacatggccagagtggaagccatgctcaatgaccgccgccgcctggccctggagaactacatcaccgctctgcaggctgttcctcctcggcctcgtcacgtgttcaatatgctaaagaagtatgtccgcgcagaacagaaggacagacagcacaccctaaagcatttcgagcatgtgcgcatggtggatcccaagaaagccgctcagatccggtcccaggttatgacacacctccgtgtgatttatgagcgcatgaatcagtctctctccctgctctacaacgtgcctgcagtggccgaggagattcaggatgaagttgatgagctgcttcagaaagagcaaaactattcagatgacgtcttggccaacatgattagtgaaccaaggatcagttacggaaacgatgctctcatgccatctttgaccgaaacgaaaaccaccgtggagctccttcccgtgaatggagagttcagcctggacgatctccagccgtggcattcttttggggctgactctgtgccagccaacacagaaaacgaagttgagcctgttgatgcccgccctgctgccgaccgaggactgaccactcgaccaggttctgggttgacaaatatcaagacggaggagatctctgaagtgaagatggatgcagaattccgacatgactcaggatatgaagttcatcatcaaaaattggtgttctttgcagaagatgtgggttcaaacaaaggtgcaatcattggactcatggtgggcggtgttgtcatagcgacagtgatcgtcatcaccttggtgatgctgaagaagaaacagtacacatccattcatcatggtgtggtggaggttgacgccgctgtcaccccagaggagcgccacctgtccaagatgcagcagaacggctacgaaaatccaacctacaagttagcctctgaagttggacagcaaaaccattgcttcactacccatcggtgtccatttatagaataatgtgggaagaaacaaacccgttttatgatttactcattatcgccttttgacagctgtgctgtaacacaagtagatgcctgaacttgaattaatccacacatcagtaatgtattctatctctctttacattttggtctctatactacattattaatgggttttgtgtactgtaaagaatttagctgtatcaaactagtgcatgaatagattctctcctgattatttatcacatagccccttagccagttgtatattattcttgtggtttgtgacccaattaagtcctactttacatatgctttaagaatcgatgggggatgcttcatgtgaacgtgggagttcagctgcttctcttgcctaagtattcctttcctgatcactatgcattttaaagttaaacatttttaagtatttcagatgctttagagagattttttttccatgactgcattttactgtacagattgctgcttctgctatatttgtgatataggaattaagaggatacacacgtttgtttcttcgtgcctgttttatgtgcacacattaggcattgagacttcaagcttttctttttttgtccacgtatctttgggtctttgataaagaaaagaatccctgttcattgtaagcacttttacggggcgggtggggaggggtgctctgctggtcttcaattaccaagaattctccaaaacaattttctgcaggatgattgtacagaatcattgcttatgacatgatcgctttctacactgtattacataaataaattaaataaaataac

SEQ ID NO: 312880 - DNA, 1868 bp, Homo sapiens
tgagatgaagtataaagcgttgagctcaacgctttatacttcccagaatgggaagtgggattcagatccatcagggaccaaaacctgcattgataccaaggaaggcatcctgcagtattgccaagaagtctaccctgaactgcagatcaccaatgtggtagaagccaaccaaccagtgaccatccagaactggtgcaagcggggccgcaagcagtgcaagacccatccccactttgtgattccctaccgctgcttagttggtgagtttgtaagtgatgcccttctcgttcctgacaagtgcaaattcttacaccaggagaggatggatgtttgcgaaactcatcttcactggcacaccgtcgccaaagagacatgcagtgagaagagtaccaacttgcatgactacggcatgttgctgccctgcggaattgacaagttccgaggggtagagtttgtgtgttgcccactggctgaagaaagtgacaatgtggattctgctgatgcggaggaggatgactcggatgtctggtggggcggagcagacacagactatgcagatgggagtgaagacaaagtagtagaagtagcagaggaggaagaagtggctgaggtggaagaagaagaagccgaccgaggactgaccactcgaccaggttctgggttgacaaatatcaagacggaggagatctctgaagtgaagatggatgcagaattccgacatgactcaggatatgaagttcatcatcaaaaattggtgttctttgcagaagatgtgggttcaaacaaaggtgcaatcattggactcatggtgggcggtgttgtcatagcgacagtgatcgtcatcaccttggtgatgctgaagaagaaacagtacacatccattcatcatggtgtggtggaggttgacgccgctgtcaccccagaggagcgccacctgtccaagatgcagcagaacggctacgaaaatccaacctacaagttctttgagcagatgcagaactagacccccgccacagcagcctctgaagttggacagcaaaaccattgcttcactacccatcggtgtccatttatagaataatgtgggaagaaacaaacccgttttatgatttactcattatcgccttttgacagctgtgctgtaacacaagtagatgcctgaacttgaattaatccacacatcagtaatgtattctatctctctttacattttggtctctatactacattattaatgggttttgtgtactgtaaagaatttagctgtatcaaactagtgcatgaatagattctctcctgattatttatcacatagccccttagccagttgtatattattcttgtggtttgtgacccaattaagtcctactttacatatgctttaagaatcgatgggggatgcttcatgtgaacgtgggagttcagctgcttctcttgcctaagtattcctttcctgatcactatgcattttaaagttaaacatttttaagtatttcagatgctttagagagattttttttccatgactgcattttactgtacagattgctgcttctgctatatttgtgatataggaattaagaggatacacacgtttgtttcttcgtgcctgttttatgtgcacacattaggcattgagacttcaagcttttctttttttgtccacgtatctttgggtctttgataaagaaaagaatccctgttcattgtaagcacttttacggggcgggtggggaggggtgctctgctggtcttcaattaccaagaattctccaaaacaattttctgcaggatgattgtacagaatcattgcttatgacatgatcgctttctacactgtattacataaataaattaaataaaataac

SEQ ID NO: 312881 - DNA, 2565 bp, Homo sapiens
tgagatgaagtataaagcgttgagctcaacgctttatacttcccagaatgggaagtgggattcagatccatcagggaccaaaacctgcattgataccaaggaaggcatcctgcagtattgccaagaagtctaccctgaactgcagatcaccaatgtggtagaagccaaccaaccagtgaccatccagaactggtgcaagcggggccgcaagcagtgcaagacccatccccactttgtgattccctaccgctgcttagttggtgagtttgtaagtgatgcccttctcgttcctgacaagtgcaaattcttacaccaggagaggatggatgtttgcgaaactcatcttcactggcacaccgtcgccaaagagacatgcagtgagaagagtaccaacttgcatgactacggcatgttgctgccctgcggaattgacaagttccgaggggtagagtttgtgtgttgcccactggctgaagaaagtgacaatgtggattctgctgatgcggaggaggatgactcggatgtctggtggggcggagcagacacagactatgcagatgggagtgaagacaaagtagtagaagtagcagaggaggaagaagtggctgaggtggaagaagaagaagccgatgatgacgaggacgatgaggatggtgatgaggtagaggaagaggctgaggaaccctacgaagaagccacagagagaaccaccagcattgccaccaccaccaccaccaccacagagtctgtggaagaggtggttcgagaggtgtgctctgaacaagccgagacggggccgtgccgagcaatgatctcccgctggtactttgatgtgactgaagggaagtgtgccccattcttttacggcggatgtggcggcaaccggaacaactttgacacagaagagtactgcatggccgtgtgtggcagcgccattcctacaacagcagccagtacccctgatgccgttgacaagtatctcgagacacctggggatgagaatgaacatgcccatttccagaaagccaaagagaggcttgaggccaagcaccgagagagaatgtcccaggtcatgagagaatgggaagaggcagaacgtcaagcaaagaacttgcctaaagctgataagaaggcagttatccagcatttccaggagaaagtggaatctttggaacaggaagcagccaacgagagacagcagctggtggagacacacatggccagagtggaagccatgctcaatgaccgccgccgcctggccctggagaactacatcaccgctctgcaggctgttcctcctcggcctcgtcacgtgttcaatatgctaaagaagtatgtccgcgcagaacagaaggacagacagcacaccctaaagcatttcgagcatgtgcgcatggtggatcccaagaaagccgctcagatccggtcccaggttatgacacacctccgtgtgatttatgagcgcatgaatcagtctctctccctgctctacaacgtgcctgcagtggccgaggagattcaggatgaagttgatgagctgcttcagaaagagcaaaactattcagatgacgtcttggccaacatgattagtgaaccaaggatcagttacggaaacgatgctctcatgccatctttgaccgaaacgaaaaccaccgtggagctccttcccgtgaatggagagttcagcctggacgatctccagccgtggcattcttttggggctgactctgtgccagccaacacagaaaacgaagttgagcctgttgatgcccgccctgctgccgaccgaggactgaccactcgaccaggttctgggttgacaaatatcaagacggaggagatctctgaagtgaagatggatgcagaattccgacatgactcaggatatgaagttcatcatcaaaaattggtgttctttgcagaagatgtgggttcaaacaaaggtgcaatcattggactcatggtgggcggtgttgtcatagcgacagtgatcgtcatcaccttggtgatgctgaagaagaaacagtacacatccattcatcatggtgtggtggaggttgacgccgctgtcaccccagaggagcgccacctgtccaagatgcagcagaacggctacgaaaatccaacctacaagttctttgagcagatgcagaactagacccccgccacagcagcctctgaagttggacagcaaaaccattgcttcactacccatcggtgtccatttatagaataatgtgggaagaaacaaacccgttttatgatttactcattatcgccttttgacagctgtgctgtaacacaagtagatgcctgaacttgaattaatccacacatcagtaatgtattctatctctctttacattttggtctctatactacattattaatgggttttgtgtactgtaaagaatttagctgtatcaaactagtgcatgaatagattctctcctgattatttatcacatagccccttagccagttgtatattattcttgtggtttgtgacccaattaagtcctactttagtctgatgacacggtacgagctcgattgtatcatgtt

SEQ ID NO: 312882 - DNA, 2477 bp, Homo sapiens
tgagatgaagtataaagcgttgagctcaacgctttatacttcccagaatgggaagtgggattcagatccatcagggaccaaaacctgcattgataccaaggaaggcatcctgcagtattgccaagaagtctaccctgaactgcagatcaccaatgtggtagaagccaaccaaccagtgaccatccagaactggtgcaagcggggccgcaagcagtgcaagacccatccccactttgtgattccctaccgctgcttagttggtgagtttgtaagtgatgcccttctcgttcctgacaagtgcaaattcttacaccaggagaggatggatgtttgcgaaactcatcttcactggcacaccgtcgccaaagagacatgcagtgagaagagtaccaacttgcatgactacggcatgttgctgccctgcggaattgacaagttccgaggggtagagtttgtgtgttgcccactggctgaagaaagtgacaatgtggattctgctgatgcggaggaggatgactcggatgtctggtggggcggagcagacacagactatgcagatgggagtgaagacaaagtagtagaagtagcagaggaggaagaagtggctgaggtggaagaagaagaagccgatgatgacgaggacgatgaggatggtgatgaggtagaggaagaggctgaggaaccctacgaagaagccacagagagaaccaccagcattgccaccaccaccaccaccaccacagagtctgtggaagaggtggttcgagaggtgtgctctgaacaagccgagacggggccgtgccgagcaatgatctcccgctggtactttgatgtgactgaagggaagtgtgccccattcttttacggcggatgtggcggcaaccggaacaactttgacacagaagagtactgcatggccgtgtgtggcagcgccattcctacaacagcagccagtacccctgatgccgttgacaagtatctcgagacacctggggatgagaatgaacatgcccatttccagaaagccaaagagaggcttgaggccaagcaccgagagagaatgtcccaggtcatgagagaatgggaagaggcagaacgtcaagcaaagaacttgcctaaagctgataagaaggcagttatccagcatttccaggagaaagtggaatctttggaacaggaagcagccaacgagagacagcagctggtggagacacacatggccagagtggaagccatgctcaatgaccgccgccgcctggccctggagaactacatcaccgctctgcaggctgttcctcctcggcctcgtcacgtgttcaatatgctaaagaagtatgtccgcgcagaacagaaggacagacagcacaccctaaagcatttcgagcatgtgcgcatggtggatcccaagaaagccgctcagatccggtcccaggttatgacacacctccgtgtgatttatgagcgcatgaatcagtctctctccctgctctacaacgtgcctgcagtggccgaggagattcaggatgaagttgatgagctgcttcagaaagagcaaaactattcagatgacgtcttggccaacatgattagtgaaccaaggatcagttacggaaacgatgctctcatgccatctttgaccgaaacgaaaaccaccgtggagctccttcccgtgaatggagagttcagcctggacgatctccagccgtggcattcttttggggctgactctgtgccagccaacacagaaaacgaagttgagcctgttgatgcccgccctgctgccgaccgaggactgaccactcgaccaggttctgggttgacaaatatcaagacggaggagatctctgaagtgaagatggatgcagaattccgacatgactcaggatatgaagttcatcatcaaaaattggtgttctttgcagaagatgtgggttcaaacaaaggtgcaatcattggactcatggtgggcggtgttgtcatagcgacagtgatcgtcatcaccttggtgatgctgaagaagaaacagtacacatccattcatcatggtgtggtggaggttgacgccgctgtcaccccagaggagcgccacctgtccaagatgcagcagaacggctacgaaaatccaacctacaagttctttgagcagatgcagaactagacccccgccacagcagcctctgaagttggacagcaaaaccattgcttcactacccatcggtgtccatttatagaataatgtgggaagaaacaaacccgttttatgatttactcattatcgccttttgacagctgtgctgtaacacaagtagatgcctgaacttgaattaatccacacatcagtaatgtattctatctctctttacattttggtctctatactacattattaatgggttttgtgtactgtaaagaatttagctgtggcggggcttctagttctgcatctgctcaaagaacttgtaggttggattttcgta

SEQ ID NO: 312883 - DNA, 2364 bp, Homo sapiens
tgagatgaagtataaagcgttgagctcaacgctttatacttcccagaatgggaagtgggattcagatccatcagggaccaaaacctgcattgataccaaggaaggcatcctgcagtattgccaagaagtctaccctgaactgcagatcaccaatgtggtagaagccaaccaaccagtgaccatccagaactggtgcaagcggggccgcaagcagtgcaagacccatccccactttgtgattccctaccgctgcttagttggtgagtttgtaagtgatgcccttctcgttcctgacaagtgcaaattcttacaccaggagaggatggatgtttgcgaaactcatcttcactggcacaccgtcgccaaagagacatgcagtgagaagagtaccaacttgcatgactacggcatgttgctgccctgcggaattgacaagttccgaggggtagagtttgtgtgttgcccactggctgaagaaagtgacaatgtggattctgctgatgcggaggaggatgactcggatgtctggtggggcggagcagacacagactatgcagatgggagtgaagacaaagtagtagaagtagcagaggaggaagaagtggctgaggtggaagaagaagaagccgatgatgacgaggacgatgaggatggtgatgaggtagaggaagaggctgaggaaccctacgaagaagccacagagagaaccaccagcattgccaccaccaccaccaccaccacagagtctgtggaagaggtggttcgagaggtgtgctctgaacaagccgagacggggccgtgccgagcaatgatctcccgctggtactttgatgtgactgaagggaagtgtgccccattcttttacggcggatgtggcggcaaccggaacaactttgacacagaagagtactgcatggccgtgtgtggcagcgccattcctacaacagcagccagtacccctgatgccgttgacaagtatctcgagacacctggggatgagaatgaacatgcccatttccagaaagccaaagagaggcttgaggccaagcaccgagagagaatgtcccaggtcatgagagaatgggaagaggcagaacgtcaagcaaagaacttgcctaaagctgataagaaggcagttatccagcatttccaggagaaagtggaatctttggaacaggaagcagccaacgagagacagcagctggtggagacacacatggccagagtggaagccatgctcaatgaccgccgccgcctggccctggagaactacatcaccgctctgcaggctgttcctcctcggcctcgtcacgtgttcaatatgctaaagaagtatgtccgcgcagaacagaaggacagacagcacaccctaaagcatttcgagcatgtgcgcatggtggatcccaagaaagccgctcagatccggtcccaggttatgacacacctccgtgtgatttatgagcgcatgaatcagtctctctccctgctctacaacgtgcctgcagtggccgaggagattcaggatgaagttgatgagctgcttcagaaagagcaaaactattcagatgacgtcttggccaacatgattagtgaaccaaggatcagttacggaaacgatgctctcatgccatctttgaccgaaacgaaaaccaccgtggagctccttcccgtgaatggagagttcagcctggacgatctccagccgtggcattcttttggggctgactctgtgccagccaacacagaaaacgaagttgagcctgttgatgcccgccctgctgccgaccgaggactgaccactcgaccaggttctgggttgacaaatatcaagacggaggagatctctgaagtgaagatggatgcagaattccgacatgactcaggatatgaagttcatcatcaaaaattggtgttctttgcagaagatgtgggttcaaacaaaggtgcaatcattggactcatggtgggcggtgttgtcatagcgacagtgatcgtcatcaccttggtgatgctgaagaagaaacagtacacatccattcatcatggtgtggtggaggttgacgccgctgtcaccccagaggagcgccacctgtccaagatgcagcagaacggctacgaaaatccaacctacaagttctttgagcagatgcagaactagacccccgccacagcagcctctgaagttggacagcaaaaccattgcttcactacccatcggtgtccatttatagaataatgtgggaagaaacaaacccgttttatgatttactcattatcgccttttgacagctgtgctgtaacacaagtagatgcgccgagagacaaggtagagccgagagacaaggtagagacgagagacaaggt

SEQ ID NO: 312884 - DNA, 1028 bp, Homo sapiens
  misc_feature (54)..(54): n is a, c, g, or t
  misc_feature (56)..(56): n is a, c, g, or t
  misc_feature (58)..(58): n is a, c, g, or t
  misc_feature (60)..(60): n is a, c, g, or t
agagagagagagagagagagagagagagagagagagagagagagagagagaganantngnggttgacgccgctgtcaccccagaggagcgccacctgtccaagatgcagcagaacggctacgaaaatccaacctacaagttctttgagcagatgcagaactagacccccgccacagcagcctctgaagttggacagcaaaaccattgcttcactacccatcggtgtccatttatagaataatgtgggaagaaacaaacccgttttatgatttactcattatcgccttttgacagctgtgctgtaacacaagtagatgcctgaacttgaattaatccacacatcagtaatgtattctatctctctttacattttggtctctatactacattattaatgggttttgtgtactgtaaagaatttagctgtatcaaactagtgcatgaatagattctctcctgattatttatcacatagccccttagccagttgtatattattcttgtggtttgtgacccaattaagtcctactttacatatgctttaagaatcgatgggggatgcttcatgtgaacgtgggagttcagctgcttctcttgcctaagtattcctttcctgatcactatgcattttaaagttaaacatttttaagtatttcagatgctttagagagattttttttccatgactgcattttactgtacagattgctgcttctgctatatttgtgatataggaattaagaggatacacacgtttgtttcttcgtgcctgttttatgtgcacacattaggcattgagacttcaagcttttctttttttgtccacgtatctttgggtctttgataaagaaaagaatccctgttcattgtaagcacttttacggggcgggtggggaggggtgctctgctggtcttcaattaccaagaattctccaaaacaattttctgcaggatgattgtacagaatcattgcttatgacatgatcgctttctacactgtattacataaataaattaaataaaataac

SEQ ID NO: 312885 - DNA, 2477 bp, Homo sapiens
tgagatgaagtataaagcgttgagctcaacgctttatacttcccagaatgggaagtgggattcagatccatcagggaccaaaacctgcattgataccaaggaaggcatcctgcagtattgccaagaagtctaccctgaactgcagatcaccaatgtggtagaagccaaccaaccagtgaccatccagaactggtgcaagcggggccgcaagcagtgcaagacccatccccactttgtgattccctaccgctgcttagttggtgagtttgtaagtgatgcccttctcgttcctgacaagtgcaaattcttacaccaggagaggatggatgtttgcgaaactcatcttcactggcacaccgtcgccaaagagacatgcagtgagaagagtaccaacttgcatgactacggcatgttgctgccctgcggaattgacaagttccgaggggtagagtttgtgtgttgcccactggctgaagaaagtgacaatgtggattctgctgatgcggaggaggatgactcggatgtctggtggggcggagcagacacagactatgcagatgggagtgaagacaaagtagtagaagtagcagaggaggaagaagtggctgaggtggaagaagaagaagccgatgatgacgaggacgatgaggatggtgatgaggtagaggaagaggctgaggaaccctacgaagaagccacagagagaaccaccagcattgccaccaccaccaccaccaccacagagtctgtggaagaggtggttcgagaggtgtgctctgaacaagccgagacggggccgtgccgagcaatgatctcccgctggtactttgatgtgactgaagggaagtgtgccccattcttttacggcggatgtggcggcaaccggaacaactttgacacagaagagtactgcatggccgtgtgtggcagcgccattcctacaacagcagccagtacccctgatgccgttgacaagtatctcgagacacctggggatgagaatgaacatgcccatttccagaaagccaaagagaggcttgaggccaagcaccgagagagaatgtcccaggtcatgagagaatgggaagaggcagaacgtcaagcaaagaacttgcctaaagctgataagaaggcagttatccagcatttccaggagaaagtggaatctttggaacaggaagcagccaacgagagacagcagctggtggagacacacatggccagagtggaagccatgctcaatgaccgccgccgcctggccctggagaactacatcaccgctctgcaggctgttcctcctcggcctcgtcacgtgttcaatatgctaaagaagtatgtccgcgcagaacagaaggacagacagcacaccctaaagcatttcgagcatgtgcgcatggtggatcccaagaaagccgctcagatccggtcccaggttatgacacacctccgtgtgatttatgagcgcatgaatcagtctctctccctgctctacaacgtgcctgcagtggccgaggagattcaggatgaagttgatgagctgcttcagaaagagcaaaactattcagatgacgtcttggccaacatgattagtgaaccaaggatcagttacggaaacgatgctctcatgccatctttgaccgaaacgaaaaccaccgtggagctccttcccgtgaatggagagttcagcctggacgatctccagccgtggcattcttttggggctgactctgtgccagccaacacagaaaacgaagttgagcctgttgatgcccgccctgctgccgaccgaggactgaccactcgaccaggttctgggttgacaaatatcaagacggaggagatctctgaagtgaagatggatgcagaattccgacatgactcaggatatgaagttcatcatcaaaaattggtgttctttgcagaagatgtgggttcaaacaaaggtgcaatcattggactcatggtgggcggtgttgtcatagcgacagtgatcgtcatcaccttggtgatgctgaagaagaaacagtacacatccattcatcatggtgtggtggaggttgacgccgctgtcaccccagaggagcgccacctgtccaagatgcagcagaacggctacgaaaatccaacctacaagttctttgagcagatgcagaactagacccccgccacagcaggaggaagaagtggctgaggtggaagaagaagaagccgatgatgacgaggacgatgaggatggtgatgaggtagaggaagaggctgaggaaccctacgaagaagccacagagagaaccaccagcattgccaccaccaccaccaccaccacagagtctgtggaagaggtggttcgagaggtgtgctctgaacaagccgagacggggccgtgccgagcaatgatctcccgctggtactttgatgtgactgaagggaagtgtgccccattcttttacggcggatgtggggcaaccgggacaatccga

SEQ ID NO: 312886 - DNA, 2498 bp, Homo sapiens
tgagatgaagtataaagcgttgagctcaacgctttatacttcccagaatgggaagtgggattcagatccatcagggaccaaaacctgcattgataccaaggaaggcatcctgcagtattgccaagaagtctaccctgaactgcagatcaccaatgtggtagaagccaaccaaccagtgaccatccagaactggtgcaagcggggccgcaagcagtgcaagacccatccccactttgtgattccctaccgctgcttagttggtgagtttgtaagtgatgcccttctcgttcctgacaagtgcaaattcttacaccaggagaggatggatgtttgcgaaactcatcttcactggcacaccgtcgccaaagagacatgcagtgagaagagtaccaacttgcatgactacggcatgttgctgccctgcggaattgacaagttccgaggggtagagtttgtgtgttgcccactggctgaagaaagtgacaatgtggattctgctgatgcggaggaggatgactcggatgtctggtggggcggagcagacacagactatgcagatgggagtgaagacaaagtagtagaagtagcagaggaggaagaagtggctgaggtggaagaagaagaagccgatgatgacgaggacgatgaggatggtgatgaggtagaggaagaggctgaggaaccctacgaagaagccacagagagaaccaccagcattgccaccaccaccaccaccaccacagagtctgtggaagaggtggttcgagaggtgtgctctgaacaagccgagacggggccgtgccgagcaatgatctcccgctggtactttgatgtgactgaagggaagtgtgccccattcttttacggcggatgtggcggcaaccggaacaactttgacacagaagagtactgcatggccgtgtgtggcagcgccattcctacaacagcagccagtacccctgatgccgttgacaagtatctcgagacacctggggatgagaatgaacatgcccatttccagaaagccaaagagaggcttgaggccaagcaccgagagagaatgtcccaggtcatgagagaatgggaagaggcagaacgtcaagcaaagaacttgcctaaagctgataagaaggcagttatccagcatttccaggagaaagtggaatctttggaacaggaagcagccaacgagagacagcagctggtggagacacacatggccagagtggaagccatgctcaatgaccgccgccgcctggccctggagaactacatcaccgctctgcaggctgttcctcctcggcctcgtcacgtgttcaatatgctaaagaagtatgtccgcgcagaacagaaggacagacagcacaccctaaagcatttcgagcatgtgcgcatggtggatcccaagaaagccgctcagatccggtcccaggttatgacacacctccgtgtgatttatgagcgcatgaatcagtctctctccctgctctacaacgtgcctgcagtggccgaggagattcaggatgaagttgatgagctgcttcagaaagagcaaaactattcagatgacgtcttggccaacatgattagtgaaccaaggatcagttacggaaacgatgctctcatgccatctttgaccgaaacgaaaaccaccgtggagctccttcccgtgaatggagagttcagcctggacgatctccagccgtggcattcttttggggctgactctgtgccagccaacacagaaaacgaagttgagcctgttgatgcccgccctgctgccgaccgaggactgaccactcgaccaggttctgggttgacaaatatcaagacggaggagatctctgaagtgaagatggatgcagaattccgacatgactcaggatatgaagttcatcatcaaaaattggtgttctttgcagaagatgtgggttcaaacaaaggtgcaatcattggactcatggtgggcggtgttgtcatagcgacagtgatcgtcatcaccttggtgatgctgaagaagaaacagtacacatccattcatcatggtgtggtggaggttgacgccgctgtcaccccagaggagcgccacctgtccaagatgcagcagaacggctacgaaaatccaacctacaagttcggcatctttatcggccgatgaagatgccgttttcgctgggtcaacagtacttgccgcagtactcttaaaactaggcggctatggtataatacgcctcacactcattctcaaccccctgacaccacacatagcctaccccttccttgtactatccctatgaggcataattataacaagctccatctgcctacgacaaacagacctaaaatcgctcattgcatactcttcaatcagccacatagccctcgtagtaacagccattctcatccaaccccctgaagcttcaccggcgcagtcattctcataatcgcccacggacttacatcctcattactattctgcctacatactcaaactacga

SEQ ID NO: 312887 - DNA, 2299 bp, Homo sapiens
tgagatgaagtataaagcgttgagctcaacgctttatacttcccagaatgggaagtgggattcagatccatcagggaccaaaacctgcattgataccaaggaaggcatcctgcagtattgccaagaagtctaccctgaactgcagatcaccaatgtggtagaagccaaccaaccagtgaccatccagaactggtgcaagcggggccgcaagcagtgcaagacccatccccactttgtgattccctaccgctgcttagttggtgagtttgtaagtgatgcccttctcgttcctgacaagtgcaaattcttacaccaggagaggatggatgtttgcgaaactcatcttcactggcacaccgtcgccaaagagacatgcagtgagaagagtaccaacttgcatgactacggcatgttgctgccctgcggaattgacaagttccgaggggtagagtttgtgtgttgcccactggctgaagaaagtgacaatgtggattctgctgatgcggaggaggatgactcggatgtctggtggggcggagcagacacagactatgcagatgggagtgaagacaaagtagtagaagtagcagaggaggaagaagtggctgaggtggaagaagaagaagccgatgatgacgaggacgatgaggatggtgatgaggtagaggaagaggctgaggaaccctacgaagaagccacagagagaaccaccagcattgccaccaccaccaccaccaccacagagtctgtggaagaggtggttcgagaggtgtgctctgaacaagccgagacggggccgtgccgagcaatgatctcccgctggtactttgatgtgactgaagggaagtgtgccccattcttttacggcggatgtggcggcaaccggaacaactttgacacagaagagtactgcatggccgtgtgtggcagcgccattcctacaacagcagccagtacccctgatgccgttgacaagtatctcgagacacctggggatgagaatgaacatgcccatttccagaaagccaaagagaggcttgaggccaagcaccgagagagaatgtcccaggtcatgagagaatgggaagaggcagaacgtcaagcaaagaacttgcctaaagctgataagaaggcagttatccagcatttccaggagaaagtggaatctttggaacaggaagcagccaacgagagacagcagctggtggagacacacatggccagagtggaagccatgctcaatgaccgccgccgcctggccctggagaactacatcaccgctctgcaggctgttcctcctcggcctcgtcacgtgttcaatatgctaaagaagtatgtccgcgcagaacagaaggacagacagcacaccctaaagcatttcgagcatgtgcgcatggtggatcccaagaaagccgctcagatccggtcccaggttatgacacacctccgtgtgatttatgagcgcatgaatcagtctctctccctgctctacaacgtgcctgcagtggccgaggagattcaggatgaagttgatgagctgcttcagaaagagcaaaactattcagatgacgtcttggccaacatgattagtgaaccaaggatcagttacggaaacgatgctctcatgccatctttgaccgaaacgaaaaccaccgtggagctccttcccgtgaatggagagttcagcctggacgatctccagccgtggcattcttttggggctgactctgtgccagccaacacagaaaacgaagttgagcctgttgatgcccgccctgctgccgaccgaggactgaccactcgaccaggttctgggttgacaaatatcaagacggaggagatctctgaagtgaagatggatgcagaattccgacatgactcaggatatgaagttcatcatcaaaaattggtgttctttgcagaagatgtgggttcaaacaaaggtgcaatcattggactcatggtgggcggtgttgtcatagcgacagtgatcgtcatcaccttggtgatgctgaagaagaaacagtacacatccattcatcatggtgtggtggaggttgacgccgctgtcaccccagaggagcgccacctgtccaagatgcagcagaacggctacgaaaatccaacctacaagttgagttcatttgaaaacgcatatgcccatgccatcaatgacgctggggacgttgtcggcagctacaaggatcagcttggcaacgcccatgcttacctgagcagcgcccaaggcaccatcatcgaaattggcccccaaccaggcgtcaccaactatcgtggtctg

SEQ ID NO: 312888 - DNA, 2085 bp, Homo sapiens
tgagatgaagtataaagcgttgagctcaacgctttatacttcccagaatgggaagtgggattcagatccatcagggaccaaaacctgcattgataccaaggaaggcatcctgcagtattgccaagaagtctaccctgaactgcagatcaccaatgtggtagaagccaaccaaccagtgaccatccagaactggtgcaagcggggccgcaagcagtgcaagacccatccccactttgtgattccctaccgctgcttagttggtgagtttgtaagtgatgcccttctcgttcctgacaagtgcaaattcttacaccaggagaggatggatgtttgcgaaactcatcttcactggcacaccgtcgccaaagagacatgcagtgagaagagtaccaacttgcatgactacggcatgttgctgccctgcggaattgacaagttccgaggggtagagtttgtgtgttgcccactggctgaagaaagtgacaatgtggattctgctgatgcggaggaggatgactcggatgtctggtggggcggagcagacacagactatgcagatgggagtgaagacaaagtagtagaagtagcagaggaggaagaagtggctgaggtggaagaagaagaagccgatgatgacgaggacgatgaggatggtgatgaggtagaggaagaggctgaggaaccctacgaagaagccacagagagaaccaccagcattgccaccaccaccaccaccaccacagagtctgtggaagaggtggttcgagaggtgtgctctgaacaagccgagacggggccgtgccgagcaatgatctcccgctggtactttgatgtgactgaagggaagtgtgccccattcttttacggcggatgtggcggcaaccggaacaactttgacacagaagagtactgcatggccgtgtgtggcagcgccattcctacaacagcagccagtacccctgatgccgttgacaagtatctcgagacacctggggatgagaatgaacatgcccatttccagaaagccaaagagaggcttgaggccaagcaccgagagagaatgtcccaggtcatgagagaatgggaagaggcagaacgtcaagcaaagaacttgcctaaagctgataagaaggcagttatccagcatttccaggagaaagtggaatctttggaacaggaagcagccaacgagagacagcagctggtggagacacacatggccagagtggaagccatgctcaatgaccgccgccgcctggccctggagaactacatcaccgctctgcaggctgttcctcctcggcctcgtcacgtgttcaatatgctaaagaagtatgtccgcgcagaacagaaggacagacagcacaccctaaagcatttcgagcatgtgcgcatggtggatcccaagaaagccgctcagatccggtcccaggttatgacacacctccgtgtgatttatgagcgcatgaatcagtctctctccctgctctacaacgtgcctgcagtggccgaggagattcaggatgaagttgatgagctgcttcagaaagagcaaaactattcagatgacgtcttggccaacatgattagtgaaccaaggatcagttacggaaacgatgctctcatgccatctttgaccgaaacgaaaaccaccgtggagctccttcccgtgaatggagagttcagcctggacgatctccagccgtggcattcttttggggctgactctgtgccagccaacacagaaaacgaagttgagcctgttgatgcccgccctgctgccgaccgaggactgaccactcgaccaggttctgggttgacaaatatcaagacggaggagatctctgaagtgaagatggatgcagaattccgacatgactcaggatatgaagttcatcatcaaaaattggtgttctttgcagaagatgtgggttcaaacaaaggtgcaatcattggactcatggtgggcggtgttgtcatagcgacagtgatcgtcatcaccttggtgatgctgaagaagaaacgtggctctgagccgggagaaacttggctcctgagccgcgagaaacctggctctgagccggg

SEQ ID NO: 312889 - DNA, 2158 bp, Homo sapiens
tgagatgaagtataaagcgttgagctcaacgctttatacttcccagaatgggaagtgggattcagatccatcagggaccaaaacctgcattgataccaaggaaggcatcctgcagtattgccaagaagtctaccctgaactgcagatcaccaatgtggtagaagccaaccaaccagtgaccatccagaactggtgcaagcggggccgcaagcagtgcaagacccatccccactttgtgattccctaccgctgcttagttggtgagtttgtaagtgatgcccttctcgttcctgacaagtgcaaattcttacaccaggagaggatggatgtttgcgaaactcatcttcactggcacaccgtcgccaaagagacatgcagtgagaagagtaccaacttgcatgactacggcatgttgctgccctgcggaattgacaagttccgaggggtagagtttgtgtgttgcccactggctgaagaaagtgacaatgtggattctgctgatgcggaggaggatgactcggatgtctggtggggcggagcagacacagactatgcagatgggagtgaagacaaagtagtagaagtagcagaggaggaagaagtggctgaggtggaagaagaagaagccgatgatgacgaggacgatgaggatggtgatgaggtagaggaagaggctgaggaaccctacgaagaagccacagagagaaccaccagcattgccaccaccaccaccaccaccacagagtctgtggaagaggtggttcgagaggtgtgctctgaacaagccgagacggggccgtgccgagcaatgatctcccgctggtactttgatgtgactgaagggaagtgtgccccattcttttacggcggatgtggcggcaaccggaacaactttgacacagaagagtactgcatggccgtgtgtggcagcgccattcctacaacagcagccagtacccctgatgccgttgacaagtatctcgagacacctggggatgagaatgaacatgcccatttccagaaagccaaagagaggcttgaggccaagcaccgagagagaatgtcccaggtcatgagagaatgggaagaggcagaacgtcaagcaaagaacttgcctaaagctgataagaaggcagttatccagcatttccaggagaaagtggaatctttggaacaggaagcagccaacgagagacagcagctggtggagacacacatggccagagtggaagccatgctcaatgaccgccgccgcctggccctggagaactacatcaccgctctgcaggctgttcctcctcggcctcgtcacgtgttcaatatgctaaagaagtatgtccgcgcagaacagaaggacagacagcacaccctaaagcatttcgagcatgtgcgcatggtggatcccaagaaagccgctcagatccggtcccaggttatgacacacctccgtgtgatttatgagcgcatgaatcagtctctctccctgctctacaacgtgcctgcagtggccgaggagattcaggatgaagttgatgagctgcttcagaaagagcaaaactattcagatgacgtcttggccaacatgattagtgaaccaaggatcagttacggaaacgatgctctcatgccatctttgaccgaaacgaaaaccaccgtggagctccttcccgtgaatggagagttcagcctggacgatctccagccgtggcattcttttggggctgactctgtgccagccaacacagaaaacgaagttgagcctgttgatgcccgccctgctgccgaccgaggactgaccactcgaccaggttctgggttgacaaatatcaagacggaggagatctctgaagtgaagatggatgcagaattccgacatgactcaggatatgaagttcatcatcaaaaattggtgttctttgcagaagatgtgggttcaaacaaaggtgcaatcattggacttgtcacaccacctgagtcctgtaagtaggagagtgatatttgatcaggagaacgtggttactagcacagagagttctcccagtaggttaatagtggggggtaaggcgaggttagcgaggcttgctagaagtcatcaaaagctattagtgggagtagagtttgaagtctgagagaggattatgatcgacttggtcatcgg

SEQ ID NO: 312890 - DNA, 2008 bp, Homo sapiens
tgagatgaagtataaagcgttgagctcaacgctttatacttcccagaatgggaagtgggattcagatccatcagggaccaaaacctgcattgataccaaggaaggcatcctgcagtattgccaagaagtctaccctgaactgcagatcaccaatgtggtagaagccaaccaaccagtgaccatccagaactggtgcaagcggggccgcaagcagtgcaagacccatccccactttgtgattccctaccgctgcttagttggtgagtttgtaagtgatgcccttctcgttcctgacaagtgcaaattcttacaccaggagaggatggatgtttgcgaaactcatcttcactggcacaccgtcgccaaagagacatgcagtgagaagagtaccaacttgcatgactacggcatgttgctgccctgcggaattgacaagttccgaggggtagagtttgtgtgttgcccactggctgaagaaagtgacaatgtggattctgctgatgcggaggaggatgactcggatgtctggtggggcggagcagacacagactatgcagatgggagtgaagacaaagtagtagaagtagcagaggaggaagaagtggctgaggtggaagaagaagaagccgatgatgacgaggacgatgaggatggtgatgaggtagaggaagaggctgaggaaccctacgaagaagccacagagagaaccaccagcattgccaccaccaccaccaccaccacagagtctgtggaagaggtggttcgagaggtgtgctctgaacaagccgagacggggccgtgccgagcaatgatctcccgctggtactttgatgtgactgaagggaagtgtgccccattcttttacggcggatgtggcggcaaccggaacaactttgacacagaagagtactgcatggccgtgtgtggcagcgccattcctacaacagcagccagtacccctgatgccgttgacaagtatctcgagacacctggggatgagaatgaacatgcccatttccagaaagccaaagagaggcttgaggccaagcaccgagagagaatgtcccaggtcatgagagaatgggaagaggcagaacgtcaagcaaagaacttgcctaaagctgataagaaggcagttatccagcatttccaggagaaagtggaatctttggaacaggaagcagccaacgagagacagcagctggtggagacacacatggccagagtggaagccatgctcaatgaccgccgccgcctggccctggagaactacatcaccgctctgcaggctgttcctcctcggcctcgtcacgtgttcaatatgctaaagaagtatgtccgcgcagaacagaaggacagacagcacaccctaaagcatttcgagcatgtgcgcatggtggatcccaagaaagccgctcagatccggtcccaggttatgacacacctccgtgtgatttatgagcgcatgaatcagtctctctccctgctctacaacgtgcctgcagtggccgaggagattcaggatgaagttgatgagctgcttcagaaagagcaaaactattcagatgacgtcttggccaacatgattagtgaaccaaggatcagttacggaaacgatgctctcatgccatctttgaccgaaacgaaaaccaccgtggagctccttcccgtgaatggagagttcagcctggacgatctccagccgtggcattcttttggggctgactctgtgccagccaacacagaaaacgaagttgagcctgttgatgcccgccctgctgccgaccgaggactgaccactcgaccaggttctgggttgacaaatatcaagacggaggagatctctgaagtgaagatggatgcagaattccgacatgactcaggatatgaagttcatcatcaaaaattgttaaatttgctgtttgttacagaaatgcgggtctcaaacaagacgcaatcacttgactttgatggcgtgtttcatagctcgtctcctggtgttacctca

SEQ ID NO: 312891 - DNA, 1942 bp, Homo sapiens
tgagatgaagtataaagcgttgagctcaacgctttatacttcccagaatgggaagtgggattcagatccatcagggaccaaaacctgcattgataccaaggaaggcatcctgcagtattgccaagaagtctaccctgaactgcagatcaccaatgtggtagaagccaaccaaccagtgaccatccagaactggtgcaagcggggccgcaagcagtgcaagacccatccccactttgtgattccctaccgctgcttagttggtgagtttgtaagtgatgcccttctcgttcctgacaagtgcaaattcttacaccaggagaggatggatgtttgcgaaactcatcttcactggcacaccgtcgccaaagagacatgcagtgagaagagtaccaacttgcatgactacggcatgttgctgccctgcggaattgacaagttccgaggggtagagtttgtgtgttgcccactggctgaagaaagtgacaatgtggattctgctgatgcggaggaggatgactcggatgtctggtggggcggagcagacacagactatgcagatgggagtgaagacaaagtagtagaagtagcagaggaggaagaagtggctgaggtggaagaagaagaagccgatgatgacgaggacgatgaggatggtgatgaggtagaggaagaggctgaggaaccctacgaagaagccacagagagaaccaccagcattgccaccaccaccaccaccaccacagagtctgtggaagaggtggttcgagaggtgtgctctgaacaagccgagacggggccgtgccgagcaatgatctcccgctggtactttgatgtgactgaagggaagtgtgccccattcttttacggcggatgtggcggcaaccggaacaactttgacacagaagagtactgcatggccgtgtgtggcagcgccattcctacaacagcagccagtacccctgatgccgttgacaagtatctcgagacacctggggatgagaatgaacatgcccatttccagaaagccaaagagaggcttgaggccaagcaccgagagagaatgtcccaggtcatgagagaatgggaagaggcagaacgtcaagcaaagaacttgcctaaagctgataagaaggcagttatccagcatttccaggagaaagtggaatctttggaacaggaagcagccaacgagagacagcagctggtggagacacacatggccagagtggaagccatgctcaatgaccgccgccgcctggccctggagaactacatcaccgctctgcaggctgttcctcctcggcctcgtcacgtgttcaatatgctaaagaagtatgtccgcgcagaacagaaggacagacagcacaccctaaagcatttcgagcatgtgcgcatggtggatcccaagaaagccgctcagatccggtcccaggttatgacacacctccgtgtgatttatgagcgcatgaatcagtctctctccctgctctacaacgtgcctgcagtggccgaggagattcaggatgaagttgatgagctgcttcagaaagagcaaaactattcagatgacgtcttggccaacatgattagtgaaccaaggatcagttacggaaacgatgctctcatgccatctttgaccgaaacgaaaaccaccgtggagctccttcccgtgaatggagagttcagcctggacgatctccagccgtggcattcttttggggctgactctgtgccagccaacacagaaaacgaagttgagcctgttgatgcccgccctgctgccgaccgaggactgaccactcgaccaggttctgggttgacaaatatcaagacggaggagatctctgaagtgaagatgttttggggaaaaaaatttaaccaccagggaaaagaaatgactaagcaaaagaaggtgtgctctgcagcacacgatggtgagtat

SEQ ID NO: 312892 - DNA, 2091 bp, Homo sapiens
tgagatgaagtataaagcgttgagctcaacgctttatacttcccagaatgggaagtgggattcagatccatcagggaccaaaacctgcattgataccaaggaaggcatcctgcagtattgccaagaagtctaccctgaactgcagatcaccaatgtggtagaagccaaccaaccagtgaccatccagaactggtgcaagcggggccgcaagcagtgcaagacccatccccactttgtgattccctaccgctgcttagttggtgagtttgtaagtgatgcccttctcgttcctgacaagtgcaaattcttacaccaggagaggatggatgtttgcgaaactcatcttcactggcacaccgtcgccaaagagacatgcagtgagaagagtaccaacttgcatgactacggcatgttgctgccctgcggaattgacaagttccgaggggtagagtttgtgtgttgcccactggctgaagaaagtgacaatgtggattctgctgatgcggaggaggatgactcggatgtctggtggggcggagcagacacagactatgcagatgggagtgaagacaaagtagtagaagtagcagaggaggaagaagtggctgaggtggaagaagaagaagccgatgatgacgaggacgatgaggatggtgatgaggtagaggaagaggctgaggaaccctacgaagaagccacagagagaaccaccagcattgccaccaccaccaccaccaccacagagtctgtggaagaggtggttcgagaggtgtgctctgaacaagccgagacggggccgtgccgagcaatgatctcccgctggtactttgatgtgactgaagggaagtgtgccccattcttttacggcggatgtggcggcaaccggaacaactttgacacagaagagtactgcatggccgtgtgtggcagcgccattcctacaacagcagccagtacccctgatgccgttgacaagtatctcgagacacctggggatgagaatgaacatgcccatttccagaaagccaaagagaggcttgaggccaagcaccgagagagaatgtcccaggtcatgagagaatgggaagaggcagaacgtcaagcaaagaacttgcctaaagctgataagaaggcagttatccagcatttccaggagaaagtggaatctttggaacaggaagcagccaacgagagacagcagctggtggagacacacatggccagagtggaagccatgctcaatgaccgccgccgcctggccctggagaactacatcaccgctctgcaggctgttcctcctcggcctcgtcacgtgttcaatatgctaaagaagtatgtccgcgcagaacagaaggacagacagcacaccctaaagcatttcgagcatgtgcgcatggtggatcccaagaaagccgctcagatccggtcccaggttatgacacacctccgtgtgatttatgagcgcatgaatcagtctctctccctgctctacaacgtgcctgcagtggccgaggagattcaggatgaagttgatgagctgcttcagaaagagcaaaactattcagatgacgtcttggccaacatgattagtgaaccaaggatcagttacggaaacgatgctctcatgccatctttgaccgaaacgaaaaccaccgtggagctccttcccgtgaatggagagttcagcctggacgatctccagccgtggcattcttttggggctgactctgtgccagccaacacagaaaacgaagttgagcctgttgatgcccgccctgctgccgaccgaggactgaccactcgaccagtctgggttgtgattgcatttagactctaaacggaacctgaattaataggaaataaacacggtactatagttgtcctatggtgcccctatgggtgatgggttccaagaaccccctaggatactaaagtccatgatgttcaagtcccttatagaaaatggtgtagtatttgcatataacctgtgcacatcctaccatacactttaaatcatctctagattacctataatagctaatacaatgtaaatgctttgtaaatagttgttatactatattgtgtctaaat

SEQ ID NO: 312893 - DNA, 1984 bp, Homo sapiens
  misc_feature (1616)..(1616): n is a, c, g, or t
  misc_feature (1720)..(1720): n is a, c, g, or t
tgagatgaagtataaagcgttgagctcaacgctttatacttcccagaatgggaagtgggattcagatccatcagggaccaaaacctgcattgataccaaggaaggcatcctgcagtattgccaagaagtctaccctgaactgcagatcaccaatgtggtagaagccaaccaaccagtgaccatccagaactggtgcaagcggggccgcaagcagtgcaagacccatccccactttgtgattccctaccgctgcttagttggtgagtttgtaagtgatgcccttctcgttcctgacaagtgcaaattcttacaccaggagaggatggatgtttgcgaaactcatcttcactggcacaccgtcgccaaagagacatgcagtgagaagagtaccaacttgcatgactacggcatgttgctgccctgcggaattgacaagttccgaggggtagagtttgtgtgttgcccactggctgaagaaagtgacaatgtggattctgctgatgcggaggaggatgactcggatgtctggtggggcggagcagacacagactatgcagatgggagtgaagacaaagtagtagaagtagcagaggaggaagaagtggctgaggtggaagaagaagaagccgatgatgacgaggacgatgaggatggtgatgaggtagaggaagaggctgaggaaccctacgaagaagccacagagagaaccaccagcattgccaccaccaccaccaccaccacagagtctgtggaagaggtggttcgagaggtgtgctctgaacaagccgagacggggccgtgccgagcaatgatctcccgctggtactttgatgtgactgaagggaagtgtgccccattcttttacggcggatgtggcggcaaccggaacaactttgacacagaagagtactgcatggccgtgtgtggcagcgccattcctacaacagcagccagtacccctgatgccgttgacaagtatctcgagacacctggggatgagaatgaacatgcccatttccagaaagccaaagagaggcttgaggccaagcaccgagagagaatgtcccaggtcatgagagaatgggaagaggcagaacgtcaagcaaagaacttgcctaaagctgataagaaggcagttatccagcatttccaggagaaagtggaatctttggaacaggaagcagccaacgagagacagcagctggtggagacacacatggccagagtggaagccatgctcaatgaccgccgccgcctggccctggagaactacatcaccgctctgcaggctgttcctcctcggcctcgtcacgtgttcaatatgctaaagaagtatgtccgcgcagaacagaaggacagacagcacaccctaaagcatttcgagcatgtgcgcatggtggatcccaagaaagccgctcagatccggtcccaggttatgacacacctccgtgtgatttatgagcgcatgaatcagtctctctccctgctctacaacgtgcctgcagtggccgaggagattcaggatgaagttggtgcagtggctcatgcctgtaattccagcattttgggaggccaaggtgggcagatgacttgagcccagaagttcaagaccagantgggaaacatggcaagaccacatttctacaaaaaaattatccaggcatgataacatctatttgtagtcccagctactcaggaggctgtggtgggaggatctccngagcctggggtggctgaggctgcagtgagccttgatcacgccacctgggcaatagagcaagaccctgtctcaaaaaaaggaagaaaaagactattatttcccccattgaatggtcttggcactattacacaaaatcaattgtccatagataatatgggtttatttcttaattcttagttcttttctttgatctgtgtgcctgtgcttactgtagtaccacactgttttgattattgtagctttgtagtaaattttgaaatcagc

SEQ ID NO: 312894 - DNA, 1400 bp, Homo sapiens
tgagatgaagtataaagcgttgagctcaacgctttatacttcccagaatgggaagtgggattcagatccatcagggaccaaaacctgcattgataccaaggaaggcatcctgcagtattgccaagaagtctaccctgaactgcagatcaccaatgtggtagaagccaaccaaccagtgaccatccagaactggtgcaagcggggccgcaagcagtgcaagacccatccccactttgtgattccctaccgctgcttagttggtgagtttgtaagtgatgcccttctcgttcctgacaagtgcaaattcttacaccaggagaggatggatgtttgcgaaactcatcttcactggcacaccgtcgccaaagagacatgcagtgagaagagtaccaacttgcatgactacggcatgttgctgccctgcggaattgacaagttccgaggggtagagtttgtgtgttgcccactggctgaagaaagtgacaatgtggattctgctgatgcggaggaggatgactcggatgtctggtggggcggagcagacacagactatgcagatgggagtgaagacaaagtagtagaagtagcagaggaggaagaagtggctgaggtggaagaagaagaagccgatgatgacgaggacgatgaggatggtgatgaggtagaggaagaggctgaggaaccctacgaagaagccacagagagaaccaccagcattgccaccaccaccaccaccaccacagagtctgtggaagaggtggttcgagaggtgtgctctgaacaagccgagacggggccgtgccgagcaatgatctcccgctggtactttgatgtgactgaagggaagtgtgccccattcttttacggcggatgtggcggcaaccggaacaactttgacacagaagagtactgcatggccgtgtgtggcagcgccattcctacaacagcagccagtacccctgatgccgttgacaagtatctcgagacacctggggatgagaatgaacatgcccatttccagaaagccaaagagaggcttgaggccaagcaccgagagagaatgtcccaggtcatgagagaatgggaagaggcagaacgtcaagcaaagaacttgcctaaagctgataagaaggcagttatccagcatttccaggagaaagtggaatctttggaacaggaagcagccaacgagagacagcagctggtggagacacacatggccagagtggaagccatgctcaatgaccgccgccgcctggccctggagaactacatcaccgctctgcaggctgttcctcctcggcctcgtcacgtgttcaatatgctgaagaagtatgtcatgtcataagaggtagacagtggagcgaccgaggctcagaaagaggctgtgtctttaccac

SEQ ID NO: 312895 - DNA, 1125 bp, Homo sapiens
tgagatgaagtataaagcgttgagctcaacgctttatacttcccagaatgggaagtgggattcagatccatcagggaccaaaacctgcattgataccaaggaaggcatcctgcagtattgccaagaagtctaccctgaactgcagatcaccaatgtggtagaagccaaccaaccagtgaccatccagaactggtgcaagcggggccgcaagcagtgcaagacccatccccactttgtgattccctaccgctgcttagttggtgagtttgtaagtgatgcccttctcgttcctgacaagtgcaaattcttacaccaggagaggatggatgtttgcgaaactcatcttcactggcacaccgtcgccaaagagacatgcagtgagaagagtaccaacttgcatgactacggcatgttgctgccctgcggaattgacaagttccgaggggtagagtttgtgtgttgcccactggctgaagaaagtgacaatgtggattctgctgatgcggaggaggatgactcggatgtctggtggggcggagcagacacagactatgcagatgggagtgaagacaaagtagtagaagtagcagaggaggaagaagtggctgaggtggaagaagaagaagccgatgatgacgaggacgatgaggatggtgatgaggtagaggaagaggctgaggaaccctacgaagaagccacagagagaaccaccagcattgccaccaccaccaccaccaccacagagtctgtggaagaggtggttcgagaggtgtgctctgaacaagccgagacggggccgtgccgagcaatgatctcccgctggtactttgatgtgactgaagggaagtgtgccccattcttttacggcggatgtggcggcaaccggaacaactttgacacagaagagtactgcatggccgtgtgtggcagcgccattcctacaacagcagccagtacccctgatgccgttgacaagtatctcgagacacctggggatgagaatgaacatgcccatttccagaaagccaaagagaggcttgaggccaagcaccgagagagaatgtcccagcatgagagaatgggaagaggcagaacgccggatgcaagcttggtctaaggtctgcc

SEQ ID NO: 312896 - DNA, 1165 bp, Homo sapiens
tgagatgaagtataaagcgttgagctcaacgctttatacttcccagaatgggaagtgggattcagatccatcagggaccaaaacctgcattgataccaaggaaggcatcctgcagtattgccaagaagtctaccctgaactgcagatcaccaatgtggtagaagccaaccaaccagtgaccatccagaactggtgcaagcggggccgcaagcagtgcaagacccatccccactttgtgattccctaccgctgcttagttggtgagtttgtaagtgatgcccttctcgttcctgacaagtgcaaattcttacaccaggagaggatggatgtttgcgaaactcatcttcactggcacaccgtcgccaaagagacatgcagtgagaagagtaccaacttgcatgactacggcatgttgctgccctgcggaattgacaagttccgaggggtagagtttgtgtgttgcccactggctgaagaaagtgacaatgtggattctgctgatgcggaggaggatgactcggatgtctggtggggcggagcagacacagactatgcagatgggagtgaagacaaagtagtagaagtagcagaggaggaagaagtggctgaggtggaagaagaagaagccgatgatgacgaggacgatgaggatggtgatgaggtagaggaagaggctgaggaaccctacgaagaagccacagagagaaccaccagcattgccaccaccaccaccaccaccacagagtctgtggaagaggtggttcgagaggtgtgctctgaacaagccgagacggggccgtgccgagcaatgatctcccgctggtactttgatgtgactgaagggaagtgtgccccattcttttacggcggatgtggcggcaaccggaacaactttgacacagaagagtactgcatggccgtgtgtggcagcgccatgtcccaaagtttactcaagactacccaggaacctcttgcccgagatcctgttaaacgtacgttgtcattcacctgagggaagggaagaggggaggaggatgctgcttggttcacataactccagcatcatcaccttctttgcatggttttgtgtttcttgaacacctgtcttagtaaaatgtttcttcccattaccttgcttgtaattacatctgattttgccagacag

SEQ ID NO: 312897 - DNA, 826 bp, Homo sapiens
tgagatgaagtataaagcgttgagctcaacgctttatacttcccagaatgggaagtgggattcagatccatcagggaccaaaacctgcattgataccaaggaaggcatcctgcagtattgccaagaagtctaccctgaactgcagatcaccaatgtggtagaagccaaccaaccagtgaccatccagaactggtgcaagcggggccgcaagcagtgcaagacccatccccactttgtgattccctaccgctgcttagttggtgagtttgtaagtgatgcccttctcgttcctgacaagtgcaaattcttacaccaggagaggatggatgtttgcgaaactcatcttcactggcacaccgtcgccaaagagacatgcagtgagaagagtaccaacttgcatgactacggcatgttgctgccctgcggaattgacaagttccgaggggtagagtttgtgtgttgcccactggctgaagaaagtgacaatgtggattctgctgatgcggaggaggatgactcggatgtctggtggggcggagcagacacagactatgcagatgggagtgaagacaaagtagtagaagtagcagaggaggaagaagtggctgaggtggaagaagaagaagccgatgatgacgaggacgatgaggatggtgatgaggtagaggaagaggctgaggaaccctacgaagaagccacagagagaaccaccagcattgccaccaccaccaccaccaccacagagtctgtggaagaggtggttcgaggtggcaatgctggtggttctctctgtgcttcttcgtaggttcctcaacagatccgggcc

SEQ ID NO: 312898 - DNA, 731 bp, Homo sapiens
tgagatgaagtataaagcgttgagctcaacgctttatacttcccagaatgggaagtgggattcagatccatcagggaccaaaacctgcattgataccaaggaaggcatcctgcagtattgccaagaagtctaccctgaactgcagatcaccaatgtggtagaagccaaccaaccagtgaccatccagaactggtgcaagcggggccgcaagcagtgcaagacccatccccactttgtgattccctaccgctgcttagttggtgagtttgtaagtgatgcccttctcgttcctgacaagtgcaaattcttacaccaggagaggatggatgtttgcgaaactcatcttcactggcacaccgtcgccaaagagacatgcagtgagaagagtaccaacttgcatgactacggcatgttgctgccctgcggaattgacaagttccgaggggtagagtttgtgtgttgcccactggctgaagaaagtgacaatgtggattctgctgatgcggaggaggatgactcggatgtctggtggggcggagcagacacagactatgcagatgggaggcagattcaattttctttaaccagtctgaagtttcatttatgatacaaaagaagatgaaaatggaagtggcaatataaggggatgaggaaggcatgcctggacaaacccttcttttaagatgtgtcttcaatttgtataaaatggtgttttcatgtaaataaataca

SEQ ID NO: 312899 - DNA, 675 bp, Homo sapiens
tgagatgaagtataaagcgttgagctcaacgctttatacttcccagaatgggaagtgggattcagatccatcagggaccaaaacctgcattgataccaaggaaggcatcctgcagtattgccaagaagtctaccctgaactgcagatcaccaatgtggtagaagccaaccaaccagtgaccatccagaactggtgcaagcggggccgcaagcagtgcaagacccatccccactttgtgattccctaccgctgcttaggtgagccggccggccgtggggctggtgttgattgggggcctggtcttgagggaagaaaaagaggatgctcctgttaggtcacatacacagacttgttcttcagcacattgccactctgtgttgtactgtgttttggactcttgcagttacattctgtgcactgaccctataggagcagtatttttgagttccctgcctcagaatgaatttacccagggtgtatattgaaattacaaattcctgggccagttccaggactcctgaatgaaaaatgcctatagtagcggatccgggaattcttattttaccgtatcgcatagatgattctcatgaacaggggccttgtgtgtttcttcacatagactttctagaagaaagaatctaatgtgaagctgcagcattttgttaatttctaaaa

SEQ ID NO: 312900 - DNA, 466 bp, Homo sapiens
tgagatgaagtataaagcgttgagctcaacgctttatacttcccagaatgggaagtgggattcagatccatcagggaccaaaacctgcattgataccaaggaaggcatcctgcagtattgccaagaagtctaccctgaactgcagatcaccaatgtggtagaagccaaccaaccagtgaccatccagaactggtgcaagcggggccgcaagcagtgcaagacccatccccactttgtgattccctaccgctgcttagttggtgagtttgtaagtgatgcccttctcgttcctgacaagtgcaaattcttacaccctcaacgctttatacttcctcaacgctttatacttcctcaacgctttatactttctcaacgctttatacttcctcaacgctttatacttccgtattgaattcaagtttaatattaagtatgcatggacctctaagctatatgaagtataaag

SEQ ID NO: 312901 - DNA, 286 bp, Homo sapiens
gtgtataacaagtcttccccattcatccaactctcgaacattcagctaacgcctgtgcacaatgactgtttttctttacatctgaagatgcttagaagttgtttgcatgacagttgggccagaggaggctgtatttcacttcggacttcggttgggttcctgtttggcatcttaacatttgcaaccttccttacccgtttttcccctcttttcccccagcctcctagtaattttccaaaagaaaaaaagcaatttccgggcagatgttttcctgtaattccactga

SEQ ID NO: 312902 - DNA, 389 bp, Homo sapiens
ggtaaaggtctaagatcataaatctctgatgccctttccttaaaagtaaggaattcttgtcttggattcttatataatatacttatttataatctcacttgttctgattgcaggtggcctcttactatctttacatccatgtgaatgtgtgtgctttgatgtgtacatatgagagacaagaacaaaagtaaatgtcaaatatccgaattcctgtttcagtgagctttcacggagtaaattctttttgtctacttgcctgtgatctcttctaatatgacttgcgttaatgacctttaagaaatcttttaataaaataaaaaattttattaaaatcttttaataaaaaaattttattaaaatcttctaataaaaaattttattaaaatctt

SEQ ID NO: 312903 - DNA, 616 bp, Homo sapiens
tgagatgaagtataaagcgttgagctcaacgctttatacttcccagaatgggaagtgggattcagatccatcagggaccaaaacctgcattgataccaaggaaggcatcctgcagtattgccaagaagtctaccctgaactgcagatcaccaatgtggtagaagccaaccaaccagtgaccatccagaactggtgcaagcggggccgcaagcagtgcaagacccatccccactttgtgattccctaccgctgcttagttggtgagtttgtaagtgatgcccttctcgttcctgacaagtgcaaattcttacaccaggagaggatggatgtttgcgaaactcatcttcactggcacaccgtcgccaaagagacatgcagtgagaagagtaccaacttgcatgactacggcatgttgctgccctgcggaattgacaagttccgaggggtagagtttgtgtgttgcccactggctgaagaaagtgacaatgtggattctgctgatgcggaggaggatgactcggatgtctggtggggcggagcagacacagactatgcagatgggagtgaagacaagtagtagaagtataaagcgtgaggggatcctctaatctcacca

SEQ ID NO: 312904 - DNA, 1374 bp, Homo sapiens
ggccggatcagctgactcgcctggctctgagccccgccgccgcgctcgggctccgtcagtttcctcggcagcggtaggcgagagcacgcggaggagcgtgcgcgggggccccgggagacggcggcggtggcggcgcgggcagagcaaggacgcggcggatcccactcgcacagcagcgcactcggtgccccgcgcagggtcgcgatgctgcccggtttggcactgctcctgctggccgcctggacggctcgggcgctggaggtacccactgatggtaatgctggcctgctggctgaaccccagattgccatgttctgtggcagactgaacatgcacatgaatgtccagaatgggaagtgggattcagatccatcagggaccaaaacctgcattgataccaaggaaggcatcctgcagtattgccaagaagtctaccctgaactgcagatcaccaatgtggtagaagccaaccaaccagtgaccatccagaactggtgcaagcggggccgcaagcagtgcaagacccatccccactttgtgattccctaccgctgcttagttggtgagtttgtaagtgatgcccttctcgttcctgacaagtgcaaattcttacaccaggagaggatggatgtttgcgaaactcatcttcactggcacaccgtcgccaaagagacatgcagtgagaagagtaccaacttgcatgactacggcatgttgctgccctgcggaattgacaagttccgaggggtagagtttgtgtgttgcccactggctgaagaaagtgacaatgtggattctgctgatgcggaggaggatgactcggatgtctggtggggcggagcagacacagactatgcagatgggagtgaagacaaagtagtagaagtagcagaggaggaagaagtggctgaggtggaagaagaagaagccgatgatgacgaggacgatgaggatggtgatgaggtagaggaagaggctgaggaaccctacgaagaagccacagagagaaccaccagcattgccaccaccaccaccaccaccacagagtctgtggaagaggtggttcgagagaagtggtataaggaagtacattctggccaggcacgatggctcatgctgtaatcccagcactttgggaggccgaggtgggtgcatcacctgaggtcaggagtttgagaccagcctggccaacatggtgaaacccctcgctactaaaaatacaaaaattagccgggcgtggtggcacacacctgtggtcccagctactcgggaggctgaagcaggagaatcgcttgaacccgggagacggaggttgcagtaagccgagttcactccattgtactctagcctgggtgacagagcgagattcgtctc

SEQ ID NO: 312905 - DNA, 2855 bp, Homo sapiens
tgagatgaagtataaagcgttgagctcaacgctttatacttcccagaatgggaagtgggattcagatccatcagggaccaaaacctgcattgataccaaggaaggcatcctgcagtattgccaagaagtctaccctgaactgcagatcaccaatgtggtagaagccaaccaaccagtgaccatccagaactggtgcaagcggggccgcaagcagtgcaagacccatccccactttgtgattccctaccgctgcttagttggtgagtttgtaagtgatgcccttctcgttcctgacaagtgcaaattcttacaccaggagaggatggatgtttgcgaaactcatcttcactggcacaccgtcgccaaagagacatgcagtgagaagagtaccaacttgcatgactacggcatgttgctgccctgcggaattgacaagttccgaggggtagagtttgtgtgttgcccactggctgaagaaagtgacaatgtggattctgctgatgcggaggaggatgactcggatgtctggtggggcggagcagacacagactatgcagatgggagtgaagacaaagtagtagaagtagcagaggaggaagaagtggctgaggtggaagaagaagaagccgatgatgacgaggacgatgaggatggtgatgaggtagaggaagaggctgaggaaccctacgaagaagccacagagagaaccaccagcattgccaccaccaccaccaccaccacagagtctgtggaagaggtggttcgagttcctacaacagcagccagtacccctgatgccgttgacaagtatctcgagacacctggggatgagaatgaacatgcccatttccagaaagccaaagagaggcttgaggccaagcaccgagagagaatgtcccaggtcatgagagaatgggaagaggcagaacgtcaagcaaagaacttgcctaaagctgataagaaggcagttatccagcatttccaggagaaagtggaatctttggaacaggaagcagccaacgagagacagcagctggtggagacacacatggccagagtggaagccatgctcaatgaccgccgccgcctggccctggagaactacatcaccgctctgcaggctgttcctcctcggcctcgtcacgtgttcaatatgctaaagaagtatgtccgcgcagaacagaaggacagacagcacaccctaaagcatttcgagcatgtgcgcatggtggatcccaagaaagccgctcagatccggtcccaggttatgacacacctccgtgtgatttatgagcgcatgaatcagtctctctccctgctctacaacgtgcctgcagtggccgaggagattcaggatgaagttgatgagctgcttcagaaagagcaaaactattcagatgacgtcttggccaacatgattagtgaaccaaggatcagttacggaaacgatgctctcatgccatctttgaccgaaacgaaaaccaccgtggagctccttcccgtgaatggagagttcagcctggacgatctccagccgtggcattcttttggggctgactctgtgccagccaacacagaaaacgaagttgagcctgttgatgcccgccctgctgccgaccgaggactgaccactcgaccaggttctgggttgacaaatatcaagacggaggagatctctgaagtgaagatggatgcagaattccgacatgactcaggatatgaagttcatcatcaaaaattggtgttctttgcagaagatgtgggttcaaacaaaggtgcaatcattggactcatggtgggcggtgttgtcatagcgacagtgatcgtcatcaccttggtgatgctgaagaagaaacagtacacatccattcatcatggtgtggtggaggttgacgccgctgtcaccccagaggagcgccacctgtccaagatgcagcagaacggctacgaaaatccaacctacaagttctttgagcagatgcagaactagacccccgccacagcagcctctgaagttggacagcaaaaccattgcttcactacccatcggtgtccatttatagaataatgtgggaagaaacaaacccgttttatgatttactcattatcgccttttgacagctgtgctgtaacacaagtagatgcctgaacttgaattaatccacacatcagtaatgtattctatctctctttacattttggtctctatactacattattaatgggttttgtgtactgtaaagaatttagctgtatcaaactagtgcatgaatagattctctcctgattatttatcacatagccccttagccagttgtatattattcttgtggtttgtgacccaattaagtcctactttacatatgctttaagaatcgatgggggatgcttcatgtgaacgtgggagttcagctgcttctcttgcctaagtattcctttcctgatcactatgcattttaaagttaaacatttttaagtatttcagatgctttagagagattttttttccatgactgcattttactgtacagattgctgcttctgctatatttgtgatataggaattaagaggatacacacgtttgtttcttcgtgcctgttttatgtgcacacattaggcattgagacttcaagcttttctttttttgtccacgtatctttgggtctttgataaagaaaagaatccctgttcattgtaagcacttttacggggcgggtggggaggggtgctctgctggtcttcaattaccaagaattctccaaaacaattttctgcaggatgattgtacagaatcattgcttatgacatgatcgctttctacactgtattacataaataaattaaataaaataac

SEQ ID NO: 312906 - DNA, 2819 bp, Homo sapiens
tcatctagaggatcccgtgtcatcccccttcgtgattccctaccgctgcttagttggtgagtttgtaagtgatgcccttctcgttcctgacaagtgcaaattcttacaccaggagaggatggatgtttgcgaaactcatcttcactggcacaccgtcgccaaagagacatgcagtgagaagagtaccaacttgcatgactacggcatgttgctgccctgcggaattgacaagttccgaggggtagagtttgtgtgttgcccactggctgaagaaagtgacaatgtggattctgctgatgcggaggaggatgactcggatgtctggtggggcggagcagacacagactatgcagatgggagtgaagacaaagtagtagaagtagcagaggaggaagaagtggctgaggtggaagaagaagaagccgatgatgacgaggacgatgaggatggtgatgaggtagaggaagaggctgaggaaccctacgaagaagccacagagagaaccaccagcattgccaccaccaccaccaccaccacagagtctgtggaagaggtggttcgagaggtgtgctctgaacaagccgagacggggccgtgccgagcaatgatctcccgctggtactttgatgtgactgaagggaagtgtgccccattcttttacggcggatgtggcggcaaccggaacaactttgacacagaagagtactgcatggccgtgtgtggcagcgccattcctacaacagcagccagtacccctgatgccgttgacaagtatctcgagacacctggggatgagaatgaacatgcccatttccagaaagccaaagagaggcttgaggccaagcaccgagagagaatgtcccaggtcatgagagaatgggaagaggcagaacgtcaagcaaagaacttgcctaaagctgataagaaggcagttatccagcatttccaggagaaagtggaatctttggaacaggaagcagccaacgagagacagcagctggtggagacacacatggccagagtggaagccatgctcaatgaccgccgccgcctggccctggagaactacatcaccgctctgcaggctgttcctcctcggcctcgtcacgtgttcaatatgctaaagaagtatgtccgcgcagaacagaaggacagacagcacaccctaaagcatttcgagcatgtgcgcatggtggatcccaagaaagccgctcagatccggtcccaggttatgacacacctccgtgtgatttatgagcgcatgaatcagtctctctccctgctctacaacgtgcctgcagtggccgaggagattcaggatgaagttgatgagctgcttcagaaagagcaaaactattcagatgacgtcttggccaacatgattagtgaaccaaggatcagttacggaaacgatgctctcatgccatctttgaccgaaacgaaaaccaccgtggagctccttcccgtgaatggagagttcagcctggacgatctccagccgtggcattcttttggggctgactctgtgccagccaacacagaaaacgaagttgagcctgttgatgcccgccctgctgccgaccgaggactgaccactcgaccaggttctgggttgacaaatatcaagacggaggagatctctgaagtgaagatggatgcagaattccgacatgactcaggatatgaagttcatcatcaaaaattggtgttctttgcagaagatgtgggttcaaacaaaggtgcaatcattggactcatggtgggcggtgttgtcatagcgacagtgatcgtcatcaccttggtgatgctgaagaagaaacagtacacatccattcatcatggtgtggtggaggttgacgccgctgtcaccccagaggagcgccacctgtccaagatgcagcagaacggctacgaaaatccaacctacaagttctttgagcagatgcagaactagacccccgccacagcagcctctgaagttggacagcaaaaccattgcttcactacccatcggtgtccatttatagaataatgtgggaagaaacaaacccgttttatgatttactcattatcgccttttgacagctgtgctgtaacacaagtagatgcctgaacttgaattaatccacacatcagtaatgtattctatctctctttacattttggtctctatactacattattaatgggttttgtgtactgtaaagaatttagctgtatcaaactagtgcatgaatagattctctcctgattatttatcacatagccccttagccagttgtatattattcttgtggtttgtgacccaattaagtcctactttacatatgctttaagaatcgatgggggatgcttcatgtgaacgtgggagttcagctgcttctcttgcctaagtattcctttcctgatcactatgcattttaaagttaaacatttttaagtatttcagatgctttagagagattttttttccatgactgcattttactgtacagattgctgcttctgctatatttgtgatataggaattaagaggatacacacgtttgtttcttcgtgcctgttttatgtgcacacattaggcattgagacttcaagcttttctttttttgtccacgtatctttgggtctttgataaagaaaagaatccctgttcattgtaagcacttttacggggcgggtggggaggggtgctctgctggtcttcaattaccaagaattctccaaaacaattttctgcaggatgattgtacagaatcattgcttatgacatgatcgctttctacactgtattacataaataaattaaataaaataac

SEQ ID NO: 312907 - DNA, 2268 bp, Homo sapiens
acagggcttggtaacccgagcctcccggcaacgtatacccgggcgcaagtggaagaaggaaccccacagtcattgccaccaccaccaccaccaccacagagtctgtggaagaggtggttcgagtgtcccaaagtttactcaagactacccaggaacctcttgcccgagatcctgttaaacttcctacaacagcagccagtacccctgatgccgttgacaagtatctcgagacacctggggatgagaatgaacatgcccatttccagaaagccaaagagaggcttgaggccaagcaccgagagagaatgtcccaggtcatgagagaatgggaagaggcagaacgtcaagcaaagaacttgcctaaagctgataagaaggcagttatccagcatttccaggagaaagtggaatctttggaacaggaagcagccaacgagagacagcagctggtggagacacacatggccagagtggaagccatgctcaatgaccgccgccgcctggccctggagaactacatcaccgctctgcaggctgttcctcctcggcctcgtcacgtgttcaatatgctaaagaagtatgtccgcgcagaacagaaggacagacagcacaccctaaagcatttcgagcatgtgcgcatggtggatcccaagaaagccgctcagatccggtcccaggttatgacacacctccgtgtgatttatgagcgcatgaatcagtctctctccctgctctacaacgtgcctgcagtggccgaggagattcaggatgaagttgatgagctgcttcagaaagagcaaaactattcagatgacgtcttggccaacatgattagtgaaccaaggatcagttacggaaacgatgctctcatgccatctttgaccgaaacgaaaaccaccgtggagctccttcccgtgaatggagagttcagcctggacgatctccagccgtggcattcttttggggctgactctgtgccagccaacacagaaaacgaagttgagcctgttgatgcccgccctgctgccgaccgaggactgaccactcgaccaggttctgggttgacaaatatcaagacggaggagatctctgaagtgaagatggatgcagaattccgacatgactcaggatatgaagttcatcatcaaaaattggtgttctttgcagaagatgtgggttcaaacaaaggtgcaatcattggactcatggtgggcggtgttgtcatagcgacagtgatcgtcatcaccttggtgatgctgaagaagaaacagtacacatccattcatcatggtgtggtggaggttgacgccgctgtcaccccagaggagcgccacctgtccaagatgcagcagaacggctacgaaaatccaacctacaagttctttgagcagatgcagaactagacccccgccacagcagcctctgaagttggacagcaaaaccattgcttcactacccatcggtgtccatttatagaataatgtgggaagaaacaaacccgttttatgatttactcattatcgccttttgacagctgtgctgtaacacaagtagatgcctgaacttgaattaatccacacatcagtaatgtattctatctctctttacattttggtctctatactacattattaatgggttttgtgtactgtaaagaatttagctgtatcaaactagtgcatgaatagattctctcctgattatttatcacatagccccttagccagttgtatattattcttgtggtttgtgacccaattaagtcctactttacatatgctttaagaatcgatgggggatgcttcatgtgaacgtgggagttcagctgcttctcttgcctaagtattcctttcctgatcactatgcattttaaagttaaacatttttaagtatttcagatgctttagagagattttttttccatgactgcattttactgtacagattgctgcttctgctatatttgtgatataggaattaagaggatacacacgtttgtttcttcgtgcctgttttatgtgcacacattaggcattgagacttcaagcttttctttttttgtccacgtatctttgggtctttgataaagaaaagaatccctgttcattgtaagcacttttacggggcgggtggggaggggtgctctgctggtcttcaattaccaagaattctccaaaacaattttctgcaggatgattgtacagaatcattgcttatgacatgatcgctttctacactgtattacataaataaattaaataaaataac

SEQ ID NO: 312908 - DNA, 3356 bp, Homo sapiens
tgagatgaagtataaagcgttgagctcaacgctttatacttcccagaatgggaagtgggattcagatccatcagggaccaaaacctgcattgataccaaggaaggcatcctgcagtattgccaagaagtctaccctgaactgcagatcaccaatgtggtagaagccaaccaaccagtgaccatccagaactggtgcaagcggggccgcaagcagtgcaagacccatccccactttgtgattccctaccgctgcttagttggtgagtttgtaagtgatgcccttctcgttcctgacaagtgcaaattcttacaccaggagaggatggatgtttgcgaaactcatcttcactggcacaccgtcgccaaagagacatgcagtgagaagagtaccaacttgcatgactacggcatgttgctgccctgcggaattgacaagttccgaggggtagagtttgtgtgttgcccactggctgaagaaagtgacaatgtggattctgctgatgcggaggaggatgactcggatgtctggtggggcggagcagacacagactatgcagatgggagtgaagacaaagtagtagaagtagcagaggaggaagaagtggctgaggtggaagaagaagaagccgatgatgacgaggacgatgaggatggtgatgaggtagaggaagaggctgaggaaccctacgaagaagccacagagagaaccaccagcattgccaccaccaccaccaccaccacagagtctgtggaagaggtggttcgagaggtgtgctctgaacaagccgagacggggccgtgccgagcaatgatctcccgctggtactttgatgtgactgaagggaagtgtgccccattcttttacggcggatgtggcggcaaccggaacaactttgacacagaagagtactgcatggccgtgtgtggcagcgccattcctacaacagcagccagtacccctgatgccgttgacaagtatctcgagacacctggggatgagaatgaacatgcccatttccagaaagccaaagagaggcttgaggccaagcaccgagagagaatgtcccaggtcatgagagaatgggaagaggcagaacgtcaagcaaagaacttgcctaaagctgataagaaggcagttatccagcatttccaggagaaagtggaatctttggaacaggaagcagccaacgagagacagcagctggtggagacacacatggccagagtggaagccatgctcaatgaccgccgccgcctggccctggagaactacatcaccgctctgcaggctgttcctcctcggcctcgtcacgtgttcaatatgctaaagaagtatgtccgcgcagaacagaaggacagacagcacaccctaaagcatttcgagcatgtgcgcatggtggatcccaagaaagccgctcagatccggtcccaggttatgacacacctccgtgtgatttatgagcgcatgaatcagtctctctccctgctctacaacgtgcctgcagtggccgaggagattcaggatgaagttgatgagctgcttcagaaagagcaaaactattcagatgacgtcttggccaacatgattagtgaaccaaggatcagttacggaaacgatgctctcatgccatctttgaccgaaacgaaaaccaccgtggagctccttcccgtgaatggagagttcagcctggacgatctccagccgtggcattcttttggggctgactctgtgccagccaacacagaaaacgaagttgagcctgttgatgcccgccctgctgccgaccgaggactgaccactcgaccaggttctgggttgacaaatatcaagacggaggagatctctgaagtgaagatggatgcagaattccgacatgactcaggatatgaagttcatcatcaaaaattggtgttctttgcagaagatgtgggttcaaacaaaggtgcaatcattggactcatggtgggcggtgttgtcatagcgacagtgatcgtcatcaccttggtgatgctgaagaagaaacagtacacatccattcatcatggtgtggtggaggttgacgccgctgtcaccccagaggagcgccacctgtccaagatgcagcagaacggctacgaaaatccaacctacaagttctttgagcagatgcagaactagacccccgccacagcagcctctgaagttggacagcaaaaccattgcttcactacccatcggtgtccatttatagaataatgtgggaagaaacaaacccgttttatgatttactcattatcgccttttgacagctgtgctgtaacacaagtagatgcctgaacttgaattaatccacacatcagtaatgtattctatctctctttacattttggtctctatactacattattaatgggttttgtgtactgtaaagaatttagctgtatcaaactagtgcatgaatagattctctcctgattatttatcacatagccccttagccagttgtatattattcttgtggtttgtgacccaattaagtcctactttacatatgctttaagaatcgatgggggatgcttcatgtgaacgtgggagttcagctgcttctcttgcctaagtattcctttcctgatcactatgcattttaaagttaaacatttttaagtatttcagatgctttagagagattttttttccatgactgcattttactgtacagattgctgcttctgctatatttgtgatataggaattaagaggatacacacgtttgtttcttcgtgcctgttttatgtgcacacattaggcattgagacttcaagcttttctttttttgtccacgtatctttgggtctttgataaagaaaagaatccctgttcattgtaagcacttttacggggcgggtggggaggggtgctctgctggtcttcaattaccaagaattctccaaaacaattttctgcaggatgattgtacagaatcattgcttatgacatgatcgctttctacactgtattacataaataaattaaataaaataaccccgggcaagacttttctttgaaggatgactacagacattaaataatcgaagtaattttgggtggggagaagaggcagattcaattttctttaaccagtctgaagtttcatttatgatacaaaagaagatgaaaatggaagtggcaatataaggggatgaggaaggcatgcctggacaaacccttcttttaagatgtgtcttcaatttgtataaaatggtgttttcatgtaaataaatacaataaagaaggacaataagttattttccttctttattgtacgattctaactgggtctatcagttcatctttaaattgttaagtaagataagat

SEQ ID NO: 312909 - DNA, 1735 bp, Homo sapiens
tagaggatcccccggtgtgtcatgcatcgtgggtagtccagagtgtgtgttcatgcagaacagaaggacagacagcacaccctaaagcatttcgagcatgtgcgcatggtggatcccaagaaagccgctcagatccggtcccaggttatgacacacctccgtgtgatttatgagcgcatgaatcagtctctctccctgctctacaacgtgcctgcagtggccgaggagattcaggatgaagttgatgagctgcttcagaaagagcaaaactattcagatgacgtcttggccaacatgattagtgaaccaaggatcagttacggaaacgatgctctcatgccatctttgaccgaaacgaaaaccaccgtggagctccttcccgtgaatggagagttcagcctggacgatctccagccgtggcattcttttggggctgactctgtgccagccaacacagaaaacgaagttgagcctgttgatgcccgccctgctgccgaccgaggactgaccactcgaccaggttctgggttgacaaatatcaagacggaggagatctctgaagtgaagatggatgcagaattccgacatgactcaggatatgaagttcatcatcaaaaattggtgttctttgcagaagatgtgggttcaaacaaaggtgcaatcattggactcatggtgggcggtgttgtcatagcgacagtgatcgtcatcaccttggtgatgctgaagaagaaacagtacacatccattcatcatggtgtggtggaggttgacgccgctgtcaccccagaggagcgccacctgtccaagatgcagcagaacggctacgaaaatccaacctacaagttctttgagcagatgcagaactagacccccgccacagcagcctctgaagttggacagcaaaaccattgcttcactacccatcggtgtccatttatagaataatgtgggaagaaacaaacccgttttatgatttactcattatcgccttttgacagctgtgctgtaacacaagtagatgcctgaacttgaattaatccacacatcagtaatgtattctatctctctttacattttggtctctatactacattattaatgggttttgtgtactgtaaagaatttagctgtatcaaactagtgcatgaatagattctctcctgattatttatcacatagccccttagccagttgtatattattcttgtggtttgtgacccaattaagtcctactttacatatgctttaagaatcgatgggggatgcttcatgtgaacgtgggagttcagctgcttctcttgcctaagtattcctttcctgatcactatgcattttaaagttaaacatttttaagtatttcagatgctttagagagattttttttccatgactgcattttactgtacagattgctgcttctgctatatttgtgatataggaattaagaggatacacacgtttgtttcttcgtgcctgttttatgtgcacacattaggcattgagacttcaagcttttctttttttgtccacgtatctttgggtctttgataaagaaaagaatccctgttcattgtaagcacttttacggggcgggtggggaggggtgctctgctggtcttcaattaccaagaattctccaaaacaattttctgcaggatgattgtacagaatcattgcttatgacatgatcgctttctacactgtattacataaataaattaaataaaataac

SEQ ID NO: 312910 - DNA, 2961 bp, Homo sapiens
tgagatgaagtataaagcgttgagctcaacgctttatacttcccagaatgggaagtgggattcagatccatcagggaccaaaacctgcattgataccaaggaaggcatcctgcagtattgccaagaagtctaccctgaactgcagatcaccaatgtggtagaagccaaccaaccagtgaccatccagaactggtgcaagcggggccgcaagcagtgcaagacccatccccactttgtgattccctaccgctgcttagttggtgagtttgtaagtgatgcccttctcgttcctgacaagtgcaaattcttacaccaggagaggatggatgtttgcgaaactcatcttcactggcacaccgtcgccaaagagacatgcagtgagaagagtaccaacttgcatgactacggcatgttgctgccctgcggaattgacaagttccgaggggtagagtttgtgtgttgcccactggctgaagaaagtgacaatgtggattctgctgatgcggaggaggatgactcggatgtctggtggggcggagcagacacagactatgcagatgggagtgaagacaaagtagtagaagtagcagaggaggaagaagtggctgaggtggaagaagaagaagccgatgatgacgaggacgatgaggatggtgatgaggtagaggaagaggctgaggaaccctacgaagaagccacagagagaaccaccagcattgccaccaccaccaccaccaccacagagtctgtggaagaggtggttcgagaggtgtgctctgaacaagccgagacggggccgtgccgagcaatgatctcccgctggtactttgatgtgactgaagggaagtgtgccccattcttttacggcggatgtggcggcaaccggaacaactttgacacagaagagtactgcatggccgtgtgtggcagcgccattcctacaacagcagccagtacccctgatgccgttgacaagtatctcgagacacctggggatgagaatgaacatgcccatttccagaaagccaaagagaggcttgaggccaagcaccgagagagaatgtcccaggtcatgagagaatgggaagaggcagaacgtcaagcaaagaacttgcctaaagctgataagaaggcagttatccagcatttccaggagaaagtggaatctttggaacaggaagcagccaacgagagacagcagctggtggagacacacatggccagagtggaagccatgctcaatgaccgccgccgcctggccctggagaactacatcaccgctctgcaggctgttcctcctcggcctcgtcacgtgttcaatatgctaaagaagtatgtccgcgcagaacagaaggacagacagcacaccctaaagcatttcgagcatgtgcgcatggtggatcccaagaaagccgctcagatccggtcccaggttatgacacacctccgtgtgatttatgagcgcatgaatcagtctctctccctgctctacaacgtgcctgcagtggccgaggagattcaggatgaagttgatgagctgcttcagaaagagcaaaactattcagatgacgtcttggccaacatgattagtgaaccaaggatcagttacggaaacgatgctctcatgccatctttgaccgaaacgaaaaccaccgtggagctccttcccgtgaatggagagttcagcctggacgatctccagccgtggcattcttttggggctgactctgtgccagccaacacagaaaacgaagttgagcctgttgatgcccgccctgctgccgaccgaggactgaccactcgaccaggttctgggttgacaaatatcaagacggaggagatctctgaagtgaagatggatgcagaattccgacatgactcaggatatgaagttcatcatcaaaaattggtgttctttgcagaagatgtgggttcaaacaaaggtgcaatcattggactcatggtgggcggtgttgtcatagcgacagtgatcgtcatcaccttggtgatgctgaagaagaaacagtacacatccattcatcatggtgtggtggaggttgacgccgctgtcaccccagaggagcgccacctgtccaagatgcagcagaacggctacgaaaatccaacctacaagttctttgagcagatgcagaactagacccccgccacagcagcctctgaagttggacagcaaaaccattgcttcactacccatcggtgtccatttatagaataatgtgggaagaaacaaacccgttttatgatttactcattatcgccttttgacagctgtgctgtaacacaagtagatgcctgaacttgaattaatccacacatcagtaatgtattctatctctctttacattttggtctctatactacattattaatgggttttgtgtactgtaaagaatttagctgtatcaaactagtgcatgaatagattctctcctgattatttatcacatagccccttagccagttgtatattattcttgtggtttgtgacccaattaagtcctactttacatatgctttaagaatcgatgggggatgcttcatgtgaacgtgggagttcagctgcttctcttgcctaagtattcctttcctgatcactatgcattttaaagttaaacatttttaagtatttcagatgctttagagagattttttttccatgactgcattttactgtacagattgctgcttctgctatatttgtgatataggaattaagaggatacacacgtttgtttcttcgtgcctgttttatgtgcacacattaggcattgagacttcaagcttttctttttttgtccacgtatctttgggtctttgataaagtcttcaattaccaagaattctccaaaacaattttctgcaggatgattgtacagaatcattgcttatgacatgatcgctttctacactgtattacataaataaattaaataaaataac

SEQ ID NO: 312911 - DNA, 2341 bp, Homo sapiens
tgagatgaagtataaagcgttgagctcaacgctttatacttcccagaatgggaagtgggattcagatccatcagggaccaaaacctgcattgataccaaggaaggcatcctgcagtattgccaagaagtctaccctgaactgcagatcaccaatgtggtagaagccaaccaaccagtgaccatccagaactggtgcaagcggggccgcaagcagtgcaagacccatccccactttgtgattccctaccgctgcttagttggtgagtttgtaagtgatgcccttctcgttcctgacaagtgcaaattcttacaccaggagaggatggatgtttgcgaaactcatcttcactggcacaccgtcgccaaagagacatgcagtgagaagagtaccaacttgcatgactacggcatgttgctgccctgcggaattgacaagttccgaggggtagagtttgtgtgttgcccactggctgaagaaagtgacaatgtggattctgctgatgcggaggaggatgactcggatgtctggtggggcggagcagacacagactatgcagatgggagtgaagacaaagtagtagaagtagcagaggaggaagaagtggctgaggtggaagaagaagaagccgatgatgacgaggacgatgaggatggtgatgaggtagaggaagaggctgaggaaccctacgaagaagccacagagagaaccaccagcattgccaccaccaccaccaccaccacagagtctgtggaagaggtggttcgagaggtgtgctctgaacaagccgagacggggccgtgccgagcaatgatctcccgctggtactttgatgtgactgaagggaagtgtgccccattcttttacggcggatgtggcggcaaccggaacaactttgacacagaagagtactgcatggccgtgtgtggcagcgccatgtcccaaagtttactcaagactacccaggaacctcttgcccgagatcctgttaaacttcctacaacagcagccagtacccctgatgccgttgacaagtatctcgagacacctggggatgagaatgaacatgcccatttccagaaagccaaagagaggcttgaggccaagcaccgagagagaatgtcccaggttctgggttgacaaatatcaagacggaggagatctctgaagtgaagatggatgcagaattccgacatgactcaggatatgaagttcatcatcaaaaattggtgttctttgcagaagatgtgggttcaaacaaaggtgcaatcattggactcatggtgggcggtgttgtcatagcgacagtgatcgtcatcaccttggtgatgctgaagaagaaacagtacacatccattcatcatggtgtggtggaggttgacgccgctgtcaccccagaggagcgccacctgtccaagatgcagcagaacggctacgaaaatccaacctacaagttctttgagcagatgcagaactagacccccgccacagcagcctctgaagttggacagcaaaaccattgcttcactacccatcggtgtccatttatagaataatgtgggaagaaacaaacccgttttatgatttactcattatcgccttttgacagctgtgctgtaacacaagtagatgcctgaacttgaattaatccacacatcagtaatgtattctatctctctttacattttggtctctatactacattattaatgggttttgtgtactgtaaagaatttagctgtatcaaactagtgcatgaatagattctctcctgattatttatcacatagccccttagccagttgtatattattcttgtggtttgtgacccaattaagtcctactttacatatgctttaagaatcgatgggggatgcttcatgtgaacgtgggagttcagctgcttctcttgcctaagtattcctttcctgatcactatgcattttaaagttaaacatttttaagtatttcagatgctttagagagattttttttccatgactgcattttactgtacagattgctgcttctgctatatttgtgatataggaattaagaggatacacacgtttgtttcttcgtgcctgttttatgtgcacacattaggcattgagacttcaagcttttctttttttgtccacgtatctttgggtctttgataaagaaaagaatccctgttcattgtaagcacttttacggggcgggtggggaggggtgctctgctggtcttcaattaccaagaattctccaaaacaattttctgcaggatgattgtacagaatcattgcttatgacatgatcgctttctacactgtattacataaataaattaaataaaataac

SEQ ID NO: 312912 - DNA, 1688 bp, Homo sapiens
aggctagaaagctagttccagcctgacagtttcatcgtaaaagccaagctgttctattaacttccatattcctcaaacagataactcacttcctcaattttcctctgggggaaaatacatgtccatgtgcagcatcaaaagaacagcttacttaccaacttcatcctgaacctcctcggccactgcaggcacgttgtatgagctgcttcagaaagagcaaaactattcagatgacgtcttggccaacatgattagtgaaccaaggatcagttacggaaacgatgctctcatgccatctttgaccgaaacgaaaaccaccgtggagctccttcccgtgaatggagagttcagcctggacgatctccagccgtggcattcttttggggctgactctgtgccagccaacacagaaaacgaagttgagcctgttgatgcccgccctgctgccgaccgaggactgaccactcgaccaggttctgggttgacaaatatcaagacggaggagatctctgaagtgaagatggatgcagaattccgacatgactcaggatatgaagttcatcatcaaaaattggtgttctttgcagaagatgtgggttcaaacaaaggtgcaatcattggactcatggtgggcggtgttgtcatagcgacagtgatcgtcatcaccttggtgatgctgaagaagaaacagtacacatccattcatcatggtgtggtggaggttgacgccgctgtcaccccagaggagcgccacctgtccaagatgcagcagaacggctacgaaaatccaacctacaagttctttgagcagatgcagaactagacccccgccacagcagcctctgaagttggacagcaaaaccattgcttcactacccatcggtgtccatttatagaataatgtgggaagaaacaaacccgttttatgatttactcattatcgccttttgacagctgtgctgtaacacaagtagatgcctgaacttgaattaatccacacatcagtaatgtattctatctctctttacattttggtctctatactacattattaatgggttttgtgtactgtaaagaatttagctgtatcaaactagtgcatgaatagattctctcctgattatttatcacatagccccttagccagttgtatattattcttgtggtttgtgacccaattaagtcctactttacatatgctttaagaatcgatgggggatgcttcatgtgaacgtgggagttcagctgcttctcttgcctaagtattcctttcctgatcactatgcattttaaagttaaacatttttaagtatttcagatgctttagagagattttttttccatgactgcattttactgtacagattgctgcttctgctatatttgtgatataggaattaagaggatacacacgtttgtttcttcgtgcctgttttatgtgcacacattaggcattgagacttcaagcttttctttttttgtccacgtatctttgggtctttgataaagaaaagaatccctgttcattgtaagcacttttacggggcgggtggggaggggtgctctgctggtcttcaattaccaagaattctccaaaacaattttctgcaggatgattgtacagaatcattgcttatgacatgatcgctttctacactgtattacataaataaattaaataaaataac

SEQ ID NO: 312913 - DNA, 2969 bp, Homo sapiens
tgagatgaagtataaagcgttgagctcaacgctttatacttcccagaatgggaagtgggattcagatccatcagggaccaaaacctgcattgataccaaggaaggcatcctgcagtattgccaagaagtctaccctgaactgcagatcaccaatgtggtagaagccaaccaaccagtgaccatccagaactggtgcaagcggggccgcaagcagtgcaagacccatccccactttgtgattccctaccgctgcttagttggtgagtttgtaagtgatgcccttctcgttcctgacaagtgcaaattcttacaccaggagaggatggatgtttgcgaaactcatcttcactggcacaccgtcgccaaagagacatgcagtgagaagagtaccaacttgcatgactacggcatgttgctgccctgcggaattgacaagttccgaggggtagagtttgtgtgttgcccactggctgaagaaagtgacaatgtggattctgctgatgcggaggaggatgactcggatgtctggtggggcggagcagacacagactatgcagatgggagtgaagacaaagtagtagaagtagcagaggaggaagaagtggctgaggtggaagaagaagaagccgatgatgacgaggacgatgaggatggtgatgaggtagaggaagaggctgaggaaccctacgaagaagccacagagagaaccaccagcattgccaccaccaccaccaccaccacagagtctgtggaagaggtggttcgagaggtgtgctctgaacaagccgagacggggccgtgccgagcaatgatctcccgctggtactttgatgtgactgaagggaagtgtgccccattcttttacggcggatgtggcggcaaccggaacaactttgacacagaagagtactgcatggccgtgtgtggcagcgccattcctacaacagcagccagtacccctgatgccgttgacaagtatctcgagacacctggggatgagaatgaacatgcccatttccagaaagccaaagagaggcttgaggccaagcaccgagagagaatgtcccaggtcatgagagaatgggaagaggcagaacgtcaagcaaagaacttgcctaaagctgataagaaggcagttatccagcatttccaggagaaagtggaatctttggaacaggaagcagccaacgagagacagcagctggtggagacacacatggccagagtggaagccatgctcaatgaccgccgccgcctggccctggagaactacatcaccgctctgcaggctgttcctcctcggcctcgtcacgtgttcaatatgctaaagaagtatgtccgcgcagaacagaaggacagacagcacaccctaaagcatttcgagcatgtgcgcatggtggatcccaagaaagccgctcagatccggtcccaggttatgacacacctccgtgtgatttatgagcgcatgaatcagtctctctccctgctctacaacgtgcctgcagtggccgaggagattcaggatgaagttgatgagctgcttcagaaagagcaaaactattcagatgacgtcttggccaacatgattagtgaaccaaggatcagttacggaaacgatgctctcatgccatctttgaccgaaacgaaaaccaccgtggagctccttcccgtgaatggagagttcagcctggacgatctccagccgtggcattcttttggggctgactctgtgccagccaacacagaaaacgaagttgagcctgttgatgcccgccctgctgccgaccgaggactgaccactcgaccaggttctgggttgacaaatatcaagacggaggagatctctgaagtgaagatggatgcagaattccgacatgactcaggatatgaagttcatcatcaaaaattggtgttctttgcagaagatgtgggttcaaacaaaggtgcaatcattggactcatggtgggcggtgttgtcatagcgacagtgatcgtcatcaccttggtgatgctgaagaagaaacagtacacatccattcatcatggtgtggtggaggttgacgccgctgtcaccccagaggagcgccacctgtccaagatgcagcagaacggctacgaaaatccaacctacaagttctttgagcagatgcagaactagacccccgccacagcagcctctgaagttggacagcaacaaacccgttttatgatttactcattatcgccttttgacagctgtgctgtaacacaagtagatgcctgaacttgaattaatccacacatcagtaatgtattctatctctctttacattttggtctctatactacattattaatgggttttgtgtactgtaaagaatttagctgtatcaaactagtgcatgaatagattctctcctgattatttatcacatagccccttagccagttgtatattattcttgtggtttgtgacccaattaagtcctactttacatatgctttaagaatcgatgggggatgcttcatgtgaacgtgggagttcagctgcttctcttgcctaagtattcctttcctgatcactatgcattttaaagttaaacatttttaagtatttcagatgctttagagagattttttttccatgactgcattttactgtacagattgctgcttctgctatatttgtgatataggaattaagaggatacacacgtttgtttcttcgtgcctgttttatgtgcacacattaggcattgagacttcaagcttttctttttttgtccacgtatctttgggtctttgataaagaaaagaatccctgttcattgtaagcacttttacggggcgggtggggaggggtgctctgctggtcttcaattaccaagaattctccaaaacaattttctgcaggatgattgtacagaatcattgcttatgacatgatcgctttctacactgtattacataaataaattaaataaaataac

SEQ ID NO: 312914 - DNA, 2502 bp, Homo sapiens
tgagatgaagtataaagcgttgagctcaacgctttatacttcccagaatgggaagtgggattcagatccatcagggaccaaaacctgcattgataccaaggaaggcatcctgcagtattgccaagaagtctaccctgaactgcagatcaccaatgtggtagaagccaaccaaccagtgaccatccagaactggtgcaagcggggccgcaagcagtgcaagacccatccccactttgtgattccctaccgctgcttagttggtgagtttgtaagtgatgcccttctcgttcctgacaagtgcaaattcttacaccaggagaggatggatgtttgcgaaactcatcttcactggcacaccgtcgccaaagagacatgcagtgagaagagtaccaacttgcatgactacggcatgttgctgccctgcggaattgacaagttccgaggggtagagtttgtgtgttgcccactggctgaagaaagtgacaatgtggattctgctgatgcggaggaggatgactcggatgtctggtggggcggagcagacacagactatgcagatgggagtgaagacaaagtagtagaagtagcagaggaggaagaagtggctgaggtggaagaagaagaagccgatgatgacgaggacgatgaggatggtgatgaggtagaggaagaggctgaggaaccctacgaagaagccacagagagaaccaccagcattgccaccaccaccaccaccaccacagagtctgtggaagaggtggttcgagaggtgtgctctgaacaagccgagacggggccgtgccgagcaatgatctcccgctggtactttgatgtgactgaagggaagtgtgccccattcttttacggcggatgtggcggcaaccggaacaactttgacacagaagagtactgcatggccgtgtgtggcagcgccattcctacaacagcagccagtacccctgatgccgttgacaagtatctcgagacacctggggatgagaatgaacatgcccatttccagaaagccaaagagaggcttgaggccaagcaccgagagagaatgtcccaggtcatgagagaatgggaagaggcagaacgtcaagcaaagaacttgcctaaagctgataagaaggcagttatccagcatttccaggagaaagtggaatctttggaacaggaagcagccaacgagagacagcagctggtggagacacacatggccagagtggaagccatgctcaatgaccgccgccgcctggccctggagaactacatcaccgctctgcaggctgttcctcctcggcctcgtcacgtgttcaatatgctaaagaagtatgtccgcgcagaacagaaggacagacagcacaccctaaagcatttcgagcatgtgcgcatggtggatcccaagaaagccgctcagatccggtcccaggttatgacacacctccgtgtgatttatgagcgcatgaatcagtctctctccctgctctacaacgtgcctgcagtggccgaggagattcaggatgaagttgatgagctgcttcagaaagagcaaaactattcagatgacgtcttggccaacatgattagtgaaccaaggatcagttacggaaacgatgctctcatgccatctttgaccgaaacgaaaaccaccgtggagctccttcccgtgaatggagagttcagcctggacgatctccagccgtggcattcttttggggctgactctgtgccagccaacacagaaaacgaagttgagcctgttgatgcccgccctgctgccgaccgaggactgaccactcgaccaggttctgggttgacaaatatcaagacggaggagatctctgaagtgaagatggatgcagaattccgacatgactcaggatatgaagttcatcatcaaaaattggtgttctttgcagaagatgtgggttcaaacaaaggtgcaatcattggactcatggtgggcggtgttgtcatagcgacagtgatcgtcatcaccttggtgatgctgaagaagaaacagtacacatccattcatcatggtgtggtggaggttgacgccgctgtcaccccagaggagcgccacctgtccaagatgcagcagaacggctacgaaaatccaacctacaagttctttgagcagatgcagaactagacccccgccacagcagcctctgaagttggacagcaaaaccattgcttcactacccatcggtgtccatttatagaataatgtgggaagaaacaaacccgttttatgatttactcattatcgccttttgacagctgtgctgtaacacaagtagatgcctgaacttgaattaatccacacatcagtaatgtattctatctctctttacattttggtctctatactacattattaatgggttttgtgtactgtaaagaatttagctgtatcaaactagtgcatgaatagattctctcctgaggagataagcaggacctgcagttagatattatttcctgtactcgtcc

SEQ ID NO: 312915 - DNA, 3178 bp, Homo sapiens
tgagatgaagtataaagcgttgagctcaacgctttatacttcccagaatgggaagtgggattcagatccatcagggaccaaaacctgcattgataccaaggaaggcatcctgcagtattgccaagaagtctaccctgaactgcagatcaccaatgtggtagaagccaaccaaccagtgaccatccagaactggtgcaagcggggccgcaagcagtgcaagacccatccccactttgtgattccctaccgctgcttagttggtgagtttgtaagtgatgcccttctcgttcctgacaagtgcaaattcttacaccaggagaggatggatgtttgcgaaactcatcttcactggcacaccgtcgccaaagagacatgcagtgagaagagtaccaacttgcatgactacggcatgttgctgccctgcggaattgacaagttccgaggggtagagtttgtgtgttgcccactggctgaagaaagtgacaatgtggattctgctgatgcggaggaggatgactcggatgtctggtggggcggagcagacacagactatgcagatgggagtgaagacaaagtagtagaagtagcagaggaggaagaagtggctgaggtggaagaagaagaagccgatgatgacgaggacgatgaggatggtgatgaggtagaggaagaggctgaggaaccctacgaagaagccacagagagaaccaccagcattgccaccaccaccaccaccaccacagagtctgtggaagaggtggttcgagaggtgtgctctgaacaagccgagacggggccgtgccgagcaatgatctcccgctggtactttgatgtgactgaagggaagtgtgccccattcttttacggcggatgtggcggcaaccggaacaactttgacacagaagagtactgcatggccgtgtgtggcagcgccattcctacaacagcagccagtacccctgatgccgttgacaagtatctcgagacacctggggatgagaatgaacatgcccatttccagaaagccaaagagaggcttgaggccaagcaccgagagagaatgtcccaggtcatgagagaatgggaagaggcagaacgtcaagcaaagaacttgcctaaagctgataagaaggcagttatccagcatttccaggagaaagtggaatctttggaacaggaagcagccaacgagagacagcagctggtggagacacacatggccagagtggaagccatgctcaatgaccgccgccgcctggccctggagaactacatcaccgctctgcaggctgttcctcctcggcctcgtcacgtgttcaatatgctaaagaagtatgtccgcgcagaacagaaggacagacagcacaccctaaagcatttcgagcatgtgcgcatggtggatcccaagaaagccgctcagatccggtcccaggttatgacacacctccgtgtgatttatgagcgcatgaatcagtctctctccctgctctacaacgtgcctgcagtggccgaggagattcaggatgaagttgatgagctgcttcagaaagagcaaaactattcagatgacgtcttggccaacatgattagtgaaccaaggatcagttacggaaacgatgctctcatgccatctttgaccgaaacgaaaaccaccgtggagctccttcccgtgaatggagagttcagcctggacgatctccagccgtggcattcttttggggctgactctgtgccagccaacacagaaaacgaagttgagcctgttgatgcccgccctgctgccgaccgaggactgaccactcgaccaggttctgggttgacaaatatcaagacggaggagatctctgaagtgaagatggatgcagaattccgacatgactcaggatatgaagttcatcatcaaaaattggtgttctttgcagaagatgtgggttcaaacaaaggtgcaatcattggactcatggtgggcggtgttgtcatagcgacagtgatcgtcatcaccttggtgatgctgaagaagaaacagtacacatccattcatcatggtgtggtggaggttgacgccgctgtcaccccagaggagcgccacctgtccaagatgcagcagaacggctacgaaaatccaacctacaagttctttgagcagatgcagaactagacccccgccacagcagcctctgaagttggacagcaacaaacccgttttatgatttactcattatcgccttttgacagctgtgctgtaacacaagtagatgcctgaacttgaattaatccacacatcagtaatgtattctatctctctttacattttggtctctatactacattattaatgggttttgtgtactgtaaagaatttagctgtatcaaactagtgcatgaatagattctctcctgattatttatcacatagccccttagccagttgtatattattcttgtggtttgtgacccaattaagtcctactttacatatgctttaagaatcgatgggggatgcttcatgtgaacgtgggagttcagctgcttctcttgcctaagtattcctttcctgatcactatgcattttaaagttaaacatttttaagtatttcagatgctttagagagattttttttccatgactgcattttactgtacagattgctgcttctgctatatttgtgatataggaattaagaggatacacacgtttgtttcttcgtgcctgttttatgtgcacacattaggcattgagacttcaagcttttctttttttgtccacgtatctttgggtctttgataaagtcttcaattaccaagaattctccaaaacaattttctgcaggatgattgtacagaatcattgcttatgacatgatcgctttctacactgtattacataaataaattaaataaaataaccccgggcaagacttttctttgaaggatgactacagacattaaataatcgaagtaattttgggtggggagaagaggcagattcaattttctttaaccagtctgaagtttcatttatgatacaaaagaagatgaaaatggaagtggcaatataaggggatgaggaaggcatgcctggacaaacccttcttttaagatgtgtcttcaatttgtataaaatggtgttttcatgtaaataaatacattcttggaggagcaaaaaaaaaatggtgtg

SEQ ID NO: 312916 - DNA, 1020 bp, Homo sapiens
ggtacccagatccccctttccatcccacatccattcatcatggtgtggtggaggttgacgccgctgtcaccccagaggagcgccacctgtccaagatgcagcagaacggctacgaaaatccaacctacaagttctttgagcagatgcagaactagacccccgccacagcagcctctgaagttggacagcaaaaccattgcttcactacccatcggtgtccatttatagaataatgtgggaagaaacaaacccgttttatgatttactcattatcgccttttgacagctgtgctgtaacacaagtagatgcctgaacttgaattaatccacacatcagtaatgtattctatctctctttacattttggtctctatactacattattaatgggttttgtgtactgtaaagaatttagctgtatcaaactagtgcatgaatagattctctcctgattatttatcacatagccccttagccagttgtatattattcttgtggtttgtgacccaattaagtcctactttacatatgctttaagaatcgatgggggatgcttcatgtgaacgtgggagttcagctgcttctcttgcctaagtattcctttcctgatcactatgcattttaaagttaaacatttttaagtatttcagatgctttagagagattttttttccatgactgcattttactgtacagattgctgcttctgctatatttgtgatataggaattaagaggatacacacgtttgtttcttcgtgcctgttttatgtgcacacattaggcattgagacttcaagcttttctttttttgtccacgtatctttgggtctttgataaagaaaagaatccctgttcattgtaagcacttttacggggcgggtggggaggggtgctctgctggtcttcaattaccaagaattctccaaaacaattttctgcaggatgattgtacagaatcattgcttatgacatgatcgctttctacactgtattacataaataaattaaataaaataac

SEQ ID NO: 312917 - DNA, 2331 bp, Homo sapiens
tgagatgaagtataaagcgttgagctcaacgctttatacttcccagaatgggaagtgggattcagatccatcagggaccaaaacctgcattgataccaaggaaggcatcctgcagtattgccaagaagtctaccctgaactgcagatcaccaatgtggtagaagccaaccaaccagtgaccatccagaactggtgcaagcggggccgcaagcagtgcaagacccatccccactttgtgattccctaccgctgcttagttggtgagtttgtaagtgatgcccttctcgttcctgacaagtgcaaattcttacaccaggagaggatggatgtttgcgaaactcatcttcactggcacaccgtcgccaaagagacatgcagtgagaagagtaccaacttgcatgactacggcatgttgctgccctgcggaattgacaagttccgaggggtagagtttgtgtgttgcccactggctgaagaaagtgacaatgtggattctgctgatgcggaggaggatgactcggatgtctggtggggcggagcagacacagactatgcagatgggagtgaagacaaagtagtagaagtagcagaggaggaagaagtggctgaggtggaagaagaagaagccgatgatgacgaggacgatgaggatggtgatgaggtagaggaagaggctgaggaaccctacgaagaagccacagagagaaccaccagcattgccaccaccaccaccaccaccacagagtctgtggaagaggtggttcgagaggtgtgctctgaacaagccgagacggggccgtgccgagcaatgatctcccgctggtactttgatgtgactgaagggaagtgtgccccattcttttacggcggatgtggcggcaaccggaacaactttgacacagaagagtactgcatggccgtgtgtggcagcgccattcctacaacagcagccagtacccctgatgccgttgacaagtatctcgagacacctggggatgagaatgaacatgcccatttccagaaagccaaagagaggcttgaggccaagcaccgagagagaatgtcccaggtcatgagagaatgggaagaggcagaacgtcaagcaaagaacttgcctaaagctgataagaaggcagttatccagcatttccaggagaaagtggaatctttggaacaggaagcagccaacgagagacagcagctggtggagacacacatggccagagtggaagccatgctcaatgaccgccgccgcctggccctggagaactacatcaccgctctgcaggctgttcctcctcggcctcgtcacgtgttcaatatgctaaagaagtatgtccgcgcagaacagaaggacagacagcacaccctaaagcatttcgagcatgtgcgcatggtggatcccaagaaagccgctcagatccggtcccaggttatgacacacctccgtgtgatttatgagcgcatgaatcagtctctctccctgctctacaacgtgcctgcagtggccgaggagattcaggatgaagttgatgagctgcttcagaaagagcaaaactattcagatgacgtcttggccaacatgattagtgaaccaaggatcagttacggaaacgatgctctcatgccatctttgaccgaaacgaaaaccaccgtggagctccttcccgtgaatggagagttcagcctggacgatctccagccgtggcattcttttggggctgactctgtgccagccaacacagaaaacgaagttgagcctgttgatgcccgccctgctgccgaccgaggactgaccactcgaccaggttctgggttgacaaatatcaagacggaggagatctctgaagtgaagatggatgcagaattccgacatgactcaggatatgaagttcatcatcaaaaattggtgttctttgcagaagatgtgggttcaaacaaaggtgcaatcattggactcatggtgggcggtgttgtcatagcgacagtgatcgtcatcaccttggtgatgctgaagaagaaacagtacacatccattcatcatggtgtggtggaggttgacgccgctgtcaccccagaggagcgccacctgtccaagatgcagcagaacggctacgaaaatccaacctacaagttgaaataactttgcaaggagagccaaagctaagacccccgaaaccagacgagctacctaagaacagctaaaagagcacacccgtctatgtagcaaaatagtgggaagatttataggtagaggcgacaaacctaccgagcctggtgatagctggttgtccaagatagaatcttagttcactttaattgcccacagaa

SEQ ID NO: 312918 - DNA, 2106 bp, Homo sapiens
  misc_feature (2058)..(2058): n is a, c, g, or t
  misc_feature (2060)..(2060): n is a, c, g, or t
  misc_feature (2065)..(2066): n is a, c, g, or t
  misc_feature (2068)..(2068): n is a, c, g, or t
  misc_feature (2077)..(2077): n is a, c, g, or t
  misc_feature (2082)..(2082): n is a, c, g, or t
tgagatgaagtataaagcgttgagctcaacgctttatacttcccagaatgggaagtgggattcagatccatcagggaccaaaacctgcattgataccaaggaaggcatcctgcagtattgccaagaagtctaccctgaactgcagatcaccaatgtggtagaagccaaccaaccagtgaccatccagaactggtgcaagcggggccgcaagcagtgcaagacccatccccactttgtgattccctaccgctgcttagttggtgagtttgtaagtgatgcccttctcgttcctgacaagtgcaaattcttacaccaggagaggatggatgtttgcgaaactcatcttcactggcacaccgtcgccaaagagacatgcagtgagaagagtaccaacttgcatgactacggcatgttgctgccctgcggaattgacaagttccgaggggtagagtttgtgtgttgcccactggctgaagaaagtgacaatgtggattctgctgatgcggaggaggatgactcggatgtctggtggggcggagcagacacagactatgcagatgggagtgaagacaaagtagtagaagtagcagaggaggaagaagtggctgaggtggaagaagaagaagccgatgatgacgaggacgatgaggatggtgatgaggtagaggaagaggctgaggaaccctacgaagaagccacagagagaaccaccagcattgccaccaccaccaccaccaccacagagtctgtggaagaggtggttcgagaggtgtgctctgaacaagccgagacggggccgtgccgagcaatgatctcccgctggtactttgatgtgactgaagggaagtgtgccccattcttttacggcggatgtggcggcaaccggaacaactttgacacagaagagtactgcatggccgtgtgtggcagcgccattcctacaacagcagccagtacccctgatgccgttgacaagtatctcgagacacctggggatgagaatgaacatgcccatttccagaaagccaaagagaggcttgaggccaagcaccgagagagaatgtcccaggtcatgagagaatgggaagaggcagaacgtcaagcaaagaacttgcctaaagctgataagaaggcagttatccagcatttccaggagaaagtggaatctttggaacaggaagcagccaacgagagacagcagctggtggagacacacatggccagagtggaagccatgctcaatgaccgccgccgcctggccctggagaactacatcaccgctctgcaggctgttcctcctcggcctcgtcacgtgttcaatatgctaaagaagtatgtccgcgcagaacagaaggacagacagcacaccctaaagcatttcgagcatgtgcgcatggtggatcccaagaaagccgctcagatccggtcccaggttatgacacacctccgtgtgatttatgagcgcatgaatcagtctctctccctgctctacaacgtgcctgcagtggccgaggagattcaggatgaagttgatgagctgcttcagaaagagcaaaactattcagatgacgtcttggccaacatgattagtgaaccaaggatcagttacggaaacgatgctctcatgccatctttgaccgaaacgaaaaccaccgtggagctccttcccgtgaatggagagttcagcctggacgatctccagccgtggcattcttttggggctgactctgtgccagccaacacagaaaacgaagttgagcctgttgatgcccgccctgctgccgaccgaggactgaccactcgaccaggttctgggttgacaaatatcaagacggaggagatctctgaagtgaagatggatgcagaattccgacatgactcaggatatgaagttcatcatcaaaaattggtgttctttgcagaagatgtgggttcaaacaaaggtgcaatcattggactcatggtgggcggtgttgtcatagcgacagtgatcgtcatcaccttggtgatgctgaagaagaaacagtacacatccattcatcatggtgtggtggagtnanccgcnntnaccccagangagcncacatcgtaacgggcgagctgata

SEQ ID NO: 312919 - DNA, 2086 bp, Homo sapiens
tgagatgaagtataaagcgttgagctcaacgctttatacttcccagaatgggaagtgggattcagatccatcagggaccaaaacctgcattgataccaaggaaggcatcctgcagtattgccaagaagtctaccctgaactgcagatcaccaatgtggtagaagccaaccaaccagtgaccatccagaactggtgcaagcggggccgcaagcagtgcaagacccatccccactttgtgattccctaccgctgcttagttggtgagtttgtaagtgatgcccttctcgttcctgacaagtgcaaattcttacaccaggagaggatggatgtttgcgaaactcatcttcactggcacaccgtcgccaaagagacatgcagtgagaagagtaccaacttgcatgactacggcatgttgctgccctgcggaattgacaagttccgaggggtagagtttgtgtgttgcccactggctgaagaaagtgacaatgtggattctgctgatgcggaggaggatgactcggatgtctggtggggcggagcagacacagactatgcagatgggagtgaagacaaagtagtagaagtagcagaggaggaagaagtggctgaggtggaagaagaagaagccgatgatgacgaggacgatgaggatggtgatgaggtagaggaagaggctgaggaaccctacgaagaagccacagagagaaccaccagcattgccaccaccaccaccaccaccacagagtctgtggaagaggtggttcgagaggtgtgctctgaacaagccgagacggggccgtgccgagcaatgatctcccgctggtactttgatgtgactgaagggaagtgtgccccattcttttacggcggatgtggcggcaaccggaacaactttgacacagaagagtactgcatggccgtgtgtggcagcgccattcctacaacagcagccagtacccctgatgccgttgacaagtatctcgagacacctggggatgagaatgaacatgcccatttccagaaagccaaagagaggcttgaggccaagcaccgagagagaatgtcccaggtcatgagagaatgggaagaggcagaacgtcaagcaaagaacttgcctaaagctgataagaaggcagttatccagcatttccaggagaaagtggaatctttggaacaggaagcagccaacgagagacagcagctggtggagacacacatggccagagtggaagccatgctcaatgaccgccgccgcctggccctggagaactacatcaccgctctgcaggctgttcctcctcggcctcgtcacgtgttcaatatgctaaagaagtatgtccgcgcagaacagaaggacagacagcacaccctaaagcatttcgagcatgtgcgcatggtggatcccaagaaagccgctcagatccggtcccaggttatgacacacctccgtgtgatttatgagcgcatgaatcagtctctctccctgctctacaacgtgcctgcagtggccgaggagattcaggatgaagttgatgagctgcttcagaaagagcaaaactattcagatgacgtcttggccaacatgattagtgaaccaaggatcagttacggaaacgatgctctcatgccatctttgaccgaaacgaaaaccaccgtggagctccttcccgtgaatggagagttcagcctggacgatctccagccgtggcattcttttggggctgactctgtgccagccaacacagaaaacgaagttgagcctgttgatgcccgccctgctgccgaccgaggactgaccactcgaccaggttctgggttgacaaatatcaagacggaggagatctctgaagtgaagatggatgcagaattccgacatgactcaggatatgaagttcatcatcaaaaattggtgttctttgcagaagatgtgggttcaaacaaaggtgcaatcattggacttgtgatatgacaggcgcacagcgcaagctagcaaccctgcagatcgagtagaagagacccaccaatactaggatcaccattttgatagagtgtagacgttggagtcatatcctgagaggactcaacg

SEQ ID NO: 312920 - DNA, 1970 bp, Homo sapiens
tgagatgaagtataaagcgttgagctcaacgctttatacttcccagaatgggaagtgggattcagatccatcagggaccaaaacctgcattgataccaaggaaggcatcctgcagtattgccaagaagtctaccctgaactgcagatcaccaatgtggtagaagccaaccaaccagtgaccatccagaactggtgcaagcggggccgcaagcagtgcaagacccatccccactttgtgattccctaccgctgcttagttggtgagtttgtaagtgatgcccttctcgttcctgacaagtgcaaattcttacaccaggagaggatggatgtttgcgaaactcatcttcactggcacaccgtcgccaaagagacatgcagtgagaagagtaccaacttgcatgactacggcatgttgctgccctgcggaattgacaagttccgaggggtagagtttgtgtgttgcccactggctgaagaaagtgacaatgtggattctgctgatgcggaggaggatgactcggatgtctggtggggcggagcagacacagactatgcagatgggagtgaagacaaagtagtagaagtagcagaggaggaagaagtggctgaggtggaagaagaagaagccgatgatgacgaggacgatgaggatggtgatgaggtagaggaagaggctgaggaaccctacgaagaagccacagagagaaccaccagcattgccaccaccaccaccaccaccacagagtctgtggaagaggtggttcgagaggtgtgctctgaacaagccgagacggggccgtgccgagcaatgatctcccgctggtactttgatgtgactgaagggaagtgtgccccattcttttacggcggatgtggcggcaaccggaacaactttgacacagaagagtactgcatggccgtgtgtggcagcgccattcctacaacagcagccagtacccctgatgccgttgacaagtatctcgagacacctggggatgagaatgaacatgcccatttccagaaagccaaagagaggcttgaggccaagcaccgagagagaatgtcccaggtcatgagagaatgggaagaggcagaacgtcaagcaaagaacttgcctaaagctgataagaaggcagttatccagcatttccaggagaaagtggaatctttggaacaggaagcagccaacgagagacagcagctggtggagacacacatggccagagtggaagccatgctcaatgaccgccgccgcctggccctggagaactacatcaccgctctgcaggctgttcctcctcggcctcgtcacgtgttcaatatgctaaagaagtatgtccgcgcagaacagaaggacagacagcacaccctaaagcatttcgagcatgtgcgcatggtggatcccaagaaagccgctcagatccggtcccaggttatgacacacctccgtgtgatttatgagcgcatgaatcagtctctctccctgctctacaacgtgcctgcagtggccgaggagattcaggatgaagttgatgagctgcttcagaaagagcaaaactattcagatgacgtcttggccaacatgattagtgaaccaaggatcagttacggaaacgatgctctcatgccatctttgaccgaaacgaaaaccaccgtggagctccttcccgtgaatggagagttcagcctggacgatctccagccgtggcattcttttggggctgactctgtgccagccaacacagaaaacgaagttgagcctgttgatgcccgccctgctgccgaccgaggactgaccactcgaccaggttctgggttgacaaatatcaagacggaggagatctctgaagtgaagatggatgcagaattccgacatgactcaggatatgaagttcatcatcaaaaattggttctatgcagaagatgtgggtcctccgcgtcgtctgtttaccctcaggagcgagctatga

SEQ ID NO: 312921 - DNA, 1791 bp, Homo sapiens
tgagatgaagtataaagcgttgagctcaacgctttatacttcccagaatgggaagtgggattcagatccatcagggaccaaaacctgcattgataccaaggaaggcatcctgcagtattgccaagaagtctaccctgaactgcagatcaccaatgtggtagaagccaaccaaccagtgaccatccagaactggtgcaagcggggccgcaagcagtgcaagacccatccccactttgtgattccctaccgctgcttagttggtgagtttgtaagtgatgcccttctcgttcctgacaagtgcaaattcttacaccaggagaggatggatgtttgcgaaactcatcttcactggcacaccgtcgccaaagagacatgcagtgagaagagtaccaacttgcatgactacggcatgttgctgccctgcggaattgacaagttccgaggggtagagtttgtgtgttgcccactggctgaagaaagtgacaatgtggattctgctgatgcggaggaggatgactcggatgtctggtggggcggagcagacacagactatgcagatgggagtgaagacaaagtagtagaagtagcagaggaggaagaagtggctgaggtggaagaagaagaagccgatgatgacgaggacgatgaggatggtgatgaggtagaggaagaggctgaggaaccctacgaagaagccacagagagaaccaccagcattgccaccaccaccaccaccaccacagagtctgtggaagaggtggttcgagaggtgtgctctgaacaagccgagacggggccgtgccgagcaatgatctcccgctggtactttgatgtgactgaagggaagtgtgccccattcttttacggcggatgtggcggcaaccggaacaactttgacacagaagagtactgcatggccgtgtgtggcagcgccattcctacaacagcagccagtacccctgatgccgttgacaagtatctcgagacacctggggatgagaatgaacatgcccatttccagaaagccaaagagaggcttgaggccaagcaccgagagagaatgtcccaggtcatgagagaatgggaagaggcagaacgtcaagcaaagaacttgcctaaagctgataagaaggcagttatccagcatttccaggagaaagtggaatctttggaacaggaagcagccaacgagagacagcagctggtggagacacacatggccagagtggaagccatgctcaatgaccgccgccgcctggccctggagaactacatcaccgctctgcaggctgttcctcctcggcctcgtcacgtgttcaatatgctaaagaagtatgtccgcgcagaacagaaggacagacagcacaccctaaagcatttcgagcatgtgcgcatggtggatcccaagaaagccgctcagatccggtcccaggttatgacacacctccgtgtgatttatgagcgcatgaatcagtctctctccctgctctacaacgtgcctgcagtggccgaggagattcaggatgaagttgatgagctgcttcagaaagagcaaaactattcagatgacgtcttggccaacatgattagtgaaccaaggatcagttacggaaacgatgctctcatgccatctttgaccgaaacgaaaaccaccgtggagctccttcccgtgaatggagagttcagcctggacgatctccagccgtggcattcttttggggctgactctgtgccagccaacacagaaaacgaaggtagagcctgacgagtgccagcggaatcctgggaggt

SEQ ID NO: 312922 - DNA, 1561 bp, Homo sapiens
tgagatgaagtataaagcgttgagctcaacgctttatacttcccagaatgggaagtgggattcagatccatcagggaccaaaacctgcattgataccaaggaaggcatcctgcagtattgccaagaagtctaccctgaactgcagatcaccaatgtggtagaagccaaccaaccagtgaccatccagaactggtgcaagcggggccgcaagcagtgcaagacccatccccactttgtgattccctaccgctgcttagttggtgagtttgtaagtgatgcccttctcgttcctgacaagtgcaaattcttacaccaggagaggatggatgtttgcgaaactcatcttcactggcacaccgtcgccaaagagacatgcagtgagaagagtaccaacttgcatgactacggcatgttgctgccctgcggaattgacaagttccgaggggtagagtttgtgtgttgcccactggctgaagaaagtgacaatgtggattctgctgatgcggaggaggatgactcggatgtctggtggggcggagcagacacagactatgcagatgggagtgaagacaaagtagtagaagtagcagaggaggaagaagtggctgaggtggaagaagaagaagccgatgatgacgaggacgatgaggatggtgatgaggtagaggaagaggctgaggaaccctacgaagaagccacagagagaaccaccagcattgccaccaccaccaccaccaccacagagtctgtggaagaggtggttcgagaggtgtgctctgaacaagccgagacggggccgtgccgagcaatgatctcccgctggtactttgatgtgactgaagggaagtgtgccccattcttttacggcggatgtggcggcaaccggaacaactttgacacagaagagtactgcatggccgtgtgtggcagcgccattcctacaacagcagccagtacccctgatgccgttgacaagtatctcgagacacctggggatgagaatgaacatgcccatttccagaaagccaaagagaggcttgaggccaagcaccgagagagaatgtcccaggtcatgagagaatgggaagaggcagaacgtcaagcaaagaacttgcctaaagctgataagaaggcagttatccagcatttccaggagaaagtggaatctttggaacaggaagcagccaacgagagacagcagctggtggagacacacatggccagagtggaagccatgctcaatgaccgccgccgcctggccctggagaactacatcaccgctctgcaggctgttcctcctcggcctcgtcacgtgttcaatatgctaaagaagtatgtccgcgcagaacagaaggacagacagcacaccctaaagcatttcgagcatgtgcgcatggtggatcccaagaaagccgctcagatccggtcccaggttatgacacacctccgtgtgatttatgagcgcatgaatcagtctctctccctgctctacaacgtgcctgcagtggccgaggagattcaggatgaagttggtaagtaagctgttcttttgatgctgcac

SEQ ID NO: 312923 - DNA, 1227 bp, Homo sapiens
tgagatgaagtataaagcgttgagctcaacgctttatacttcccagaatgggaagtgggattcagatccatcagggaccaaaacctgcattgataccaaggaaggcatcctgcagtattgccaagaagtctaccctgaactgcagatcaccaatgtggtagaagccaaccaaccagtgaccatccagaactggtgcaagcggggccgcaagcagtgcaagacccatccccactttgtgattccctaccgctgcttagttggtgagtttgtaagtgatgcccttctcgttcctgacaagtgcaaattcttacaccaggagaggatggatgtttgcgaaactcatcttcactggcacaccgtcgccaaagagacatgcagtgagaagagtaccaacttgcatgactacggcatgttgctgccctgcggaattgacaagttccgaggggtagagtttgtgtgttgcccactggctgaagaaagtgacaatgtggattctgctgatgcggaggaggatgactcggatgtctggtggggcggagcagacacagactatgcagatgggagtgaagacaaagtagtagaagtagcagaggaggaagaagtggctgaggtggaagaagaagaagccgatgatgacgaggacgatgaggatggtgatgaggtagaggaagaggctgaggaaccctacgaagaagccacagagagaaccaccagcattgccaccaccaccaccaccaccacagagtctgtggaagaggtggttcgagaggtgtgctctgaacaagccgagacggggccgtgccgagcaatgatctcccgctggtactttgatgtgactgaagggaagtgtgccccattcttttacggcggatgtggcggcaaccggaacaactttgacacagaagagtactgcatggccgtgtgtggcagcgccattcctacaacagcagccagtacccctgatgccgttgacaagtatctcgagacacctggggatgagaatgaacatgcccatttccagaaagccaaagagaggcttgaggccaagcaccgagagagaatgtcccagcatgagaataagagaaagaaaatgaagatcaaaagcttattcatctgtttttctttttcgttggtgtaaagccaacaccctgtctaaaaaacataaatttctttaatcattttgcctcttttctctgtgcttcaattaataaaaaatggaaagaatct

SEQ ID NO: 312924 - DNA, 1132 bp, Homo sapiens
tgagatgaagtataaagcgttgagctcaacgctttatacttcccagaatgggaagtgggattcagatccatcagggaccaaaacctgcattgataccaaggaaggcatcctgcagtattgccaagaagtctaccctgaactgcagatcaccaatgtggtagaagccaaccaaccagtgaccatccagaactggtgcaagcggggccgcaagcagtgcaagacccatccccactttgtgattccctaccgctgcttagttggtgagtttgtaagtgatgcccttctcgttcctgacaagtgcaaattcttacaccaggagaggatggatgtttgcgaaactcatcttcactggcacaccgtcgccaaagagacatgcagtgagaagagtaccaacttgcatgactacggcatgttgctgccctgcggaattgacaagttccgaggggtagagtttgtgtgttgcccactggctgaagaaagtgacaatgtggattctgctgatgcggaggaggatgactcggatgtctggtggggcggagcagacacagactatgcagatgggagtgaagacaaagtagtagaagtagcagaggaggaagaagtggctgaggtggaagaagaagaagccgatgatgacgaggacgatgaggatggtgatgaggtagaggaagaggctgaggaaccctacgaagaagccacagagagaaccaccagcattgccaccaccaccaccaccaccacagagtctgtggaagaggtggttcgagaggtgtgctctgaacaagccgagacggggccgtgccgagcaatgatctcccgctggtactttgatgtgactgaagggaagtgtgccccattcttttacggcggatgtggcggcaaccggaacaactttgacacagaagagtactgcatggccgtgtgtggcagcgccatgtcccaaagtttactcaagacggacaccagtgtgatcttattagctgaagtcaagggaccactgatctcctctgccacctggggcagcttctctagcagcatgtccagctgagcagcctcttggtacagctggaaggcttctgccttcttggccatctgctcagcctcggctcgggctcgggcccctatggcaaag

SEQ ID NO: 312925 - DNA, 775 bp, Homo sapiens
  misc_feature (661)..(661): n is a, c, g, or t
tgagatgaagtataaagcgttgagctcaacgctttatacttcccagaatgggaagtgggattcagatccatcagggaccaaaacctgcattgataccaaggaaggcatcctgcagtattgccaagaagtctaccctgaactgcagatcaccaatgtggtagaagccaaccaaccagtgaccatccagaactggtgcaagcggggccgcaagcagtgcaagacccatccccactttgtgattccctaccgctgcttagttggtgagtttgtaagtgatgcccttctcgttcctgacaagtgcaaattcttacaccaggagaggatggatgtttgcgaaactcatcttcactggcacaccgtcgccaaagagacatgcagtgagaagagtaccaacttgcatgactacggcatgttgctgccctgcggaattgacaagttccgaggggtagagtttgtgtgttgcccactggctgaagaaagtgacaatgtggattctgctgatgcggaggaggatgactcggatgtctggtggggcggagcagacacagactatgcagatgggagtgaagacaagtagtagaagtataaagcgttgagctcaacgcttatacttcattagctctagaggtccatgcatacttaatattatacttgaattcantacggaagtataaagcgttgagaagtataaagcgttgagaagtataaagcgttgagaagtataaagcgttgagaagtataaagcgttgagaagtaaagcgttgagaaatataag

SEQ ID NO: 312926 - DNA, 725 bp, Homo sapiens
tgagatgaagtataaagcgttgagctcaacgctttatacttcccagaatgggaagtgggattcagatccatcagggaccaaaacctgcattgataccaaggaaggcatcctgcagtattgccaagaagtctaccctgaactgcagatcaccaatgtggtagaagccaaccaaccagtgaccatccagaactggtgcaagcggggccgcaagcagtgcaagacccatccccactttgtgattccctaccgctgcttagttggtgagtttgtaagtgatgcccttctcgttcctgacaagtgcaaattcttacaccaggagaggatggatgtttgcgaaactcatcttcactggcacaccgtcgccaaagagacatgcagtgagaagagtaccaacttgcatgactacggcatgttgctgccctgcggaattgacaagttccgaggggtagagtttgtgtgttgcccactggctgaagaaagtgacaatgtggattctgctgatgcggaggaggatgactcggatgtctggtggggcggagcagacacagactatgcagatgggagggtaaggtggcctttgtgttcagcctcagagatgctgaaacatcttgtatggagtatttgtatcctgtaaattaatctttctgtttatcactgaaaaggtctctgcccactcccatcagagtctgctgttatgcaaaaatctgaactatgaatttttatgg

SEQ ID NO: 312927 - DNA, 441 bp, Homo sapiens
tgagatgaagtataaagcgttgagctcaacgctttatacttcccagaatgggaagtgggattcagatccatcagggaccaaaacctgcattgataccaaggaaggcatcctgcagtattgccaagaagtctaccctgaactgcagatcaccaatgtggtagaagccaaccaaccagtgaccatccagaactggtgcaagcggggccgcaagcagtgcaagacccatccccactttgtgattccctaccgctgcttagttggtgagtttgtaagtgacgccattctcgtctctcagggttgtctgttctgtcatggggctcactcaggatgctggagactcttctgttcatcggaaccccggcggatgggatatgtcatgtgtggatactgaattatgtcttgagtagagagtgttggagggaggttgtccatggggtcagg

SEQ ID NO: 312928 - DNA, 678 bp, Homo sapiens
  misc_feature (610)..(610): n is a, c, g, or t
actacatacttccggaccaaacccaagggaccacacagcccattctgctccgattccagaaaaaaacacatttgaagcatgaattctcagcagcagaagcagccttgcaccccaccccctcagcctcagcagcagcaggtgaaacaaccttgccagcctccaccccaggaaccatgcatccccaaaaccaaggagccctgccaacccaaggtgcctgagccctgccaccccaaagtgcctgagccctgccagcccaagattccagagccctgccagcccaaggtgcctgagccctgcccttcaacggtcactccagcaccagcccagcagaagaccaagcagaagtaatgtggtccacagccatgcccttgaggagctggccactggatactgaacaccctactccattctgcttatgaatcccatttgcctattgaccctgcagttagcatgctgtcaccctgaatcataatcgctcctttgcacctctaaaaagatgtcccttaccctcattctggagggctcctgagcctctgcgtaaggctgaacgtctcactgactgagctagtcttcttgttgctcgggtgcatttgaggatggatttgggganggatcaagtgaaccatccctagtcttccctcaataaataacttttaactccaaaaaaaacagtcgacg

SEQ ID NO: 312929 - DNA, 623 bp, Homo sapiens
  misc_feature (555)..(555): n is a, c, g, or t
gactcaggatgtcaaggtggcacatttaggagtagcaggaattctgagcccctgtacactatcatgtcactgttcacttatctacacagggcgcggggatgcactggaccggacctcaccatgactcctccctcttgctgccctgccaacccaaggtgcctgagccctgccaccccaaagtgcctgagccctgccagcccaagattccagagccctgccagcccaaggtgcctgagccctgcccttcaacggtcactccagcaccagcccagcagaagaccaagcagaagtaatgtggtccacagccatgcccttgaggagctggccactggatactgaacaccctactccattctgcttatgaatcccatttgcctattgaccctgcagttagcatgctgtcaccctgaatcataatcgctcctttgcacctctaaaaagatgtcccttaccctcattctggagggctcctgagcctctgcgtaaggctgaacgtctcactgactgagctagtcttcttgttgctcgggtgcatttgaggatggatttgggganggatcaagtgaaccatccctagtcttccctcaataaataacttttaactccaaaaaaaacagtcgacg

SEQ ID NO: 312930 - DNA, 550 bp, Homo sapiens
  misc_feature (482)..(482): n is a, c, g, or t
tcggtacccatctcgtgaccggcgattatatctgaatatggaaccatgcatccccaaaaccaaggagccctgccaacccaaggtgcctgagccctgccaccccaaagtgcctgagccctgccagcccaagattccagagccctgccagcccaaggtgcctgagccctgcccttcaacggtcactccagcaccagcccagcagaagaccaagcagaagtaatgtggtccacagccatgcccttgaggagctggccactggatactgaacaccctactccattctgcttatgaatcccatttgcctattgaccctgcagttagcatgctgtcaccctgaatcataatcgctcctttgcacctctaaaaagatgtcccttaccctcattctggagggctcctgagcctctgcgtaaggctgaacgtctcactgactgagctagtcttcttgttgctcgggtgcatttgaggatggatttgggganggatcaagtgaaccatccctagtcttccctcaataaataacttttaactccaaaaaaaacagtcgacg

SEQ ID NO: 312931 - DNA, 651 bp, Homo sapiens
  misc_feature (18)..(18): n is a, c, g, or t
  misc_feature (37)..(38): n is a, c, g, or t
gggcgcgcagccctgganagaagagttggtttttttnnagccatcgggttaaacaagaaacccagcgtttgctggcagaaccagttcctggcatcaaagccgaaccagatgagagcaacgcccgttattttcatgtggtcattgctggccctcaggattccccctttgagggagggacttttaaacttgaactattccttccagaagaatacccaatggcagcccctaaagtacgtttcatgaccaaaatttatcatcctaatgtagacaagttgggaagaatatgtttagatattttgaaagataagtggtccccagcactgcagatccgcacagttctgctatcgatccaggccttgttaagtgctcccaatccagatgatccattagcaaatgatgtagcggagcagtggaagaccaacgaagcccaagccatagaaacagcaagtctaactttatttagacgctgtagatggacaagcttgattgttggaaccaaaatgggaacattaaacaaacatcacagccctcactaataacattgctgtcaagtgtagattccccccttcaaaaaaagcttgtgaccattttgtatggcttgtctggaaacttctgtaaatcttatgttttagtaaaatattttttgttatt

SEQ ID NO: 312932 - DNA, 673 bp, Homo sapiens
gtccccttcggcttgtttcctagtctcttgtcctctgcattcattgcctcatcttccgccattccccctggacccggtttgggttgtgggctttctactggttgacgtggtgtcccatgttcggatgggaagcccccgcccgtgcccgagcccgcgcccgagcagggactacatttcccgaggggcctcggcggcggctgcggcgacgggcgcggcaacgtcccccggaagtggagcccgggacttccactcgtgcgtgaggcgagaggagccggagacgagaccagaggccgaactcgggttctgacaagatggccgggctgccccgcaggatcatcaaggtaaccgcccaggccggcctccagctcttcgctctgctctcgtcggctcagctgggcaggcagcgcggcctctcgcctccttcggcccgcggcccgctctgggaggcccgaggcggcgcggagaggggttggccgcggcggcgagggaagtcgggtgctgaggagggggcgccggggagacttccggccgcggcggggcagccggacagcggggacccggggcttccaggcggctgcccggcgggccagggagtgctgtcccacgccccggcggagggtggggcggcaaggctgggggtctctgggcttgggcgcgggcctccatagcttct

SEQ ID NO: 312933 - DNA, 292 bp, Homo sapiens
agggtaaaacgaggcccagcgattcctgaagattgacctgcgttgtttcctggcggaaaaccaggtctttagaatatgctctagccaagtctaactttatttagacgctgtagatggacaagcttgattgttggaaccaaaatgggaacattaaacaaacatcacagccctcactaataacattgctgtcaagtgtagattccccccttcaaaaaaagcttgtgaccattttgtatggcttgtctggaaacttctgtaaatcttatgttttagtaaaatattttttgttatt

SEQ ID NO: 312934 - DNA, 2656 bp, Homo sapiens
  misc_feature (2639)..(2639): n is a, c, g, or t
acggttaagagagacgcgcgcgcagtcgcgcgggggtcgtgccgtaccaccgtcgcgggcaggctcggccacgagcgccagagccccgcgcctcccctcgcggcctgtcccaagtccctgccccgcaacagagcgtcacttccgccatccccggcagcggttggggcggggcgcacgggggagggggccaggtcggagggaagcccgcccgtgcccgagcccgcgcccgagcagggactacatttcccgaggggcctcggcggcggctgcggcgacgggcgcggcaacgtcccccggaagtggagcccgggacttccactcgtgcgtgaggcgagaggagccggagacgagaccagaggccgaactcgggttctgacaagatggccgggctgccccgcaggatcatcaaggaaacccagcgtttgctggcagaaccagttcctggcatcaaagccgaaccagatgagagcaacgcccgttattttcatgtggtcattgctggccctcaggattccccctttgagggagggacttttaaacttgaactattccttccagaagaatacccaatggcagcccctaaagtacgtttcatgaccaaaatttatcatcctaatgtagacaagttgggaagaatatgtttagatattttgaaagataagtggtccccagcactgcagatccgcacagttctgctatcgatccaggccttgttaagtgctcccaatccagatgatccattagcaaatgatgtagcggagcagtggaagaccaacgaagcccaagccatagaaacagctagagcatggactaggctatatgccatgaataatatttaaattgatacgatcatcaagtgtgcatcacttctcctgttctgccaagacttcctcctctttgtttgcatttaatggacacagtcttagaaacattacagaataaaaaagcccagacatcttcagtcctttggtgattaaatgcacattagcaaatctatgtcttgtcctgattcactgtcataaagcatgagcagaggctagaagtatcatctggattgttgtgaaacgtttaaaagcagtggcccctccctgcttttattcatttcccccatcctggtttaagtataaagcactgtgaatgaaggtagttgtcaggttagctgcaggggtgtgggtgtttttattttattttattttattttatttttgaggggggaggtagtttaattttatgggctcctttcccccttttttggtgatctaattgcattggttaaaagcagctaaccaggtctttagaatatgctctagccaagtctaactttatttagacgctgtagatggacaagcttgattgttggaaccaaaatgggaacattaaacaaacatcacagccctcactaataacattgctgtcaagtgtagattccccccttcaaaaaaagcttgtgaccattttgtatggcttgtctggaaacttctgtaaatcttatgttttagtaaaatattttttgttattctactttgcctttgtacagtttattttactgtgtttatttcattttcccaatttgacaatcgtattttaaaattgaaactgatggaacattctttcttggtcttcaccatctgacaaattgaatggcaagaggtggattttgccagtttcttttcactgatgcagatttgtgttaagatagtactgaatggagtatttataaactggccctgagcatgcataaagcatcagtatctgacctttttttaaccttctaggaatttgaaataaatgtgtttgtgttgtctgattagatgatcattggtgtcttgccacaatgtttaaaaattactgtacaggaaagtcacagcaaagatagcagttgtgactgacatgtaggactttcacagttgtgccacatttttgcctaaaatttgggttatgacatttttcttggttcttatctgaaaatttcatctgtaacctttcatgtgtgttaagaaacactgatctgatcatttgggatttgctgaggcatttgtgagtcttccttataaacctgatgagcagatctcaactatctagcttgtgtgtcatcagaaaggtttatccctttgagagtatcaagtcctcagttaatgattcttgctttcatccctccagtatttgctgtgggagctcgttttattctttaatttggaattcagtaatttttcttctttattgacgaattcctcccctcacaaaactgttctttcccacctctctccatatctaattcctgattcttgttatttttaagtcataaatgtagccagtcataaatacataaatgttaaccttcgggttgcaaccttgtctcttgcagtttaaggtaatggatattgtagcccatttgaattttcttcactcttattctcgtaattctggagtttcttcagattgtggtgtattttattgtgctcctatgtaagatgaagaattaactattaaaattacattttcaacataaaaaaaaaaaaaaaaaaaaaaaaaaaaaaaaaaaaaaaaaaaaaaaaaaaaaaaaaaaaaaaaaaaaaaaaaaaaaaaaaaaaaaaaaaaaaaaaaaatattaaaaaaaaaaaaaaaacaaaaaaaaaaanaaacaaacaaacaaaaa

SEQ ID NO: 312935 - DNA, 2478 bp, Homo sapiens
acggttaagagagacgcgcgcgcagtcgcgcgggggtcgtgccgtaccaccgtcgcgggcaggctcggccacgagcgccagagccccgcgcctcccctcgcggcctgtcccaagtccctgccccgcaacagagcgtcacttccgccatccccggcagcggttggggcggggcgcacgggggagggggccaggtcggagggaagcccgcccgtgcccgagcccgcgcccgagcagggactacatttcccgaggggcctcggcggcggctgcggcgacgggcgcggcaacgtcccccggaagtggagcccgggacttccactcgtgcgtgaggcgagaggagccggagacgagaccagaggccgaactcgggttctgacaagatggccgggctgccccgcaggatcatcaaggaaacccagcgtttgctggcagaaccagttcctggcatcaaagccgaaccagatgagagcaacgcccgttattttcatgtggtcattgctggccctcaggattccccctttgagggagggacttttaaacttgaactattccttccagaagaatacccaatggcagcccctaaagtacgtttcatgaccaaaatttatcatcctaatgtagacaagttgggaagaatatgtttagatattttgaaagataagtggtccccagcactgcagatccgcacagttctgctatcgatccaggccttgttaagtgctcccaatccagatgatccattagcaaatgatgtagcggagcagtggaagaccaacgaagcccaagccatagaaacagctagagcatggactaggctatatgccatgaataatatttaaattgatacgatcatcaagtgtgcatcacttctcctgttctgccaagacttcctcctctttgtttgcatttaatggacacagtcttagaaacattacagaataaaaaagcccagacatcttcagtcctttggtgattaaatgcacattagcaaatctatgtcttgtcctgattcactgtcataaagcatgagcagaggctagaagtatcatctggattgttgtgaaacgtttaaaagcagtggcccctccctgcttttattcatttcccccatcctggtttaagtataaagcactgtgaatgaaggtagttgtcaggttagctgcaggggtgtgggtgtttttattttattttattttattttatttttgaggggggaggtagtttaattttatgggctcctttcccccttttttggtgatctaattgcattggttaaaagcagctaaccaggtctttagaatatgctctagccaagtctaactttatttagacgctgtagatggacaagcttgattgttggaaccaaaatgggaacattaaacaaacatcacagccctcactaataacattgctgtcaagtgtagattccccccttcaaaaaaagcttgtgaccattttgtatggcttgtctggaaacttctgtaaatcttatgttttagtaaaatattttttgttattctactttgcctttgtacagtttattttactgtgtttatttcattttcccaatttgacaatcgtattttaaaattgaaactgatggaacattctttcttggtcttcaccatctgacaaattgaatggcaagaggtggattttgccagtttcttttcactgatgcagatttgtgttaagatagtactgaatggagtatttataaactggccctgagcatgcataaagcatcagtatctgacctttttttaaccttctaggaatttgaaataaatgtgtttgtgttgtctgattagatgatcattggtgtcttgccacaatgtttaaaaattactgtacaggaaagtcacagcaaagatagcagttgtgactgacatgtaggactttcacagttgtgccacatttttgcctaaaatttgggttatgacatttttcttggttcttatctgaaaatttcatctgtaacttgggatttgctgaggcatttgtgagtcttccttataaacctgatgagcagatctcaactatctagcttgtgtgtcatcagaaaggtttatccctttgagagtatcaagtcctcagttaatgattcttgctttcatccctccagtatttgctgtgggagctcgttttattctttaatttggaattcagtaatttttcttctttattgacgaattcctcccctcacaaaactgttctttcccacctctctccatatctaattcctgattcttgttatttttaagtcataaatgtagccagtcataaatacataaatgttaaccttcgggttgcaaccttgtctcttgcagtttaaggtaatggatattgtagcccatttgaattttcttcactcttattctcgtaattctggagtttcttcagattgtggtgtattttattgtgctcctatgtaagatgaagaattaactattaaaattacattttcaacataaaaaa

SEQ ID NO: 312936 - DNA, 2216 bp, Homo sapiens
  misc_feature (21)..(22): n is a, c, g, or t
aggctagtacgaggcggtgtnnatcggccgagggcgagaggagccggagacgagaccagaggccgaactcgggttctgacaagatggccgggctgccccgcaggatcatcaaggaaacccagcgtttgctggcagaaccagttcctggcatcaaagccgaaccagatgagagcaacgcccgttattttcatgtggtcattgctggccctcaggattccccctttgagggagggacttttaaacttgaactattccttccagaagaatacccaatggcagcccctaaagtacgtttcatgaccaaaatttatcatcctaatgtagacaagttgggaagaatatgtttagatattttgaaagataagtggtccccagcactgcagatccgcacagttctgctatcgatccaggccttgttaagtgctcccaatccagatgatccattagcaaatgatgtagcggagcagtggaagaccaacgaagcccaagccatagaaacagctagagcatggactaggctatatgccatgaataatatttaaattgatacgatcatcaagtgtgcatcacttctcctgttctgccaagacttcctcctctttgtttgcatttaatggacacagtcttagaaacattacagaataaaaaagcccagacatcttcagtcctttggtgattaaatgcacattagcaaatctatgtcttgtcctgattcactgtcataaagcatgagcagaggctagaagtatcatctggattgttgtgaaacgtttaaaagcagtggcccctccctgcttttattcatttcccccatcctggtttaagtataaagcactgtgaatgaaggtagttgtcaggttagctgcaggggtgtgggtgtttttattttattttattttattttatttttgaggggggaggtagtttaattttatgggctcctttcccccttttttggtgatctaattgcattggttaaaagcagctaaccaggtctttagaatatgctctagccaagtctaactttatttagacgctgtagatggacaagcttgattgttggaaccaaaatgggaacattaaacaaacatcacagccctcactaataacattgctgtcaagtgtagattccccccttcaaaaaaagcttgtgaccattttgtatggcttgtctggaaacttctgtaaatcttatgttttagtaaaatattttttgttattctactttgcctttgtacagtttattttactgtgtttatttcattttcccaatttgacaatcgtattttaaaattgaaactgatggaacattctttcttggtcttcaccatctgacaaattgaatggcaagaggtggattttgccagtttcttttcactgatgcagatttgtgttaagatagtactgaatggagtatttataaactggccctgagcatgcataaagcatcagtatctgacctttttttaaccttctaggaatttgaaataaatgtgtttgtgttgtctgattagatgatcattggtgtcttgccacaatgtttaaaaattactgtacaggaaagtcacagcaaagatagcagttgtgactgacatgtaggactttcacagttgtgccacatttttgcctaaaatttgggttatgacatttttcttggttcttatctgaaaatttcatctgtaacctttcatgtgtgttaagaaacactgatctgatcatttgggatttgctgaggcatttgtgagtcttccttataaacctgatgagcagatctcaactatctagcttgtgtgtcatcagaaaggtttatccctttgagagtatcaagtcctcagttaatgattcttgctttcatccctccagtatttgctgtgggagctcgttttattctttaatttggaattcagtaatttttcttctttattgacgaattcctcccctcacaaaactgttctttcccacctctctccatatctaattcctgattcttgttatttttaagtcataaatgtagccagtcataaatacataaatgttaaccttcgggttgcaaccttgtctcttgcagtttaaggtaatggatattgtagcccatttgaattttcttcactcttattctcgtaattctggagtttcttcagattgtggtgtattttattgtgctcctatgtaagatgaagaattaactattaaaattacattttcaacataaaaaa

SEQ ID NO: 312937 - DNA, 1518 bp, Homo sapiens
acggttaagagagacgcgcgcgcagtcgcgcgggggtcgtgccgtaccaccgtcgcgggcaggctcggccacgagcgccagagccccgcgcctcccctcgcggcctgtcccaagtccctgccccgcaacagagcgtcacttccgccatccccggcagcggttggggcggggcgcacgggggagggggccaggtcggagggaagcccgcccgtgcccgagcccgcgcccgagcagggactacatttcccgaggggcctcggcggcggctgcggcgacgggcgcggcaacgtcccccggaagtggagcccgggacttccactcgtgcgtgaggcgagaggagccggagacgagaccagaggccgaactcgggttctgacaagatggccgggctgccccgcaggatcatcaaggaaacccagcgtttgctggcagaaccagttcctggcatcaaagccgaaccagatgagagcaacgcccgttattttcatgtggtcattgctggccctcaggattccccctttgagggagggacttttaaacttgaactattccttccagaagaatacccaatggcagcccctaaagtacgtttcatgaccaaaatttatcatcctaatgtagacaagttgggaagaatatgtttagatattttgaaagataagtggtccccagcactgcagatccgcacagttctgctatcgatccaggccttgttaagtgctcccaatccagatgatccattagcaaatgatgtagcggagcagtggaagaccaacgaagcccaagccatagaaacagctagagcatggactaggctatatgccatgaataatatttaaattgatacgatcatcaagtgtgcatcacttctcctgttctgccaagacttcctcctctttgtttgcatttaatggacacagtcttagaaacattacagaataaaaaagcccagacatcttcagtcctttggtgattaaatgcacattagcaaatctatgtcttgtcctgattcactgtcataaagcatgagcagaggctagaagtatcatctggattgttgtgaaacgtttaaaagcagtggcccctccctgcttttattcatttcccccatcctggtttaagtataaagcactgtgaatgaaggtagttgtcaggttagctgcaggggtgtgggtgtttttattttattttattttattttatttttgaggggggaggtagtttaattttatgggctcctttcccccttttttggtgatctaattgcattggttaaaagcagctaaccaggtctttagaatatgctctagccaagtctaactttatttagacgctgtagatggacaagcttgattgttggaaccaaaatgggaacattaaacaaacatcacagccctcactaataacattgctgtcaagtgtagattccccccttcaaaaaaagcttgtgaccattttgtatggcttgtctggaaacttctgtaaatcttatgttttagtaaaatattttttgttatt

SEQ ID NO: 312938 - DNA, 2612 bp, Homo sapiens
acggttaagagagacgcgcgcgcagtcgcgcgggggtcgtgccgtaccaccgtcgcgggcaggctcggccacgagcgccagagccccgcgcctcccctcgcggcctgtcccaagtccctgccccgcaacagagcgtcacttccgccatccccggcagcggttggggcggggcgcacgggggagggggccaggtcggagggaagcccgcccgtgcccgagcccgcgcccgagcagggactacatttcccgaggggcctcggcggcggctgcggcgacgggcgcggcaacgtcccccggaagtggagcccgggacttccactcgtgcgtgaggcgagaggagccggagacgagaccagaggccgaactcgggttctgacaagatggccgggctgccccgcaggatcatcaagttatgatggcttcactgagaaaacatgaagatcttaggagctgagggagcaagccatatggatatcttggggaggaagaggaagtacaaagcccttgaggaaacccagcgtttgctggcagaaccagttcctggcatcaaagccgaaccagatgagagcaacgcccgttattttcatgtggtcattgctggccctcaggattccccctttgagggagggacttttaaacttgaactattccttccagaagaatacccaatggcagcccctaaagtacgtttcatgaccaaaatttatcatcctaatgtagacaagttgggaagaatatgtttagatattttgaaagataagtggtccccagcactgcagatccgcacagttctgctatcgatccaggccttgttaagtgctcccaatccagatgatccattagcaaatgatgtagcggagcagtggaagaccaacgaagcccaagccatagaaacagctagagcatggactaggctatatgccatgaataatatttaaattgatacgatcatcaagtgtgcatcacttctcctgttctgccaagacttcctcctctttgtttgcatttaatggacacagtcttagaaacattacagaataaaaaagcccagacatcttcagtcctttggtgattaaatgcacattagcaaatctatgtcttgtcctgattcactgtcataaagcatgagcagaggctagaagtatcatctggattgttgtgaaacgtttaaaagcagtggcccctccctgcttttattcatttcccccatcctggtttaagtataaagcactgtgaatgaaggtagttgtcaggttagctgcaggggtgtgggtgtttttattttattttattttattttatttttgaggggggaggtagtttaattttatgggctcctttcccccttttttggtgatctaattgcattggttaaaagcagctaaccaggtctttagaatatgctctagccaagtctaactttatttagacgctgtagatggacaagcttgattgttggaaccaaaatgggaacattaaacaaacatcacagccctcactaataacattgctgtcaagtgtagattccccccttcaaaaaaagcttgtgaccattttgtatggcttgtctggaaacttctgtaaatcttatgttttagtaaaatattttttgttattctactttgcctttgtacagtttattttactgtgtttatttcattttcccaatttgacaatcgtattttaaaattgaaactgatggaacattctttcttggtcttcaccatctgacaaattgaatggcaagaggtggattttgccagtttcttttcactgatgcagatttgtgttaagatagtactgaatggagtatttataaactggccctgagcatgcataaagcatcagtatctgacctttttttaaccttctaggaatttgaaataaatgtgtttgtgttgtctgattagatgatcattggtgtcttgccacaatgtttaaaaattactgtacaggaaagtcacagcaaagatagcagttgtgactgacatgtaggactttcacagttgtgccacatttttgcctaaaatttgggttatgacatttttcttggttcttatctgaaaatttcatctgtaacctttcatgtgtgttaagaaacactgatctgatcatttgggatttgctgaggcatttgtgagtcttccttataaacctgatgagcagatctcaactatctagcttgtgtgtcatcagaaaggtttatccctttgagagtatcaagtcctcagttaatgattcttgctttcatccctccagtatttgctgtgggagctcgttttattctttaatttggaattcagtaatttttcttctttattgacgaattcctcccctcacaaaactgttctttcccacctctctccatatctaattcctgattcttgttatttttaagtcataaatgtagccagtcataaatacataaatgttaaccttcgggttgcaaccttgtctcttgcagtttaaggtaatggatattgtagcccatttgaattttcttcactcttattctcgtaattctggagtttcttcagattgtggtgtattttattgtgctcctatgtaagatgaagaattaactattaaaattacattttcaacataaaaaa

SEQ ID NO: 312939 - DNA, 2690 bp, Homo sapiens
tttgtttcttcagtgcattctgcgatatctttttcttctgggcaacctcctcttctggtttaggaacaatctgttccttttccgtaaggatcatctcaatgtggcaggagagctcatgtatgggttaatccgaccatgagctctgtaggtccggcggcgcatcttaggtgctttgttcacttggatatgctcaatgaccagagaatctacatctaaacccttaagttcagcattactctctgcgtttttaagcatgtgcagcaaaaattcagcactctttttgggccaccgaccttgtgtccagccccattgcttggcctgcgcacacctgccaactccaccattgtaacgtcggaatggtacacactgtttctgtaaagtgacatctttcagatacttcgtggcttttcgtatatgcatacccttgatggcctgagcagtttcacgagtgttcttaaagtgaacacgaagattggaacctcttgatttgcatgatttcgtggggttctccgggtcaagtgaatagcgaaccattttcacagatcacctcagacaagatggccgggctgccccgcaggatcatcaaggaaacccagcgtttgctggcagaaccagttcctggcatcaaagccgaaccagatgagagcaacgcccgttattttcatgtggtcattgctggccctcaggattccccctttgagggagggacttttaaacttgaactattccttccagaagaatacccaatggcagcccctaaagtacgtttcatgaccaaaatttatcatcctaatgtagacaagttgggaagaatatgtttagatattttgaaagataagtggtccccagcactgcagatccgcacagttctgctatcgatccaggccttgttaagtgctcccaatccagatgatccattagcaaatgatgtagcggagcagtggaagaccaacgaagcccaagccatagaaacagctagagcatggactaggctatatgccatgaataatatttaaattgatacgatcatcaagtgtgcatcacttctcctgttctgccaagacttcctcctctttgtttgcatttaatggacacagtcttagaaacattacagaataaaaaagcccagacatcttcagtcctttggtgattaaatgcacattagcaaatctatgtcttgtcctgattcactgtcataaagcatgagcagaggctagaagtatcatctggattgttgtgaaacgtttaaaagcagtggcccctccctgcttttattcatttcccccatcctggtttaagtataaagcactgtgaatgaaggtagttgtcaggttagctgcaggggtgtgggtgtttttattttattttattttattttatttttgaggggggaggtagtttaattttatgggctcctttcccccttttttggtgatctaattgcattggttaaaagcagctaaccaggtctttagaatatgctctagccaagtctaactttatttagacgctgtagatggacaagcttgattgttggaaccaaaatgggaacattaaacaaacatcacagccctcactaataacattgctgtcaagtgtagattccccccttcaaaaaaagcttgtgaccattttgtatggcttgtctggaaacttctgtaaatcttatgttttagtaaaatattttttgttattctactttgcctttgtacagtttattttactgtgtttatttcattttcccaatttgacaatcgtattttaaaattgaaactgatggaacattctttcttggtcttcaccatctgacaaattgaatggcaagaggtggattttgccagtttcttttcactgatgcagatttgtgttaagatagtactgaatggagtatttataaactggccctgagcatgcataaagcatcagtatctgacctttttttaaccttctaggaatttgaaataaatgtgtttgtgttgtctgattagatgatcattggtgtcttgccacaatgtttaaaaattactgtacaggaaagtcacagcaaagatagcagttgtgactgacatgtaggactttcacagttgtgccacatttttgcctaaaatttgggttatgacatttttcttggttcttatctgaaaatttcatctgtaacctttcatgtgtgttaagaaacactgatctgatcatttgggatttgctgaggcatttgtgagtcttccttataaacctgatgagcagatctcaactatctagcttgtgtgtcatcagaaaggtttatccctttgagagtatcaagtcctcagttaatgattcttgctttcatccctccagtatttgctgtgggagctcgttttattctttaatttggaattcagtaatttttcttctttattgacgaattcctcccctcacaaaactgttctttcccacctctctccatatctaattcctgattcttgttatttttaagtcataaatgtagccagtcataaatacataaatgttaaccttcgggttgcaaccttgtctcttgcagtttaaggtaatggatattgtagcccatttgaattttcttcactcttattctcgtaattctggagtttcttcagattgtggtgtattttattgtgctcctatgtaagatgaagaattaactattaaaattacattttcaacataaaaaa

SEQ ID NO: 312940 - DNA, 1682 bp, Homo sapiens
  misc_feature (1665)..(1665): n is a, c, g, or t
acggttaagagagacgcgcgcgcagtcgcgcgggggtcgtgccgtaccaccgtcgcgggcaggctcggccacgagcgccagagccccgcgcctcccctcgcggcctgtcccaagtccctgccccgcaacagagcgtcacttccgccatccccggcagcggttggggcggggcgcacgggggagggggccaggtcggagggaagcccgcccgtgcccgagcccgcgcccgagcagggactacatttcccgaggggcctcggcggcggctgcggcgacgggcgcggcaacgtcccccggaagtggagcccgggacttccactcgtgcgtgaggcgagaggagccggagacgagaccagaggccgaactcgggttctgacaagatggccgggctgccccgcaggatcatcaaggaaacccagcgtttgctggcagaaccagttcctggcatcaaagccgaaccagatgagagcaacgcccgttattttcatgtggtcattgctggccctcaggattccccctttgagggagggacttttaaacttgaactattccttccagaagaatacccaatggcagcccctaaagtacgtttcatgaccaaaatttatcatcctaatgtagacaagttgggaagaatatgtttagatattttgaaagataagtggtccccagcactgcagatccgcacagttctgctatcgatccaggccttgttaagtgctcccaatccagatgatccattagcaaatgatgtagcggagcagtggaagaccaacgaagcccaagccatagaaacagctagagcatggactaggctatatgccatgaataatatttaaattgatacgatcatcaagtgtgcatcacttctcctgttctgccaagacttcctcctctttgtttgcatttaatggacacagtcttagaaacattacagaataaaaaagcccagacatcttcagtcctttggtgattaaatgcacattagcaaatctatgtcttgtcctgattcactgtcataaagcatgagcagaggctagaagtatcatctggattgttgtgaaacgtttaaaagcagtggcccctccctgcttttattcatttcccccatcctggtttaagtataaagcactgtgaatgaaggtagttgtcaggttagctgcaggggtgtgggtgtttttattttattttattttattttatttttgaggggggaggtagtttaattttatgggctcctttcccccttttttggtgatctaattgcattggttaaaagcagctaaccaggtctttagaatatgctctagccaagtctaactttatttagacgctgtagatggacaagcttgattgttggaaccaaaatgggaacattaaacaaacatcacagccctcactaataacattgctgtcaagtgtagattccccccttcaaaaaaagcttgtgaccattttgtatggcttgtctggaaacttctgtaaatcttatgttttagtaaaatattttttgttattaaaaaaaaaaaaaaaaaaaaaaaaaaaaaaaaaaaaaaaaaaaaaaaaaaaaaaaaaaaaaaaaaaaaaaaaaaaaaaaaaaaaaaaaaaaaaaaaaaaaaaaaaaaaaaaaaatattaaaaaaaaaaaaaaaacaaaaaaaaaaanaaacaaacaaacaaaaa

SEQ ID NO: 312941 - DNA, 2146 bp, Homo sapiens
cggcagccaagcccctcttctccgccccgacggggccgcggaggaaacccagcgtttgctggcagaaccagttcctggcatcaaagccgaaccagatgagagcaacgcccgttattttcatgtggtcattgctggccctcaggattccccctttgagggagggacttttaaacttgaactattccttccagaagaatacccaatggcagcccctaaagtacgtttcatgaccaaaatttatcatcctaatgtagacaagttgggaagaatatgtttagatattttgaaagataagtggtccccagcactgcagatccgcacagttctgctatcgatccaggccttgttaagtgctcccaatccagatgatccattagcaaatgatgtagcggagcagtggaagaccaacgaagcccaagccatagaaacagctagagcatggactaggctatatgccatgaataatatttaaattgatacgatcatcaagtgtgcatcacttctcctgttctgccaagacttcctcctctttgtttgcatttaatggacacagtcttagaaacattacagaataaaaaagcccagacatcttcagtcctttggtgattaaatgcacattagcaaatctatgtcttgtcctgattcactgtcataaagcatgagcagaggctagaagtatcatctggattgttgtgaaacgtttaaaagcagtggcccctccctgcttttattcatttcccccatcctggtttaagtataaagcactgtgaatgaaggtagttgtcaggttagctgcaggggtgtgggtgtttttattttattttattttattttatttttgaggggggaggtagtttaattttatgggctcctttcccccttttttggtgatctaattgcattggttaaaagcagctaaccaggtctttagaatatgctctagccaagtctaactttatttagacgctgtagatggacaagcttgattgttggaaccaaaatgggaacattaaacaaacatcacagccctcactaataacattgctgtcaagtgtagattccccccttcaaaaaaagcttgtgaccattttgtatggcttgtctggaaacttctgtaaatcttatgttttagtaaaatattttttgttattctactttgcctttgtacagtttattttactgtgtttatttcattttcccaatttgacaatcgtattttaaaattgaaactgatggaacattctttcttggtcttcaccatctgacaaattgaatggcaagaggtggattttgccagtttcttttcactgatgcagatttgtgttaagatagtactgaatggagtatttataaactggccctgagcatgcataaagcatcagtatctgacctttttttaaccttctaggaatttgaaataaatgtgtttgtgttgtctgattagatgatcattggtgtcttgccacaatgtttaaaaattactgtacaggaaagtcacagcaaagatagcagttgtgactgacatgtaggactttcacagttgtgccacatttttgcctaaaatttgggttatgacatttttcttggttcttatctgaaaatttcatctgtaacctttcatgtgtgttaagaaacactgatctgatcatttgggatttgctgaggcatttgtgagtcttccttataaacctgatgagcagatctcaactatctagcttgtgtgtcatcagaaaggtttatccctttgagagtatcaagtcctcagttaatgattcttgctttcatccctccagtatttgctgtgggagctcgttttattctttaatttggaattcagtaatttttcttctttattgacgaattcctcccctcacaaaactgttctttcccacctctctccatatctaattcctgattcttgttatttttaagtcataaatgtagccagtcataaatacataaatgttaaccttcgggttgcaaccttgtctcttgcagtttaaggtaatggatattgtagcccatttgaattttcttcactcttattctcgtaattctggagtttcttcagattgtggtgtattttattgtgctcctatgtaagatgaagaattaactattaaaattacattttcaacataaaaaa

SEQ ID NO: 312942 - DNA, 2457 bp, Homo sapiens
acggttaagagagacgcgcgcgcagtcgcgcgggggtcgtgccgtaccaccgtcgcgggcaggctcggccacgagcgccagagccccgcgcctcccctcgcggcctgtcccaagtccctgccccgcaacagagcgtcacttccgccatccccggcagcggttggggcggggcgcacgggggagggggccaggtcggagggaagcccgcccgtgcccgagcccgcgcccgagcagggactacatttcccgaggggcctcggcggcggctgcggcgacgggcgcggcaacgtcccccggaagtggagcccgggacttccactcgtgcgtgaggcgagaggagccggagacgagaccagaggccgaactcgggttctgacaagatggccgggctgccccgcaggatcatcaaggaaacccagcgtttgctggcagaaccagttcctggcatcaaagccgaaccagatgagagcaacgcccgttattttcatgtggtcattgctggccctcaggattccccctttgagggagggacttttaaacttgaactattccttccagaagaatacccaatggcagcccctaaagtacgtttcatgaccaaaatttatcatcctaatgtagacaagttgggaagaatatgtttagatattttgaaagataagtggtccccagcactgcagatccgcacagttctgctatcgatccaggccttgttaagtgctcccaatccagatgatccattagcaaatgatgtagcggagcagtggaagaccaacgaagcccaagccatagaaacagctagagcatggactaggctatatgccatgaataatatttaaattgatacgatcatcaagtgtgcatcacttctcctgttctgccaagacttcctcctctttgtttgcatttaatggacacagtcttagaaacattacagaattgtcttgtcctgattcactgtcataaagcatgagcagaggctagaagtatcatctggattgttgtgaaacgtttaaaagcagtggcccctccctgcttttattcatttcccccatcctggtttaagtataaagcactgtgaatgaaggtagttgtcaggttagctgcaggggtgtgggtgtttttattttattttattttattttatttttgaggggggaggtagtttaattttatgggctcctttcccccttttttggtgatctaattgcattggttaaaagcagctaaccaggtctttagaatatgctctagccaagtctaactttatttagacgctgtagatggacaagcttgattgttggaaccaaaatgggaacattaaacaaacatcacagccctcactaataacattgctgtcaagtgtagattccccccttcaaaaaaagcttgtgaccattttgtatggcttgtctggaaacttctgtaaatcttatgttttagtaaaatattttttgttattctactttgcctttgtacagtttattttactgtgtttatttcattttcccaatttgacaatcgtattttaaaattgaaactgatggaacattctttcttggtcttcaccatctgacaaattgaatggcaagaggtggattttgccagtttcttttcactgatgcagatttgtgttaagatagtactgaatggagtatttataaactggccctgagcatgcataaagcatcagtatctgacctttttttaaccttctaggaatttgaaataaatgtgtttgtgttgtctgattagatgatcattggtgtcttgccacaatgtttaaaaattactgtacaggaaagtcacagcaaagatagcagttgtgactgacatgtaggactttcacagttgtgccacatttttgcctaaaatttgggttatgacatttttcttggttcttatctgaaaatttcatctgtaacctttcatgtgtgttaagaaacactgatctgatcatttgggatttgctgaggcatttgtgagtcttccttataaacctgatgagcagatctcaactatctagcttgtgtgtcatcagaaaggtttatccctttgagagtatcaagtcctcagttaatgattcttgctttcatccctccagtatttgctgtgggagctcgttttattctttaatttggaattcagtaatttttcttctttattgacgaattcctcccctcacaaaactgttctttcccacctctctccatatctaattcctgattcttgttatttttaagtcataaatgtagccagtcataaatacataaatgttaaccttcgggttgcaaccttgtctcttgcagtttaaggtaatggatattgtagcccatttgaattttcttcactcttattctcgtaattctggagtttcttcagattgtggtgtattttattgtgctcctatgtaagatgaagaattaactattaaaattacattttcaacataaaaaa

SEQ ID NO: 312943 - DNA, 2459 bp, Homo sapiens
acggttaagagagacgcgcgcgcagtcgcgcgggggtcgtgccgtaccaccgtcgcgggcaggctcggccacgagcgccagagccccgcgcctcccctcgcggcctgtcccaagtccctgccccgcaacagagcgtcacttccgccatccccggcagcggttggggcggggcgcacgggggagggggccaggtcggagggaagcccgcccgtgcccgagcccgcgcccgagcagggactacatttcccgaggggcctcggcggcggctgcggcgacgggcgcggcaacgtcccccggaagtggagcccgggacttccactcgtgcgtgaggcgagaggagccggagacgagaccagaggccgaactcgggttctgacaagatggccgggctgccccgcaggatcatcaaggaaacccagcgtttgctggcagaaccagttcctggcatcaaagccgaaccagatgagagcaacgcccgttattttcatgtggtcattgctggccctcaggattccccctttgagggagggacttttaaacttgaactattccttccagaagaatacccaatggcagcccctaaagtacgtttcatgaccaaaaataagtggtccccagcactgcagatccgcacagttctgctatcgatccaggccttgttaagtgctcccaatccagatgatccattagcaaatgatgtagcggagcagtggaagaccaacgaagcccaagccatagaaacagctagagcatggactaggctatatgccatgaataatatttaaattgatacgatcatcaagtgtgcatcacttctcctgttctgccaagacttcctcctctttgtttgcatttaatggacacagtcttagaaacattacagaataaaaaagcccagacatcttcagtcctttggtgattaaatgcacattagcaaatctatgtcttgtcctgattcactgtcataaagcatgagcagaggctagaagtatcatctggattgttgtgaaacgtttaaaagcagtggcccctccctgcttttattcatttcccccatcctggtttaagtataaagcactgtgaatgaaggtagttgtcaggttagctgcaggggtgtgggtgtttttattttattttattttattttatttttgaggggggaggtagtttaattttatgggctcctttcccccttttttggtgatctaattgcattggttaaaagcagctaaccaggtctttagaatatgctctagccaagtctaactttatttagacgctgtagatggacaagcttgattgttggaaccaaaatgggaacattaaacaaacatcacagccctcactaataacattgctgtcaagtgtagattccccccttcaaaaaaagcttgtgaccattttgtatggcttgtctggaaacttctgtaaatcttatgttttagtaaaatattttttgttattctactttgcctttgtacagtttattttactgtgtttatttcattttcccaatttgacaatcgtattttaaaattgaaactgatggaacattctttcttggtcttcaccatctgacaaattgaatggcaagaggtggattttgccagtttcttttcactgatgcagatttgtgttaagatagtactgaatggagtatttataaactggccctgagcatgcataaagcatcagtatctgacctttttttaaccttctaggaatttgaaataaatgtgtttgtgttgtctgattagatgatcattggtgtcttgccacaatgtttaaaaattactgtacaggaaagtcacagcaaagatagcagttgtgactgacatgtaggactttcacagttgtgccacatttttgcctaaaatttgggttatgacatttttcttggttcttatctgaaaatttcatctgtaacctttcatgtgtgttaagaaacactgatctgatcatttgggatttgctgaggcatttgtgagtcttccttataaacctgatgagcagatctcaactatctagcttgtgtgtcatcagaaaggtttatccctttgagagtatcaagtcctcagttaatgattcttgctttcatccctccagtatttgctgtgggagctcgttttattctttaatttggaattcagtaatttttcttctttattgacgaattcctcccctcacaaaactgttctttcccacctctctccatatctaattcctgattcttgttatttttaagtcataaatgtagccagtcataaatacataaatgttaaccttcgggttgcaaccttgtctcttgcagtttaaggtaatggatattgtagcccatttgaattttcttcactcttattctcgtaattctggagtttcttcagattgtggtgtattttattgtgctcctatgtaagatgaagaattaactattaaaattacattttcaacataaaaaa

SEQ ID NO: 312944 - DNA, 1455 bp, Homo sapiens
acggttaagagagacgcgcgcgcagtcgcgcgggggtcgtgccgtaccaccgtcgcgggcaggctcggccacgagcgccagagccccgcgcctcccctcgcggcctgtcccaagtccctgccccgcaacagagcgtcacttccgccatccccggcagcggttggggcggggcgcacgggggagggggccaggtcggagggaagcccgcccgtgcccgagcccgcgcccgagcagggactacatttcccgaggggcctcggcggcggctgcggcgacgggcgcggcaacgtcccccggaagtggagcccgggacttccactcgtgcgtgaggcgagaggagccggagacgagaccagaggccgaactcgggttctgacaagatggccgggctgccccgcaggatcatcaaggaaacccagcgtttgctggcagaaccagttcctggcatcaaagccgaaccagatgagagcaacgcccgttattttcatgtggtcattgctggccctcaggattccccctttgagggagggacttttaaacttgaactattccttccagaagaatacccaatggcagcccctaaagtacgtttcatgaccaaaatttatcatcctaatgtagacaagttgggaagaatatgtttagatattttgaaagataagtggtccccagcactgcagatccgcacagttctgctatcgatccaggccttgttaagtgctcccaatccagatgatccattagcaaatgatgtagcggagcagtggaagaccaacgaagcccaagccatagaaacagctagagcatggactaggctatatgccatgaataatatttaaattgatacgatcatcaagtgtgcatcacttctcctgttctgccaagacttcctcctctttgtttgcatttaatggacacagtcttagaaacattacagaataaaaaagcccagacatcttcagtcctttggtgattaaatgcacattagcaaatctatgtcttgtcctgattcactgtcataaagcatgagcagaggctagaagtatcatctggattgttgtgaaacgtttaaaagcagtggcccctccctgcttttattcatttcccccatcctggtttaagtataaagcactgtgaatgaaggtagttgtcaggttagctgcaggggtgtgggtgtttttattttattttattttattttatttttgaggggggaggtagtacagagaaagcaatgacctcgccagcaaggcgggcaccaagaagcaggagcagcaagaacagttcgtgtaaccagtctaccagcactacagaaccctagacagctaggcttagcctctcatgcctaccttcattgtactttatcactaaagatcacctttcacaaacataacagtcctaataaactcgagggctggcccgtgccacaattcgcctatagaaaggctatttaca

SEQ ID NO: 312945 - DNA, 996 bp, Homo sapiens
acggttaagagagacgcgcgcgcagtcgcgcgggggtcgtgccgtaccaccgtcgcgggcaggctcggccacgagcgccagagccccgcgcctcccctcgcggcctgtcccaagtccctgccccgcaacagagcgtcacttccgccatccccggcagcggttggggcggggcgcacgggggagggggccaggtcggagggaagcccgcccgtgcccgagcccgcgcccgagcagggactacatttcccgaggggcctcggcggcggctgcggcgacgggcgcggcaacgtcccccggaagtggagcccgggacttccactcgtgcgtgaggcgagaggagccggagacgagaccagaggccgaactcgggttctgacaagatggccgggctgccccgcaggatcatcaaggaaacccagcgtttgctggcagaaccagttcctggcatcaaagccgaaccagatgagagcaacgcccgttattttcatgtggtcattgctggccctcaggattccccctttgagggagggacttttaaacttgaactattccttccagaagaatacccaatggcagcccctaaagtacgtttcatgaccaaaatttatcatcctaatgtagacaagttgggaagaatatgtttagatattttgaaagataagtggtccccagcactgcagatccgcacagttctgctatcgatccaggccttgttaagtgctcccaatccagatgatccattagcaaatgatgtagcggagcagtggaagaccaacgaagcccaagccatagaaacagctagagcatggactaggctatatgccatgaataatatttaaattgatacgatcatcaagtgtgcatcacttctcctgttctgccaagacttcctcctctttgtttgcatttaatggacacagtcttagaaacattacagaataaaaaagcccagacatcttcagtcctttggtgattaaatgcacattagcaaatcta

SEQ ID NO: 312946 - DNA, 1306 bp, Homo sapiens
cggacgcgtgggctttagaatatgctctagccaagtctaacgacctggttagctgcttttaaccaatgcaattagatcaccaggtctttagaatatgctctagccaagtctaactttatttagacgctgtagatggacaagcttgattgttggaaccaaaatgggaacattaaacaaacatcacagccctcactaataacattgctgtcaagtgtagattccccccttcaaaaaaagcttgtgaccattttgtatggcttgtctggaaacttctgtaaatcttatgttttagtaaaatattttttgttattctactttgcctttgtacagtttattttactgtgtttatttcattttcccaatttgacaatcgtattttaaaattgaaactgatggaacattctttcttggtcttcaccatctgacaaattgaatggcaagaggtggattttgccagtttcttttcactgatgcagatttgtgttaagatagtactgaatggagtatttataaactggccctgagcatgcataaagcatcagtatctgacctttttttaaccttctaggaatttgaaataaatgtgtttgtgttgtctgattagatgatcattggtgtcttgccacaatgtttaaaaattactgtacaggaaagtcacagcaaagatagcagttgtgactgacatgtaggactttcacagttgtgccacatttttgcctaaaatttgggttatgacatttttcttggttcttatctgaaaatttcatctgtaacctttcatgtgtgttaagaaacactgatctgatcatttgggatttgctgaggcatttgtgagtcttccttataaacctgatgagcagatctcaactatctagcttgtgtgtcatcagaaaggtttatccctttgagagtatcaagtcctcagttaatgattcttgctttcatccctccagtatttgctgtgggagctcgttttattctttaatttggaattcagtaatttttcttctttattgacgaattcctcccctcacaaaactgttctttcccacctctctccatatctaattcctgattcttgttatttttaagtcataaatgtagccagtcataaatacataaatgttaaccttcgggttgcaaccttgtctcttgcagtttaaggtaatggatattgtagcccatttgaattttcttcactcttattctcgtaattctggagtttcttcagattgtggtgtattttattgtgctcctatgtaagatgaagaattaactattaaaattacattttcaacataaaaaa

SEQ ID NO: 312947 - DNA, 1005 bp, Homo sapiens
acggttaagagagacgcgcgcgcagtcgcgcgggggtcgtgccgtaccaccgtcgcgggcaggctcggccacgagcgccagagccccgcgcctcccctcgcggcctgtcccaagtccctgccccgcaacagagcgtcacttccgccatccccggcagcggttggggcggggcgcacgggggagggggccaggtcggagggaagcccgcccgtgcccgagcccgcgcccgagcagggactacatttcccgaggggcctcggcggcggctgcggcgacgggcgcggcaacgtcccccggaagtggagcccgggacttccactcgtgcgtgaggcgagaggagccggagacgagaccagaggccgaactcgggttctgacaagatggccgggctgccccgcaggatcatcaaggaaacccagcgtttgctggcagaaccagttcctggcatcaaagccgaaccagatgagagcaacgcccgttattttcatgtggtcattgctggccctcaggattccccctttgagggagggacttttaaacttgaactattccttccagaagaatacccaatggcagcccctaaagtacgtttcatgaccaaaatttatcatcctaatgtagacaagttgggaagaatatgtttagatattttgaaagataagtggtccccagcactgcagatccgcacagttctgctatcgatccaggccttgttaagtgctcccaatccagatgatccattagcaaatgatgtagcggagcagtggaagaccaacgaagcccaagccatagaaacagcaagtctaactttatttagacgctgtagatggacaagcttgattgttggaaccaaaatgggaacattaaacaaacatcacagccctcactaataacattgctgtcaagtgtagattccccccttcaaaaaaagcttgtgaccattttgtatggcttgtctggaaacttctgtaaatcttatgttttagtaaaatattttttgttatt

SEQ ID NO: 312948 - DNA, 937 bp, Homo sapiens
acggttaagagagacgcgcgcgcagtcgcgcgggggtcgtgccgtaccaccgtcgcgggcaggctcggccacgagcgccagagccccgcgcctcccctcgcggcctgtcccaagtccctgccccgcaacagagcgtcacttccgccatccccggcagcggttggggcggggcgcacgggggagggggccaggtcggagggaagcccgcccgtgcccgagcccgcgcccgagcagggactacatttcccgaggggcctcggcggcggctgcggcgacgggcgcggcaacgtcccccggaagtggagcccgggacttccactcgtgcgtgaggcgagaggagccggagacgagaccagaggccgaactcgggttctgacaagatggccgggctgccccgcaggatcatcaaggaaacccagcgtttgctggcagaaccagttcctggcatcaaagccgaaccagatgagagcaacgcccgttattttcatgtggtcattgctggccctcaggattccccctttgagggagggacttttaaacttgaactattccttccagaagaatacccaatggcagcccctaaagtacgtttcatgaccaaaatttatcatcctaatgtagacaagttgggaagaatatgtttagatattttgaaagataagtggtccccagcactgcagatccgcacagttctgctatcgatccaggccttgttaagtgctcccaatccagatgatccctagagcatggactaggctatatgccatgaataatatttaaattgatacgatcatcaagtgtgcatcacttctcctgttctgccaagacttcctcctctttgtttgcatttaatggacacagtcttagaaacattacagaataaaaaagcccagacatcttcagtcctttggtgattaaatgcacattagcaaatcta

SEQ ID NO: 312949 - DNA, 666 bp, Homo sapiens
acggttaagagagacgcgcgcgcagtcgcgcgggggtcgtgccgtaccaccgtcgcgggcaggctcggccacgagcgccagagccccgcgcctcccctcgcggcctgtcccaagtccctgccccgcaacagagcgtcacttccgccatccccggcagcggttggggcggggcgcacgggggagggggccaggtcggagggaagcccgcccgtgcccgagcccgcgcccgagcagggactacatttcccgaggggcctcggcggcggctgcggcgacgggcgcggcaacgtcccccggaagtggagcccgggacttccactcgtgcgtgaggcgagaggagccggagacgagaccagaggccgaactcgggttctgacaagatggccgggctgccccgcaggatcatcaaggaaacccagcgtttgctggcagaaccagttcctggcatcaaagccgaaccagatgagagcaacgcccgttattttcatgtggtcattgctggccctcaggattccccctttgagggagggacttttaaacttgaactattccttccagaagaatacccaatggcagcccctaaagtacgtttcatgaccaaaatttatcatcctaatgtagacaagttgacatgtagattgagtagtgccagactagtccaagtct

SEQ ID NO: 312950 - DNA, 419 bp, Homo sapiens
atttaaatatgaacatttttctggttaaaaataaatataagtagaagttagactatttttccccatacctgagtggctccttttgttttccttccataatgtgcacatcctgccttgaaaataaccctgccttaatgatgttaacgatgaaattctgatcgtttatttccctcttttcataacatcaaatagattcagaattcagtaaatattaattgaatatctattgtgccaggcagtgttccaaatgctgaggatatagcagtccataaaatagactcaaatccatcctctcatggagcttaaattctgaacaaaataagtagaaatgagatttgttagtagtgctgtggagataaagccagggagtggggatagggagtgtgcagggtagggttgaatggggtttgcaatttcag

SEQ ID NO: 312951 - DNA, 638 bp, Homo sapiens
cggcagccaagcccctcttctccgccccgacggggccgcggaggaaacccagcgtttgctggcagaaccagttcctggcatcaaagccgaaccagatgagagcaacgcccgttattttcatgtggtcattgctggccctcaggattccccctttgagggagggacttttaaacttgaactattccttccagaagaatacccaatggcagcccctaaagtacgtttcatgaccaaaatttatcatcctaatgtagacaagttgggaagaatatgtttagatattttgaaagataagtggtccccagcactgcagatccgcacagttctgctatcgatccaggccttgttaagtgctcccaatccagatgatccattagcaaatgatgtagcggagcagtggaagaccaacgaagcccaagccatagaaacagcaagtctaactttatttagacgctgtagatggacaagcttgattgttggaaccaaaatgggaacattaaacaaacatcacagccctcactaataacattgctgtcaagtgtagattccccccttcaaaaaaagcttgtgaccattttgtatggcttgtctggaaacttctgtaaatcttatgttttagtaaaatattttttgttatt

SEQ ID NO: 312952 - DNA, 2513 bp, Homo sapiens
acggttaagagagacgcgcgcgcagtcgcgcgggggtcgtgccgtaccaccgtcgcgggcaggctcggccacgagcgccagagccccgcgcctcccctcgcggcctgtcccaagtccctgccccgcaacagagcgtcacttccgccatccccggcagcggttggggcggggcgcacgggggagggggccaggtcggagggaagcccgcccgtgcccgagcccgcgcccgagcagggactacatttcccgaggggcctcggcggcggctgcggcgacgggcgcggcaacgtcccccggaagtggagcccgggacttccactcgtgcgtgaggcgagaggagccggagacgagaccagaggccgaactcgggttctgacaagatggccgggctgccccgcaggatcatcaaggaaacccagcgtttgctggcagaaccagttcctggcatcaaagccgaaccagatgagagcaacgcccgttattttcatgtggtcattgctggccctcaggattccccctttgagggagggacttttaaacttgaactattccttccagaagaatacccaatggcagcccctaaagtacgtttcatgaccaaaatttatcatcctaatgtagacaagttgggaagaatatgtttagatattttgaaagataagtggtccccagcactgcagatccgcacagttctgctatcgatccaggccttgttaagtgctcccaatccagatgatccattagcaaatgatgtagcggagcagtggaagaccaacgaagcccaagccatagaaacagctagagcatggactaggctatatgccatgaataatatttaaattgatacgatcatcaagtgtgcatcacttctcctgttctgccaagacttcctcctctttgtttgcatttaatggacacagtcttagaaacattacagaataaaaaagcccagacatcttcagtcctttggtgattaaatgcacattagcaaatctatgtcttgtcctgattcactgtcataaagcatgagcagaggctagaagtatcatctggattgttgtgaaacgtttaaaagcagtggcccctccctgcttttattcatttcccccatcctggtttaagtataaagcactgtgaatgaaggtagttgtcaggttagctgcaggggtgtgggtgtttttattttattttattttattttatttttgaggggggaggtagtttaattttatgggctcctttcccccttttttggtgatctaattgcattggttaaaagcagctaaccaggtctttagaatatgctctagccaagtctaactttatttagacgctgtagatggacaagcttgattgttggaaccaaaatgggaacattaaacaaacatcacagccctcactaataacattgctgtcaagtgtagattccccccttcaaaaaaagcttgtgaccattttgtatggcttgtctggaaacttctgtaaatcttatgttttagtaaaatattttttgttattctactttgcctttgtacagtttattttactgtgtttatttcattttcccaatttgacaatcgtattttaaaattgaaactgatggaacattctttcttggtcttcaccatctgacaaattgaatggcaagaggtggattttgccagtttcttttcactgatgcagatttgtgttaagatagtactgaatggagtatttataaactggccctgagcatgcataaagcatcagtatctgacctttttttaaccttctaggaatttgaaataaatgtgtttgtgttgtctgattagatgatcattggtgtcttgccacaatgtttaaaaattactgtacaggaaagtcacagcaaagatagcagttgtgactgacatgtaggactttcacagttgtgccacatttttgcctaaaatttgggttatgacatttttcttggttcttatctgaaaatttcatctgtaacctttcatgtgtgttaagaaacactgatctgatcatttgggatttgctgaggcatttgtgagtcttccttataaacctgatgagcagatctcaactatctagcttgtgtgtcatcagaaaggtttatccctttgagagtatcaagtcctcagttaatgattcttgctttcatccctccagtatttgctgtgggagctcgttttattctttaatttggaattcagtaatttttcttctttattgacgaattcctcccctcacaaaactgttctttcccacctctctccatatctaattcctgattcttgttatttttaagtcataaatgtagccagtcataaatacataaatgttaaccttcgggttgcaaccttgtctcttgcagtttaaggtaatggatattgtagcccatttgaattttcttcactcttattctcgtaattctggagtttcttcagattgtggtgtattttattgtgctcctatgtaagatgaagaattaactattaaaattacattttcaacataaaaaa

SEQ ID NO: 312953 - DNA, 2572 bp, Homo sapiens
acggttaagagagacgcgcgcgcagtcgcgcgggggtcgtgccgtaccaccgtcgcgggcaggctcggccacgagcgccagagccccgcgcctcccctcgcggcctgtcccaagtccctgccccgcaacagagcgtcacttccgccatccccggcagcggttggggcggggcgcacgggggagggggccaggtcggagggaagcccgcccgtgcccgagcccgcgcccgagcagggactacatttcccgaggggcctcggcggcggctgcggcgacgggcgcggcaacgtcccccggaagtggagcccgggacttccactcgtgcgtgaggcgagaggagccggagacgagaccagaggccgaactcgggttctgacaagatggccgggctgccccgcaggatcatcaaggaaacccagcgtttgctggcagaaccagttcctggcatcaaagccgaaccagatgagagcaacgcccgttattttcatgtggtcattgctggccctcaggattccccctttgagggagggacttttaaacttgaactattccttccagaagaatacccaatggcagcccctaaagtacgtttcatgaccaaaatttatcatcctaatgtagacaagttgggaagaatatgtttagatattttgaaagataagtggtccccagcactgcagatccgcacagttctgctatcgatccaggccttgttaagtgctcccaatccagatgatccattagcaaatgatgtagcggagcagtggaagaccaacgaagcccaagccatagaaacagctagagcatggactaggctatatgccatgaataatatttaaattgatacgatcatcaagtgtgcatcacttctcctgttctgccaagacttcctcctctttgtttgcatttaatggacacagtcttagaaacattacagaataaaaaagcccagacatcttcagtcctttggtgattaaatgcacattagcaaatctatgtcttgtcctgattcactgtcataaagcatgagcagaggctagaagtatcatctggattgttgtgaaacgtttaaaagcagtggcccctccctgcttttattcatttcccccatcctggtttaagtataaagcactgtgaatgaaggtagttgtcaggttagctgcaggggtgtgggtgtttttattttattttattttattttatttttgaggggggaggtagtttaattttatgggctcctttcccccttttttggtgatctaattgcattggttaaaagcagctaaccaggtctttagaatatgctctagccaagtctaactttatttagacgctgtagatggacaagcttgattgttggaaccaaaatgggaacattaaacaaacatcacagccctcactaataacattgctgtcaagtgtagattccccccttcaaaaaaagcttgtgaccattttgtatggcttgtctggaaacttctgtaaatcttatgttttagtaaaatattttttgttattctactttgcctttgtacagtttattttactgtgtttatttcattttcccaatttgacaatcgtattttaaaattgaaactgatggaacattctttcttggtcttcaccatctgacaaattgaatggcaagaggtggattttgccagtttcttttcactgatgcagatttgtgttaagatagtactgaatggagtatttataaactggccctgagcatgcataaagcatcagtatctgacctttttttaaccttctaggaatttgaaataaatgtgtttgtgttgtctgattagatgatcattggtgtcttgccacaatgtttaaaaattactgtacaggaaagtcacagcaaagatagcagttgtgactgacatgtaggactttcacagttgtgccacatttttgcctaaaatttgggttatgacatttttcttggttcttatctgaaaatttcatctgtaacctttcatgtgtgttaagaaacactgatctgatcatttgggatttgctgaggcatttgtgagtcttccttataaacctgatgagcagatctcaactatctagcttgtgtgtcatcagaaaggtttatccctttgagagtatcaagtcctcagttaatgattcttgctttcatccctccagtatttgctgtgggagctcgttttattctttaatttggaattcagtaatttttcttctttattgacgaattcctcccctcacaaaactgttctttcccacctctctccatatctaattcctgattcttgttatttttaagtcataaatgtagccagtcataaatacataaatgttaaccttcgggttgcaaccttgtctcttgcagtttaaggtaatggatattgtagcccatttgaattttcttcactcttattctcgtaattctggagtttcttcagattgtggtgtattttattgtgctcctatgtaagatgaagaattaactattaaaattacattttcaacataaaaaagcttttgatgactggtaactggtatccttccaaataaatgcattgcttggtaacaaatg

SEQ ID NO: 312954 - DNA, 2521 bp, Homo sapiens
  misc_feature (2445)..(2445): n is a, c, g, or t
acggttaagagagacgcgcgcgcagtcgcgcgggggtcgtgccgtaccaccgtcgcgggcaggctcggccacgagcgccagagccccgcgcctcccctcgcggcctgtcccaagtccctgccccgcaacagagcgtcacttccgccatccccggcagcggttggggcggggcgcacgggggagggggccaggtcggagggaagcccgcccgtgcccgagcccgcgcccgagcagggactacatttcccgaggggcctcggcggcggctgcggcgacgggcgcggcaacgtcccccggaagtggagcccgggacttccactcgtgcgtgaggcgagaggagccggagacgagaccagaggccgaactcgggttctgacaagatggccgggctgccccgcaggatcatcaaggaaacccagcgtttgctggcagaaccagttcctggcatcaaagccgaaccagatgagagcaacgcccgttattttcatgtggtcattgctggccctcaggattccccctttgagggagggacttttaaacttgaactattccttccagaagaatacccaatggcagcccctaaagtacgtttcatgaccaaaatttatcatcctaatgtagacaagttgggaagaatatgtttagatattttgaaagataagtggtccccagcactgcagatccgcacagttctgctatcgatccaggccttgttaagtgctcccaatccagatgatccattagcaaatgatgtagcggagcagtggaagaccaacgaagcccaagccatagaaacagctagagcatggactaggctatatgccatgaataatatttaaattgatacgatcatcaagtgtgcatcacttctcctgttctgccaagacttcctcctctttgtttgcatttaatggacacagtcttagaaacattacagaataaaaaagcccagacatcttcagtcctttggtgattaaatgcacattagcaaatctatgtcttgtcctgattcactgtcataaagcatgagcagaggctagaagtatcatctggattgttgtgaaacgtttaaaagcagtggcccctccctgcttttattcatttcccccatcctggtttaagtataaagcactgtgaatgaaggtagttgtcaggttagctgcaggggtgtgggtgtttttattttattttattttattttatttttgaggggggaggtagtttaattttatgggctcctttcccccttttttggtgatctaattgcattggttaaaagcagctaaccaggtctttagaatatgctctagccaagtctaactttatttagacgctgtagatggacaagcttgattgttggaaccaaaatgggaacattaaacaaacatcacagccctcactaataacattgctgtcaagtgtagattccccccttcaaaaaaagcttgtgaccattttgtatggcttgtctggaaacttctgtaaatcttatgttttagtaaaatattttttgttattctactttgcctttgtacagtttattttactgtgtttatttcattttcccaatttgacaatcgtattttaaaattgaaactgatggaacattctttcttggtcttcaccatctgacaaattgaatggcaagaggtggattttgccagtttcttttcactgatgcagatttgtgttaagatagtactgaatggagtatttataaactggccctgagcatgcataaagcatcagtatctgacctttttttaaccttctaggaatttgaaataaatgtgtttgtgttgtctgattagatgatcattggtgtcttgccacaatgtttaaaaattactgtacaggaaagtcacagcaaagatagcagttgtgactgacatgtaggactttcacagttgtgccacatttttgcctaaaatttgggttatgacatttttcttggttcttatctgaaaatttcatctgtaacctttcatgtgtgttaagaaacactgatctgatcatttgggatttgctgaggcatttgtgagtcttccttataaacctgatgagcagatctcaactatctagcttgtgtgtcatcagaaaggtttatccctttgagagtatcaagtcctcagttaatgattcttgctttcatccctccagtatttgctgtgggagctcgttttattctttaatttggaattcagtaatttttcttctttattgacgaattcctcccctcacaaaactgttctttcccacctctctccatatctaattcctgattcttgttatttttaagtcataaatgtagccagtcataaatacataaatgttaaccttcgggttgcaaccttgtctcttgcagtttaaggtaatggatattgtatggcttgtctggaaacttctgtaaatcttatgttttagtaaaaaattttttgttattcnactttgcctttggacagtttattttactgggtttatttcattttcccaatttgccaatcgtattttaaaatccgga

SEQ ID NO: 312955 - DNA, 2172 bp, Homo sapiens
  misc_feature (21)..(22): n is a, c, g, or t
aggctagtacgaggcggtgtnnatcggccgagggacaagatggccgggctgccccgcaggatcatcaaggaaacccagcgtttgctggcagaaccagttcctggcatcaaagccgaaccagatgagagcaacgcccgttattttcatgtggtcattgctggccctcaggattccccctttgagggagggacttttaaacttgaactattccttccagaagaatacccaatggcagcccctaaagtacgtttcatgaccaaaatttatcatcctaatgtagacaagttgggaagaatatgtttagatattttgaaagataagtggtccccagcactgcagatccgcacagttctgctatcgatccaggccttgttaagtgctcccaatccagatgatccattagcaaatgatgtagcggagcagtggaagaccaacgaagcccaagccatagaaacagctagagcatggactaggctatatgccatgaataatatttaaattgatacgatcatcaagtgtgcatcacttctcctgttctgccaagacttcctcctctttgtttgcatttaatggacacagtcttagaaacattacagaataaaaaagcccagacatcttcagtcctttggtgattaaatgcacattagcaaatctatgtcttgtcctgattcactgtcataaagcatgagcagaggctagaagtatcatctggattgttgtgaaacgtttaaaagcagtggcccctccctgcttttattcatttcccccatcctggtttaagtataaagcactgtgaatgaaggtagttgtcaggttagctgcaggggtgtgggtgtttttattttattttattttattttatttttgaggggggaggtagtttaattttatgggctcctttcccccttttttggtgatctaattgcattggttaaaagcagctaaccaggtctttagaatatgctctagccaagtctaactttatttagacgctgtagatggacaagcttgattgttggaaccaaaatgggaacattaaacaaacatcacagccctcactaataacattgctgtcaagtgtagattccccccttcaaaaaaagcttgtgaccattttgtatggcttgtctggaaacttctgtaaatcttatgttttagtaaaatattttttgttattctactttgcctttgtacagtttattttactgtgtttatttcattttcccaatttgacaatcgtattttaaaattgaaactgatggaacattctttcttggtcttcaccatctgacaaattgaatggcaagaggtggattttgccagtttcttttcactgatgcagatttgtgttaagatagtactgaatggagtatttataaactggccctgagcatgcataaagcatcagtatctgacctttttttaaccttctaggaatttgaaataaatgtgtttgtgttgtctgattagatgatcattggtgtcttgccacaatgtttaaaaattactgtacaggaaagtcacagcaaagatagcagttgtgactgacatgtaggactttcacagttgtgccacatttttgcctaaaatttgggttatgacatttttcttggttcttatctgaaaatttcatctgtaacctttcatgtgtgttaagaaacactgatctgatcatttgggatttgctgaggcatttgtgagtcttccttataaacctgatgagcagatctcaactatctagcttgtgtgtcatcagaaaggtttatccctttgagagtatcaagtcctcagttaatgattcttgctttcatccctccagtatttgctgtgggagctcgttttattctttaatttggaattcagtaatttttcttctttattgacgaattcctcccctcacaaaactgttctttcccacctctctccatatctaattcctgattcttgttatttttaagtcataaatgtagccagtcataaatacataaatgttaaccttcgggttgcaaccttgtctcttgcagtttaaggtaatggatattgtagcccatttgaattttcttcactcttattctcgtaattctggagtttcttcagattgtggtgtattttattgtgctcctatgtaagatgaagaattaactattaaaattacattttcaacataaaaaa

SEQ ID NO: 312956 - DNA, 2212 bp, Homo sapiens
caatattcaagttactgcatggcctgggctgtactggatacaatcgaacttgaacgtggccgtcgattttacagacaagatggccgggctgccccgcaggatcatcaaggaaacccagcgtttgctggcagaaccagttcctggcatcaaagccgaaccagatgagagcaacgcccgttattttcatgtggtcattgctggccctcaggattccccctttgagggagggacttttaaacttgaactattccttccagaagaatacccaatggcagcccctaaagtacgtttcatgaccaaaatttatcatcctaatgtagacaagttgggaagaatatgtttagatattttgaaagataagtggtccccagcactgcagatccgcacagttctgctatcgatccaggccttgttaagtgctcccaatccagatgatccattagcaaatgatgtagcggagcagtggaagaccaacgaagcccaagccatagaaacagctagagcatggactaggctatatgccatgaataatatttaaattgatacgatcatcaagtgtgcatcacttctcctgttctgccaagacttcctcctctttgtttgcatttaatggacacagtcttagaaacattacagaataaaaaagcccagacatcttcagtcctttggtgattaaatgcacattagcaaatctatgtcttgtcctgattcactgtcataaagcatgagcagaggctagaagtatcatctggattgttgtgaaacgtttaaaagcagtggcccctccctgcttttattcatttcccccatcctggtttaagtataaagcactgtgaatgaaggtagttgtcaggttagctgcaggggtgtgggtgtttttattttattttattttattttatttttgaggggggaggtagtttaattttatgggctcctttcccccttttttggtgatctaattgcattggttaaaagcagctaaccaggtctttagaatatgctctagccaagtctaactttatttagacgctgtagatggacaagcttgattgttggaaccaaaatgggaacattaaacaaacatcacagccctcactaataacattgctgtcaagtgtagattccccccttcaaaaaaagcttgtgaccattttgtatggcttgtctggaaacttctgtaaatcttatgttttagtaaaatattttttgttattctactttgcctttgtacagtttattttactgtgtttatttcattttcccaatttgacaatcgtattttaaaattgaaactgatggaacattctttcttggtcttcaccatctgacaaattgaatggcaagaggtggattttgccagtttcttttcactgatgcagatttgtgttaagatagtactgaatggagtatttataaactggccctgagcatgcataaagcatcagtatctgacctttttttaaccttctaggaatttgaaataaatgtgtttgtgttgtctgattagatgatcattggtgtcttgccacaatgtttaaaaattactgtacaggaaagtcacagcaaagatagcagttgtgactgacatgtaggactttcacagttgtgccacatttttgcctaaaatttgggttatgacatttttcttggttcttatctgaaaatttcatctgtaacctttcatgtgtgttaagaaacactgatctgatcatttgggatttgctgaggcatttgtgagtcttccttataaacctgatgagcagatctcaactatctagcttgtgtgtcatcagaaaggtttatccctttgagagtatcaagtcctcagttaatgattcttgctttcatccctccagtatttgctgtgggagctcgttttattctttaatttggaattcagtaatttttcttctttattgacgaattcctcccctcacaaaactgttctttcccacctctctccatatctaattcctgattcttgttatttttaagtcataaatgtagccagtcataaatacataaatgttaaccttcgggttgcaaccttgtctcttgcagtttaaggtaatggatattgtagcccatttgaattttcttcactcttattctcgtaattctggagtttcttcagattgtggtgtattttattgtgctcctatgtaagatgaagaattaactattaaaattacattttcaacataaaaaa

SEQ ID NO: 312957 - DNA, 1687 bp, Homo sapiens
acggttaagagagacgcgcgcgcagtcgcgcgggggtcgtgccgtaccaccgtcgcgggcaggctcggccacgagcgccagagccccgcgcctcccctcgcggcctgtcccaagtccctgccccgcaacagagcgtcacttccgccatccccggcagcggttggggcggggcgcacgggggagggggccaggtcggagggaagcccgcccgtgcccgagcccgcgcccgagcagggactacatttcccgaggggcctcggcggcggctgcggcgacgggcgcggcaacgtcccccggaagtggagcccgggacttccactcgtgcgtgaggcgagaggagccggagacgagaccagaggccgaactcgggttctgacaagatggccgggctgccccgcaggatcatcaaggaaacccagcgtttgctggcagaaccagttcctggcatcaaagccgaaccagatgagagcaacgcccgttattttcatgtggtcattgctggccctcaggattccccctttgagggagggacttttaaacttgaactattccttccagaagaatacccaatggcagcccctaaagtacgtttcatgaccaaaatttatcatcctaatgtagacaagttgggaagaatatgtttagatattttgaaagataagtggtccccagcactgcagatccgcacagttctgctatcgatccaggccttgttaagtgctcccaatccagatgatccattagcaaatgatgtagcggagcagtggaagaccaacgaagcccaagccatagaaacagctagagcatggactaggctatatgccatgaataatatttaaattgatacgatcatcaagtgtgcatcacttctcctgttctgccaagacttcctcctctttgtttgcatttaatggacacagtcttagaaacattacagaataaaaaagcccagacatcttcagtcctttggtgattaaatgcacattagcaaatctatgtcttgtcctgattcactgtcataaagcatgagcagaggctagaagtatcatctggattgttgtgaaacgtttaaaagcagtggcccctccctgcttttattcatttcccccatcctggtttaagtataaagcactgtgaatgaaggtagttgtcaggttagctgcaggggtgtgggtgtttttattttattttattttattttatttttgaggggggaggtagtttaattttatgggctcctttcccccttttttggtgatctaattgcattggttaaaagcagctaaccaggtctttagaatatgctctagccaagtctaactttatttagacgctgtagatggacaagcttgattgttggaaccaaaatgggaacattaaacaaacatcacagccctcactaataacattgctgtcaagtgtagattccccccttcaaaaaaagcttgtgaccattttgtatggcttgtctggaaacttctgtaaatcttatgttttagtaaaatattttttgttattggtatcaaaaaaaaaacagaaaaaaaaaaattttgggcggcggcccggaagttttatagacaattgtgtgggggggccatagatataacgggtagtggttcagaggaacggtgaaggtggtctacaaaaacggggccggttgcaacacggtggttggtaaggaaaaagg

SEQ ID NO: 312958 - DNA, 1547 bp, Homo sapiens
  misc_feature (1530)..(1530): n is a, c, g, or t
acggttaagagagacgcgcgcgcagtcgcgcgggggtcgtgccgtaccaccgtcgcgggcaggctcggccacgagcgccagagccccgcgcctcccctcgcggcctgtcccaagtccctgccccgcaacagagcgtcacttccgccatccccggcagcggttggggcggggcgcacgggggagggggccaggtcggagggaagcccgcccgtgcccgagcccgcgcccgagcagggactacatttcccgaggggcctcggcggcggctgcggcgacgggcgcggcaacgtcccccggaagtggagcccgggacttccactcgtgcgtgaggcgagaggagccggagacgagaccagaggccgaactcgggttctgacaagatggccgggctgccccgcaggatcatcaaggaaacccagcgtttgctggcagaaccagttcctggcatcaaagccgaaccagatgagagcaacgcccgttattttcatgtggtcattgctggccctcaggattccccctttgagggagggacttttaaacttgaactattccttccagaagaatacccaatggcagcccctaaagtacgtttcatgaccaaaatttatcatcctaatgtagacaagttgggaagaatatgtttagatattttgaaagataagtggtccccagcactgcagatccgcacagttctgctatcgatccaggccttgttaagtgctcccaatccagatgatccattagcaaatgatgtagcggagcagtggaagaccaacgaagcccaagccatagaaacagctagagcatggactaggctatatgccatgaataatatttaaattgatacgatcatcaagtgtgcatcacttctcctgttctgccaagacttcctcctctttgtttgcatttaatggacacagtcttagaaacattacagaataaaaaagcccagacatcttcagtcctttggtgattaaatgcacattagcaaatctatgtcttgtcctgattcactgtcataaagcatgagcagaggctagaagtatcatctggattgttgtgaaacgtttaaaagcagtggcccctccctgcttttattcatttcccccatcctggtttaagtataaagcactgtgaatgaaggtagttgtcaggttagctgcaggggtgtgggtgtttttattttattttattttattttatttttgaggggggaggtagtttaattttatgggctcctttcccccttttttggtgatctaattgcattggttaaaagcagctaaccaggtctttagaatatgctctagccaagtctaactttatttagacgctgtagatggacaagcttgattgttggaaccaaaatgggaacattaaacaaacatcacagccctcactaataacattgctgtcaagtgtagattccccccttcaaaaaaagcttgtgaccattttgtatggcttgtctggaaacttctgtaaatcttatgttttagtaaaatattttttgttattaaaaaaaaaaanaaacaaacaaacaaaaa

SEQ ID NO: 312959 - DNA, 2440 bp, Homo sapiens
acggttaagagagacgcgcgcgcagtcgcgcgggggtcgtgccgtaccaccgtcgcgggcaggctcggccacgagcgccagagccccgcgcctcccctcgcggcctgtcccaagtccctgccccgcaacagagcgtcacttccgccatccccggcagcggttggggcggggcgcacgggggagggggccaggtcggagggaagcccgcccgtgcccgagcccgcgcccgagcagggactacatttcccgaggggcctcggcggcggctgcggcgacgggcgcggcaacgtcccccggaagtggagcccgggacttccactcgtgcgtgaggcgagaggagccggagacgagaccagaggccgaactcgggttctgacaagatggccgggctgccccgcaggatcatcaaggaaacccagcgtttgctggcagaaccagttcctggcatcaaagccgaaccagatgagagcaacgcccgttattttcatgtggtcattgctggccctcaggattccccctttgagggagggacttttaaacttgaactattccttccagaagaatacccaatggcagcccctaaaataagtggtccccagcactgcagatccgcacagttctgctatcgatccaggccttgttaagtgctcccaatccagatgatccattagcaaatgatgtagcggagcagtggaagaccaacgaagcccaagccatagaaacagctagagcatggactaggctatatgccatgaataatatttaaattgatacgatcatcaagtgtgcatcacttctcctgttctgccaagacttcctcctctttgtttgcatttaatggacacagtcttagaaacattacagaataaaaaagcccagacatcttcagtcctttggtgattaaatgcacattagcaaatctatgtcttgtcctgattcactgtcataaagcatgagcagaggctagaagtatcatctggattgttgtgaaacgtttaaaagcagtggcccctccctgcttttattcatttcccccatcctggtttaagtataaagcactgtgaatgaaggtagttgtcaggttagctgcaggggtgtgggtgtttttattttattttattttattttatttttgaggggggaggtagtttaattttatgggctcctttcccccttttttggtgatctaattgcattggttaaaagcagctaaccaggtctttagaatatgctctagccaagtctaactttatttagacgctgtagatggacaagcttgattgttggaaccaaaatgggaacattaaacaaacatcacagccctcactaataacattgctgtcaagtgtagattccccccttcaaaaaaagcttgtgaccattttgtatggcttgtctggaaacttctgtaaatcttatgttttagtaaaatattttttgttattctactttgcctttgtacagtttattttactgtgtttatttcattttcccaatttgacaatcgtattttaaaattgaaactgatggaacattctttcttggtcttcaccatctgacaaattgaatggcaagaggtggattttgccagtttcttttcactgatgcagatttgtgttaagatagtactgaatggagtatttataaactggccctgagcatgcataaagcatcagtatctgacctttttttaaccttctaggaatttgaaataaatgtgtttgtgttgtctgattagatgatcattggtgtcttgccacaatgtttaaaaattactgtacaggaaagtcacagcaaagatagcagttgtgactgacatgtaggactttcacagttgtgccacatttttgcctaaaatttgggttatgacatttttcttggttcttatctgaaaatttcatctgtaacctttcatgtgtgttaagaaacactgatctgatcatttgggatttgctgaggcatttgtgagtcttccttataaacctgatgagcagatctcaactatctagcttgtgtgtcatcagaaaggtttatccctttgagagtatcaagtcctcagttaatgattcttgctttcatccctccagtatttgctgtgggagctcgttttattctttaatttggaattcagtaatttttcttctttattgacgaattcctcccctcacaaaactgttctttcccacctctctccatatctaattcctgattcttgttatttttaagtcataaatgtagccagtcataaatacataaatgttaaccttcgggttgcaaccttgtctcttgcagtttaaggtaatggatattgtagcccatttgaattttcttcactcttattctcgtaattctggagtttcttcagattgtggtgtattttattgtgctcctatgtaagatgaagaattaactattaaaattacattttcaacataaaaaa

SEQ ID NO: 312960 - DNA, 1654 bp, Homo sapiens
  misc_feature (1637)..(1637): n is a, c, g, or t
acggttaagagagacgcgcgcgcagtcgcgcgggggtcgtgccgtaccaccgtcgcgggcaggctcggccacgagcgccagagccccgcgcctcccctcgcggcctgtcccaagtccctgccccgcaacagagcgtcacttccgccatccccggcagcggttggggcggggcgcacgggggagggggccaggtcggagggaagcccgcccgtgcccgagcccgcgcccgagcagggactacatttcccgaggggcctcggcggcggctgcggcgacgggcgcggcaacgtcccccggaagtggagcccgggacttccactcgtgcgtgaggcgagaggagccggagacgagaccagaggccgaactcgggttctgacaagatggccgggctgccccgcaggatcatcaaggaaacccagcgtttgctggcagaaccagttcctggcatcaaagccgaaccagatgagagcaacgcccgttattttcatgtggtcattgctggccctcaggattccccctttgagggagggacttttaaacttgaactattccttccagaagaatacccaatggcagcccctaaagtacgtttcatgaccaaaatttatcatcctaatgtagacaagttgggaagaatatgtttagatattttgaaagataagtggtccccagcactgcagatccgcacagttctgctatcgatccaggccttgttaagtgctcccaatccagatgatccattagcaaatgatgtagcggagcagtggaagaccaacgaagcccaagccatagaaacagctagagcatggactaggctatatgccatgaataatatttaaattgatacgatcatcaagtgtgcatcacttctcctgttctgccaagacttcctcctctttgtttgcatttaatggacacagtcttagaaacattacagaataaaaaagcccagacatcttcagtcctttggtgattaaatgcacattagcaaatctatgtcttgtcctgattcactgtcataaagcatgagcagaggctagaagtatcatctggattgttgtgaaacgtttaaaagcagtggcccctccctgcttttattcatttcccccatcctggtttaagtataaagcactgtgaatgaaggtagttgtcaggttagctgcaggggtgtgggtgtttttattttattttattttaattttatgggctcctttcccccttttttggtgatctaattgcattggttaaaagcagctaaccaggtctttagaatatgctctagccaagtctaactttatttagacgctgtagatggacaagcttgattgttggaaccaaaatgggaacattaaacaaacatcacagccctcactaataacattgctgtcaagtgtagattccccccttcaaaaaaagcttgtgaccattttgtatggcttgtctggaaacttctgtaaatcttatgttttagtaaaatattttttgttattaaaaaaaaaaaaaaaaaaaaaaaaaaaaaaaaaaaaaaaaaaaaaaaaaaaaaaaaaaaaaaaaaaaaaaaaaaaaaaaaaaaaaaaaaaaaaaaaaaaaaaaaaaaaaaaaaatattaaaaaaaaaaaaaaaacaaaaaaaaaaanaaacaaacaaacaaaaa

SEQ ID NO: 312961 - DNA, 1139 bp, Homo sapiens
  misc_feature (1122)..(1122): n is a, c, g, or t
acggttaagagagacgcgcgcgcagtcgcgcgggggtcgtgccgtaccaccgtcgcgggcaggctcggccacgagcgccagagccccgcgcctcccctcgcggcctgtcccaagtccctgccccgcaacagagcgtcacttccgccatccccggcagcggttggggcggggcgcacgggggagggggccaggtcggagggaagcccgcccgtgcccgagcccgcgcccgagcagggactacatttcccgaggggcctcggcggcggctgcggcgacgggcgcggcaacgtcccccggaagtggagcccgggacttccactcgtgcgtgaggcgagaggagccggagacgagaccagaggccgaactcgggttctgacaagatggccgggctgccccgcaggatcatcaaggaaacccagcgtttgctggcagaaccagttcctggcatcaaagccgaaccagatgagagcaacgcccgttattttcatgtggtcattgctggccctcaggattccccctttgagggagggacttttaaacttgaactattccttccagaagaatacccaatggcagcccctaaagtacgtttcatgaccaaaatttatcatcctaatgtagacaagttgggaagaatatgtttagatattttgaaagataagtggtccccagcactgcagatccgcacagttctgctatcgatccaggccttgttaagtgctcccaatccagatgatccattagcaaatgatgtagcggagcagtggaagaccaacgaagcccaagccatagaaacagctagagcatggactaggctatatgccatgaataatatttaaattgatacgatcatcaagtgtgcatcacttctcctgttctgccaagacttcctcctctttgtttgcatttaatggacacagtcttagaaacattacagaataaaaaagcccagacatcttcagtcctttggtgattaaatgcacattagcaaatctaaaaaaaaaaaaaaaaaaaaaaaaaaaaaaaaaaaaaaaaaaaaaaaaaaaaaaaaaaaaaaaaaaaaaaaaaaaaaaaaaaaaaaaaaaaaaatattaaaaaaaaaaaaaaaacaaaaaaaaaaanaaacaaacaaacaaaaa

SEQ ID NO: 312962 - DNA, 923 bp, Homo sapiens
acggttaagagagacgcgcgcgcagtcgcgcgggggtcgtgccgtaccaccgtcgcgggcaggctcggccacgagcgccagagccccgcgcctcccctcgcggcctgtcccaagtccctgccccgcaacagagcgtcacttccgccatccccggcagcggttggggcggggcgcacgggggagggggccaggtcggagggaagcccgcccgtgcccgagcccgcgcccgagcagggactacatttcccgaggggcctcggcggcggctgcggcgacgggcgcggcaacgtcccccggaagtggagcccgggacttccactcgtgcgtgaggcgagaggagccggagacgagaccagaggccgaactcgggttctgacaagatggccgggctgccccgcaggatcatcaaggaaacccagcgtttgctggcagaaccagttcctggcatcaaagccgaaccagatgagagcaacgcccgttattttcatgtggtcattgctggccctcaggattccccctttgagggagggacttttaaacttgaactattccttccagaagaatacccaatggcagcccctaaaataagtggtccccagcactgcagatccgcacagttctgctatcgatccaggccttgttaagtgctcccaatccagatgatccattagcaaatgatgtagcggagcagtggaagaccaacgaagcccaagccatagaaacagctagagcatggactaggctatatgccatgaataatatttaaattgatacgatcatcaagtgtgcatcacttctcctgttctgccaagacttcctcctctttgtttgcatttaatggacacagtcttagaaacattacagaataaaaaagcccagacatcttcagtcctttggtgattaaatgcacattagcaaatcta

SEQ ID NO: 312963 - DNA, 1012 bp, Homo sapiens
tttgtttcttcagtgcattctgcgatatctttttcttctgggcaacctcctcttctggtttaggaacaatctgttccttttccgtaaggatcatctcaatgtggcaggagagctcatgtatgggttaatccgaccatgagctctgtaggtccggcggcgcatcttaggtgctttgttcacttggatatgctcaatgaccagagaatctacatctaaacccttaagttcagcattactctctgcgtttttaagcatgtgcagcaaaaattcagcactctttttgggccaccgaccttgtgtccagccccattgcttggcctgcgcacacctgccaactccaccattgtaacgtcggaatggtacacactgtttctgtaaagtgacatctttcagatacttcgtggcttttcgtatatgcatacccttgatggcctgagcagtttcacgagtgttcttaaagtgaacacgaagattggaacctcttgatttgcatgatttcgtggggttctccgggtcaagtgaatagcgaaccattttcacagatcacctcagacaagatggccgggctgccccgcaggatcatcaaggaaacccagcgtttgctggcagaaccagttcctggcatcaaagccgaaccagatgagagcaacgcccgttattttcatgtggtcattgctggccctcaggattccccctttgagggagggacttttaaacttgaactattccttccagaagaatacccaatggcagcccctaaagtacgtttcatgaccaaaatttatcatcctaatgtagacaagttcaagtctaactttatttagacgctgtagatggacaagcttgattgttggaaccaaaatgggaacattaaacaaacatcacagccctcactaataacattgctgtcaagtgtagattccccccttcaaaaaaagcttgtgaccattttgtatggcttgtctggaaacttctgtaaatcttatgttttagtaaaatattttttgttatt

SEQ ID NO: 312964 - DNA, 4342 bp, Homo sapiens
gccggttggggcggcgggcgcggggcggggcagggggcggggcgctgacgtcgcggcgcggcccgcggccagcggcccggtgaggcggggaggcggcggccggtcggcccggcccagcccagcccgcagctgcggcggcgctcagagttggttcctgaccgccttctgccgcggccgggtttgtcaccaggtcctggggtctgcaccggctcggccagacctcgccccccgcttctccgccatggccctggtgcggggcgcggagccggcggcggggccttcccgctggctgcccacgcacgtccaggtgacggtgctgcgggcccgcgggctgcggggcaagagctcgggagcgggcagcaccagcgacgcgtacacggtgatccaggtgggccgcgagaagtacagtacgtcggtggtggagaagacgcacggctgtcccgagtggcgtgaggagtgctccttcgagctgccgccgggggccctggatggcctgctgcgggcgcaggaggccgacgcgggcccggcgccctgggccgcgagctccgccgccgcctgcgagctggtgctcaccaccatgcaccgctcgctcatcggcgtcgacaagttcctgggccaggccacggtggcgctggacgaggtcttcggcgcaggccgcgcccagcacacgcagtggtacaagctgcactccaagccaggcaagaaggagaaggaacgcggcgagattgaagtcaccatccagttcacgcgcaacaacctgagcgccagtatgtttgacctgtccatgaaggacaagccaaggtctcccttcagcaagatcagggacaagatgaagggcaagaagaagtatgatctggaatctgcctctgccatcctcccaagcagcgccatagaggatcctgacctgggcagcctgggcaagatgggcaaagccaaaggcttcttcctccgcaacaagctgcgcaagtcgtccctgacccagtccaacacctcgctgggctcggacagcaccctgtcctcagccagcgggagcttggcctaccagggacctggcgccgaactcctcacccgctcaccaagccgtagcagctggctgtccactgaagggggcagggactctgcacagtcccccaagctgttcacccataagaggacctacagcgatgaggccaaccagatgcgagtggctcctcctcgggcccttctggaccttcagggccacctggatgctgcctcccgctcttcgctctgtgtcaatgggagccacatttacaatgaggagccccagggccctgtgcggcaccgcagctccatctcgggctcgcttccatcctctggctccttgcaagctgtctcttcccggttctccgaggaggggcctcgttccacagatgacacctggcccagaggcagtcgtagcaacagcagctcagaggcagtgcttggacaggaggagctgagtgctcaggctaaagtcctggcccctggggccagccaccctggagaggaggagggggcccggctaccagagggcaagccagtccaggttgccacacccatagtggcctcctctgaggctgtggcagagaaggagggagcccggaaggaggaacgcaagccccggatgggtctcttccaccaccaccaccaaggcctaagtcggagcgagttgggtcgccgaagctctctgggggaaaaggggggtcccatcctgggggcctccccacatcactcatccagtggggaggaaaaggccaagagtagctggtttggcttgagagaagccaaggacccgactcagaaacccagtccccaccccgtgaagcccctcagtgccgcccctgtggagggcagccccgacaggaagcagtcccgctccagtctgagcatagccctgagcagtgggctggagaagctcaaaacagtcacatctgggagcattcagcctgtgacccaggccccccaggctggccagatggtggacaccaaaaggctgaaggactcagctgtgctggaccagtcggccaagtactaccacctgacccacgatgagctcatcagcctgctcctgcagcgggagcgggagctgagccagcgggacgagcatgtgcaggagctggagagctacatcgaccggctgctggtgcggatcatggagacctcacccacgctgctgcagatccccccgggcccccccaaatagccttcctcaccctacccccaggagggttggcatggacctattgctgcctgccctctctcctcctgaactctctcatctgcagtggggcatcgtctgtcttgccttgtcactccttgctcctctccctcctgcctcaactggggctgctggaagggggccctctggattccctttggaggcatcaggttctgtgcacaacttgtgtgtctttgggagccctgggtctttcccacctgcctgttttcatatccctcagctttgggggccccagggaattggaactcttcccccaagacagagcaggggtgaactgtagcttgatgcagtaatctgggacaagactggttgctagcacatactttattatcccccaaggatggtcagccatttcttcccacagccaaagccccatccccttcatttccctccagtccctggaggggcttctagtattactgggacaatgaccacgctgcctgtttgtctgtgagttacgggcaaccagcctcttcagcctcacacccattcccctgagagcaagaagcctgtgtggtctgggccagtctctgccatgtcctgagtctgcttcagtctggagctgtttgtggggcgagtgccatgtggacagtggtggatgatgtgtgtgcttcaggctgctccctgacccctctgacctttccacgagtgtcacatgggaatgtgtggggcgcaggggcgggtgcggagagagcacctttttgcttttcgagctcttgaccacctccaatgtgtaggtccctccaggctggggcttgggactgcttatgatttggggatcaagcctccatgtctattcttgttgcctgtccagatgccaaaactctgtgttgctgcagggtttgaacttttggaaaccaattaaaatgtgcctttggtgggcggggtcaagagcccctggatgtcgacctctcccgctgtgtggcgtccccctcccacctgttgaatacatagggatggctctctcagggccctgggaatgggaatggacagcactgctgtgggctgttcccctcccctaaagttaatctcttggtctggccaagttgctgctccctcaaccttcctgctgtcttcccctccctcaaccccaataggaggatcccaggataaacactgctgggcaggcgggcaggcaggcctggggctgccctgctcactctcattgtctggcctcaggacttagccatactagaccagtcagcttgcctggaagagggaggtcccactatgcctttgggagacacctatacttaggaaaaagcctttgttgtcctcccatccatccattaagctgctatctcagcctgtcccttctgccccaggggcttgcctggcttggctgcagtgcactttgaaatgaagtatctgtcctttggcccagcccctggtttgcttgtagaaaacatggtaggcttccccaaggcatctgcagggaactttggcagcttggggcaccctgaattagcaaaaatggggggtgatgaggtgctgaagaaggatacttaacagcttagtgaggaggcaagagctcctctgggaccaccacttcttcaggagagggcctgtgggcttgcttttggaaggcctcaggcagacacgtgccctctgggtgatgtctgtctgctgccaggatggagcagaggagcgccacacatggaggaaagcccctgtaacgttacctaccttaaactccactcatcaaatctgagaaaagtatccactggtccccagggtttcagtcatgcttttgggggtcattgggtattagagaagtaagtatcttttctgagagagggggagtcaccccccctactggggattcctctgggctttattcactcccagccctggccctgacctttgtgggcctccctaatgcccagggcatggatggcttcagaggagtttttgaatcgaagcccagggtccttgttgatgtttcttctcctagccacacttggaggaaagttgcaggtgggttgggcagggagcaggcatggttctgctttgctgtttgtcttcctagttaaggctctttataaagagcttgttcttcatgttttaagcactttatgaagaataaaacattcatgtactgca

SEQ ID NO: 312965 - DNA, 4010 bp, Homo sapiens
agatgtaggggagatggggcagaggagaggtctctgagcaccaggagaaggtcctggggtgggaggaggcatggtgtggtaaccgccgccctacctggtggcacccgaggagcttccccactcaggatgtggttttctccatcatggaaatgttttggatagtttctcagctgcatctgaagcctggaagcccaggccgatgggtcagagcaggagcctttggggagaggctatcagtggctctcagagcaaggaggggtctgggcagtgcctggtaccgggcgggagccaggctccctgggcccgtgactgagttctgcctgctcccctcttctcacaggtggtacaagctgcactccaagccaggcaagaaggagaaggaacgcggcgagattgaagtcaccatccagttcacgcgcaacaacctgagcgccagtatgtttgacctgtccatgaaggacaagccaaggtctcccttcagcaagatcagggacaagatgaagggcaagaagaagtatgatctggaatctgcctctgccatcctcccaagcagcgccatagaggatcctgacctgggcagcctgggcaagatgggcaaagccaaaggcttcttcctccgcaacaagctgcgcaagtcgtccctgacccagtccaacacctcgctgggctcggacagcaccctgtcctcagccagcgggagcttggcctaccagggacctggcgccgaactcctcacccgctcaccaagccgtagcagctggctgtccactgaagggggcagggactctgcacagtcccccaagctgttcacccataagaggacctacagcgatgaggccaaccagatgcgagtggctcctcctcgggcccttctggaccttcagggccacctggatgctgcctcccgctcttcgctctgtgtcaatgggagccacatttacaatgaggagccccagggccctgtgcggcaccgcagctccatctcgggctcgcttccatcctctggctccttgcaagctgtctcttcccggttctccgaggaggggcctcgttccacagatgacacctggcccagaggcagtcgtagcaacagcagctcagaggcagtgcttggacaggaggagctgagtgctcaggctaaagtcctggcccctggggccagccaccctggagaggaggagggggcccggctaccagagggcaagccagtccaggttgccacacccatagtggcctcctctgaggctgtggcagagaaggagggagcccggaaggaggaacgcaagccccggatgggtctcttccaccaccaccaccaaggcctaagtcggagcgagttgggtcgccgaagctctctgggggaaaaggggggtcccatcctgggggcctccccacatcactcatccagtggggaggaaaaggccaagagtagctggtttggcttgagagaagccaaggacccgactcagaaacccagtccccaccccgtgaagcccctcagtgccgcccctgtggagggcagccccgacaggaagcagtcccgctccagtctgagcatagccctgagcagtgggctggagaagctcaaaacagtcacatctgggagcattcagcctgtgacccaggccccccaggctggccagatggtggacaccaaaaggctgaaggactcagctgtgctggaccagtcggccaagtactaccacctgacccacgatgagctcatcagcctgctcctgcagcgggagcgggagctgagccagcgggacgagcatgtgcaggagctggagagctacatcgaccggctgctggtgcggatcatggagacctcacccacgctgctgcagatccccccgggcccccccaaatagccttcctcaccctacccccaggagggttggcatggacctattgctgcctgccctctctcctcctgaactctctcatctgcagtggggcatcgtctgtcttgccttgtcactccttgctcctctccctcctgcctcaactggggctgctggaagggggccctctggattccctttggaggcatcaggttctgtgcacaacttgtgtgtctttgggagccctgggtctttcccacctgcctgttttcatatccctcagctttgggggccccagggaattggaactcttcccccaagacagagcaggggtgaactgtagcttgatgcagtaatctgggacaagactggttgctagcacatactttattatcccccaaggatggtcagccatttcttcccacagccaaagccccatccccttcatttccctccagtccctggaggggcttctagtattactgggacaatgaccacgctgcctgtttgtctgtgagttacgggcaaccagcctcttcagcctcacacccattcccctgagagcaagaagcctgtgtggtctgggccagtctctgccatgtcctgagtctgcttcagtctggagctgtttgtggggcgagtgccatgtggacagtggtggatgatgtgtgtgcttcaggctgctccctgacccctctgacctttccacgagtgtcacatgggaatgtgtggggcgcaggggcgggtgcggagagagcacctttttgcttttcgagctcttgaccacctccaatgtgtaggtccctccaggctggggcttgggactgcttatgatttggggatcaagcctccatgtctattcttgttgcctgtccagatgccaaaactctgtgttgctgcagggtttgaacttttggaaaccaattaaaatgtgcctttggtgggcggggtcaagagcccctggatgtcgacctctcccgctgtgtggcgtccccctcccacctgttgaatacatagggatggctctctcagggccctgggaatgggaatggacagcactgctgtgggctgttcccctcccctaaagttaatctcttggtctggccaagttgctgctccctcaaccttcctgctgtcttcccctccctcaaccccaataggaggatcccaggataaacactgctgggcaggcgggcaggcaggcctggggctgccctgctcactctcattgtctggcctcaggacttagccatactagaccagtcagcttgcctggaagagggaggtcccactatgcctttgggagacacctatacttaggaaaaagcctttgttgtcctcccatccatccattaagctgctatctcagcctgtcccttctgccccaggggcttgcctggcttggctgcagtgcactttgaaatgaagtatctgtcctttggcccagcccctggtttgcttgtagaaaacatggtaggcttccccaaggcatctgcagggaactttggcagcttggggcaccctgaattagcaaaaatggggggtgatgaggtgctgaagaaggatacttaacagcttagtgaggaggcaagagctcctctgggaccaccacttcttcaggagagggcctgtgggcttgcttttggaaggcctcaggcagacacgtgccctctgggtgatgtctgtctgctgccaggatggagcagaggagcgccacacatggaggaaagcccctgtaacgttacctaccttaaactccactcatcaaatctgagaaaagtatccactggtccccagggtttcagtcatgcttttgggggtcattgggtattagagaagtaagtatcttttctgagagagggggagtcaccccccctactggggattcctctgggctttattcactcccagccctggccctgacctttgtgggcctccctaatgcccagggcatggatggcttcagaggagtttttgaatcgaagcccagggtccttgttgatgtttcttctcctagccacacttggaggaaagttgcaggtgggttgggcagggagcaggcatggttctgctttgctgtttgtcttcctagttaaggctctttataaagagcttgttcttcatgttttaagcactttatgaagaataaaacattcatgtactgca

SEQ ID NO: 312966 - DNA, 3461 bp, Homo sapiens
gctctccccagtgcctcgagggccagccccacccccctggcctcccctgggaaagccctgcctgagtgggacaacaccttcaacgtctttgctgccagcaggctgcgtccagaggccaggagcgagatcctggcccctgcaggagtggggctggaggcggcagggctgcaagacccaggccctggggccatgactgcgaaggcagctgagccccagggagagcctgggggaggaggaggaggaggaggaggaggaggaggaagaggtgggagcagcgtgtggctggagcccagggttcctctggacttgggaccgaaccaccagagcgcgagcgcggctgacccagggctcctcgggtcggtaggggctggcctgccctcctcgtcagcccagctacagctgagagcctcaggctcagaaccagacagggaactgccagccccggaagtggaagcagggcagagtccggcagacagtgggacatctctatttagctccccagaagtgatcagtgtgtgggagaggctgccgggcccagagagcgctgctgagggccaggacgatgagtcctcccgaggcgaaaatcagctttgccctgacgtcgagacagctgatgatgcctggccttgggatgtggtcaccatttctcctgcagctgagacagcctcactagtctttcggggagagtctgatgagcctgctccccaggtgcagcctgaatcaccagaaactgtgagccccaaggggagcgaggggcttcccccaccggagcccgagcctaaacccgagtgggtgtctgacaaggggctgcagcccagcaccccacctcccaagccaccgcgcctcttcacaccctcaagatcccaggaggaggaggaggagaaggccgcagtggggctgagtaacagggggccggagacagagggagaagatgcctccccaagtgcactggttgtcggtcccccggagaccaaggaggagggagagaagcgtgagtcggaggagtctgacagctgctcctctgcaaccctgctgggccagcctggcctggaagagctagtggaggatgccagcccccctgtgtctgggccctgcctgtctgcacccgccagctgccctgagggtcctgcccccataccctgtcactcaaagagcttggctcttcagagtcagcacatctgggggactccagaggttggagaaggccctgaggctcctgaggcccagggccaggatccagtaggagaggggcttgggtccttgtcagccacctcccagcaggctgatgtgtgggtctccaaggaagatgccttgaaccccttcttgtttcaggggagccgagatcctcccagcctctcatctgcatccccgccagggtcgagggaatcttctattcattctggtccagaagagctgcccactcccccagagcctgactttccaccgccccctctcccgccttgggccagccaccaccgtggggggcccagccctccatgctctcccctgtctgaagcctggcccctgactacctcctctgcaccaccaggggagccagccttactccctggcccccatgagccctccccacctgggggctcccctgccctacttagggaggacctcgctgcagccaccccagcctccccgcttgtgcttctgcccttggagacacgaccagctgaggagccacagcccagtgccagtccccaccccgtgaagcccctcagtgccgcccctgtggagggcagccccgacaggaagcagtcccgctccagtctgagcatagccctgagcagtgggctggagaagctcaaaacagtcacatctgggagcattcagcctgtgacccaggccccccaggctggccagatggtggacaccaaaaggctgaaggactcagctgtgctggaccagtcggccaagtactaccacctgacccacgatgagctcatcagcctgctcctgcagcgggagcgggagctgagccagcgggacgagcatgtgcaggagctggagagctacatcgaccggctgctggtgcggatcatggagacctcacccacgctgctgcagatccccccgggcccccccaaatagccttcctcaccctacccccaggagggttggcatggacctattgctgcctgccctctctcctcctgaactctctcatctgcagtggggcatcgtctgtcttgccttgtcactccttgctcctctccctcctgcctcaactggggctgctggaagggggccctctggattccctttggaggcatcaggttctgtgcacaacttgtgtgtctttgggagccctgggtctttcccacctgcctgttttcatatccctcagctttgggggccccagggaattggaactcttcccccaagacagagcaggggtgaactgtagcttgatgcagtaatctgggacaagactggttgctagcacatactttattatcccccaaggatggtcagccatttcttcccacagccaaagccccatccccttcatttccctccagtccctggaggggcttctagtattactgggacaatgaccacgctgcctgtttgtctgtgagttacgggcaaccagcctcttcagcctcacacccattcccctgagagcaagaagcctgtgtggtctgggccagtctctgccatgtcctgagtctgcttcagtctggagctgtttgtggggcgagtgccatgtggacagtggtggatgatgtgtgtgcttcaggctgctccctgacccctctgacctttccacgagtgtcacatgggaatgtgtggggcgcaggggcgggtgcggagagagcacctttttgcttttcgagctcttgaccacctccaatgtgtaggtccctccaggctggggcttgggactgcttatgatttggggatcaagcctccatgtctattcttgttgcctgtccagatgccaaaactctgtgttgctgcagggtttgaacttttggaaaccaattaaaatgtgcctttggtgggcggggtcaagagcccctggatgtcgacctctcccgctgtgtggcgtccccctcccacctgttgaatacatagggatggctctctcagggccctgggaatgggaatggacagcactgctgtgggctgttcccctcccctaaagttaatctcttggtctggccaagttgctgctccctcaaccttcctgctgtcttcccctccctcaaccccaataggaggatcccagggcatggatggcttcagaggagtttttgaatcgaagcccagggtccttgttgatgtttcttctcctagccacacttggaggaaagttgcaggtgggttgggcagggagcaggcatggttctgctttgctgtttgtcttcctagttaaggctctttataaagagcttgttcttcatgttttaagcactttatgaagaataaaacattcatgtactgca

SEQ ID NO: 312967 - DNA, 321 bp, Homo sapiens
ggagtcaccccccctactggggattcctctgggctttattcactcccagccctggccctgacctttgtgggcctccctaatgcccagggcatggatggcttcagaggagtttttgaatcgaagcccagggtccttgttgatgtttcttctcctagccacacttggaggaaagttgcaggtgggttgggcagggagcaggcatggttctgctttgctgtttgtcttcctagttaaggctctttataaagagcttgttcttcatgttttaagcactttatgaagaataaaacattcatgtactgcatgtactgcaggtggctc

SEQ ID NO: 312968 - DNA, 4239 bp, Homo sapiens
gctctccccagtgcctcgagggccagccccacccccctggcctcccctgggaaagccctgcctgagtgggacaacaccttcaacgtctttgctgccagcaggctgcgtccagaggccaggagcgagatcctggcccctgcaggagtggggctggaggcggcagggctgcaagacccaggccctggggccatgactgcgaaggcagctgagccccagggagagcctgggggaggaggaggaggaggaggaggaggaggaggaagaggtgggagcagcgtgtggctggagcccagggttcctctggacttgggaccgaaccaccagagcgcgagcgcggctgacccagggctcctcgggtcggtaggggctggcctgccctcctcgtcagcccagctacagctgagagcctcaggctcagaaccagacagggaactgccagccccggaagtggaagcagggcagagtccggcagacagtgggacatctctatttagctccccagaagtgatcagtgtgtgggagaggctgccgggcccagagagcgctgctgagggccaggacgatgagtcctcccgaggcgaaaatcagctttgccctgacgtcgagacagctgatgatgcctggccttgggatgtggtcaccatttctcctgcagctgagacagcctcactagtctttcggggagagtctgatgagcctgctccccaggtgcagcctgaatcaccagaaactgtgagccccaaggggagcgaggggcttcccccaccggagcccgagcctaaacccgagtgggtgtctgacaaggggctgcagcccagcaccccacctcccaagccaccgcgcctcttcacaccctcaagatcccaggaggaggaggaggagaaggccgcagtggggctgagtaacagggggccggagacagagggagaagatgcctccccaagtgcactggttgtcggtcccccggagaccaaggaggagggagagaagcgtgagtcggaggagtctgacagctgctcctctgcaaccctgctgggccagcctggcctggaagagctagtggaggatgccagcccccctgtgtctgggccctgcctgtctgcacccgccagctgccctgagggtcctgcccccataccctgtcactcaaagagcttggctcttcagagtcagcacatctgggggactccagaggttggagaaggccctgaggctcctgaggcccagggccaggatccagtaggagaggggcttgggtccttgtcagccacctcccagcaggctgatgtgtgggtctccaaggaagatgccttgaaccccttcttgtttcaggggagccgagatcctcccagcctctcatctgcatccccgccagggtcgagggaatcttctattcattctggtccagaagagctgcccactcccccagagcctgactttccaccgccccctctcccgccttgggccagccaccaccgtggggggcccagccctccatgctctcccctgtctgaagcctggcccctgactacctcctctgcaccaccaggggagccagccttactccctggcccccatgagccctccccacctgggggctcccctgccctacttagggaggacctcgctgcagccaccccagcctccccgcttgtgcttctgcccttggagacacgaccagctgaggagccacagcccagtgccagtccccaccccgtgaagcccctcagtgccgcccctgtggagggcagccccgacaggaagcagtcccgctccagtctgagcatagccctgagcagtgggctggagaagctcaaaacagtcacatctgggagcattcagcctgtgacccaggccccccaggctggccagatggtggacaccaaaaggctgaaggactcagctgtgctggaccagtcggccaagtactaccacctgacccacgatgagctcatcagcctgctcctgcagcgggagcgggagctgagccagcgggacgagcatgtgcaggagctggagagctacatcgaccggctgctggtgcggatcatggagacctcacccacgctgctgcagatccccccgggcccccccaaatagccttcctcaccctacccccaggagggttggcatggacctattgctgcctgccctctctcctcctgaactctctcatctgcagtggggcatcgtctgtcttgccttgtcactccttgctcctctccctcctgcctcaactggggctgctggaagggggccctctggattccctttggaggcatcaggttctgtgcacaacttgtgtgtctttgggagccctgggtctttcccacctgcctgttttcatatccctcagctttgggggccccagggaattggaactcttcccccaagacagagcaggggtgaactgtagcttgatgcagtaatctgggacaagactggttgctagcacatactttattatcccccaaggatggtcagccatttcttcccacagccaaagccccatccccttcatttccctccagtccctggaggggcttctagtattactgggacaatgaccacgctgcctgtttgtctgtgagttacgggcaaccagcctcttcagcctcacacccattcccctgagagcaagaagcctgtgtggtctgggccagtctctgccatgtcctgagtctgcttcagtctggagctgtttgtggggcgagtgccatgtggacagtggtggatgatgtgtgtgcttcaggctgctccctgacccctctgacctttccacgagtgtcacatgggaatgtgtggggcgcaggggcgggtgcggagagagcacctttttgcttttcgagctcttgaccacctccaatgtgtaggtccctccaggctggggcttgggactgcttatgatttggggatcaagcctccatgtctattcttgttgcctgtccagatgccaaaactctgtgttgctgcagggtttgaacttttggaaaccaattaaaatgtgcctttggtgggcggggtcaagagcccctggatgtcgacctctcccgctgtgtggcgtccccctcccacctgttgaatacatagggatggctctctcagggccctgggaatgggaatggacagcactgctgtgggctgttcccctcccctaaagttaatctcttggtctggccaagttgctgctccctcaaccttcctgctgtcttcccctccctcaaccccaataggaggatcccaggataaacactgctgggcaggcgggcaggcaggcctggggctgccctgctcactctcattgtctggcctcaggacttagccatactagaccagtcagcttgcctggaagagggaggtcccactatgcctttgggagacacctatacttaggaaaaagcctttgttgtcctcccatccatccattaagctgctatctcagcctgtcccttctgccccaggggcttgcctggcttggctgcagtgcactttgaaatgaagtatctgtcctttggcccagcccctggtttgcttgtagaaaacatggtaggcttccccaaggcatctgcagggaactttggcagcttggggcaccctgaattagcaaaaatggggggtgatgaggtgctgaagaaggatacttaacagcttagtgaggaggcaagagctcctctgggaccaccacttcttcaggagagggcctgtgggcttgcttttggaaggcctcaggcagacacgtgccctctgggtgatgtctgtctgctgccaggatggagcagaggagcgccacacatggaggaaagcccctgtaacgttacctaccttaaactccactcatcaaatctgagaaaagtatccactggtccccagggtttcagtcatgcttttgggggtcattgggtattagagaagtaagtatcttttctgagagagggggagtcaccccccctactggggattcctctgggctttattcactcccagccctggccctgacctttgtgggcctccctaatgcccagggcatggatggcttcagaggagtttttgaatcgaagcccagggtccttgttgatgtttcttctcctagccacacttggaggaaagttgcaggtgggttgggcagggagcaggcatggttctgctttgctgtttgtcttcctagttaaggctctttataaagagcttgttcttcatgttttaagcactttatgaagaataaaacattcatgtactgca

SEQ ID NO: 312969 - DNA, 3350 bp, Homo sapiens
gctctccccagtgcctcgagggccagccccacccccctggcctcccctgggaaagccctgcctgagtgggacaacaccttcaacgtctttgctgccagcaggctgcgtccagaggccaggagcgagatcctggcccctgcaggagtggggctggaggcggcagggctgcaagacccaggccctggggccatgactgcgaaggcagctgagccccagggagagcctgggggaggaggaggaggaggaggaggaggaggaggaagaggtgggagcagcgtgtggctggagcccagggttcctctggacttgggaccgaaccaccagagcgcgagcgcggctgacccagggctcctcgggtcggtaggggctggcctgccctcctcgtcagcccagctacagctgagagcctcaggctcagaaccagacagggaactgccagccccggaagtggaagcagggcagagtccggcagacagtgggacatctctatttagctccccagaagtgatcagtgtgtgggagaggctgccgggcccagagagcgctgctgagggccaggacgatgagtcctcccgaggcgaaaatcagctttgccctgacgtcgagacagctgatgatgcctggccttgggatgtggtcaccatttctcctgcagctgagacagcctcactagtctttcggggagagtctgatgagcctgctccccaggtgcagcctgaatcaccagaaactgtgagccccaaggggagcgaggggcttcccccaccggagcccgagcctaaacccgagtgggtgtctgacaaggggctgcagcccagcaccccacctcccaagccaccgcgcctcttcacaccctcaagatcccaggaggaggaggaggagaaggccgcagtggggctgagtaacagggggccggagacagagggagaagatgcctccccaagtgcactggttgtcggtcccccggagaccaaggaggagggagagaagcgtgagtcggaggagtctgacagctgctcctctgcaaccctgctgggccagcctggcctggaagagctagtggaggatgccagcccccctgtgtctgggccctgcctgtctgcacccgccagctgccctgagggtcctgcccccataccctgtcactcaaagagcttggctcttcagagtcagcacatctgggggactccagaggttggagaaggccctgaggctcctgaggcccagggccaggatccagtaggagaggggcttgggtccttgtcagccacctcccagcaggctgatgtgtgggtctccaaggaagatgccttgaaccccttcttgtttcaggggagccgagatcctcccagcctctcatctgcatccccgccagggtcgagggaatcttctattcattctggtccagaagagctgcccactcccccagagcctgactttccaccgccccctctcccgccttgggccagccaccaccgtggggggcccagccctccatgctctcccctgtctgaagcctggcccctgactacctcctctgcaccaccaggggagccagccttactccctggcccccatgagccctccccacctgggggctcccctgccctacttagggaggacctcgctgcagccaccccagcctccccgcttgtgcttctgcccttggagacacgaccagctgaggagccacagcccagtgccagtccccaccccgtgaagcccctcagtgccgcccctgtggagggcagccccgacaggaagcagtcccgctccagtctgagcatagccctgagcagtgggctggagaagctcaaaacagtcacatctgggagcattcagcctgtgacccaggccccccaggctggccagatggtggacaccaaaaggctgaaggactcagctgtgctggaccagtcggccaagtactaccacctgacccacgatgagctcatcagcctgctcctgcagcgggagcgggagctgagccagcgggacgagcatgtgcaggagctggagagctacatcgaccggctgctggtgcggatcatggagacctcacccacgctgctgcagatccccccgggcccccccaaatagccttcctcaccctacccccaggagggttggcatggacctattgctgcctgccctctctcctcctgaactctctcatctgcagtggggcatcgtctgtcttgccttgtcactccttgctcctctccctcctgcctcaactggggctgctggaagggggccctctggattccctttggaggcatcaggttctgtgcacaacttgtgtgtctttgggagccctgggtctttcccacctgcctgttttcatatccctcagctttgggggccccagggaattggaactcttcccccaagacagagcaggggtgaactgtagcttgatgcagtaatctgggacaagactggttgctagcacatactttattatcccccaaggatggtcagccatttcttcccacagccaaagccccatccccttcatttccctccagtccctggaggggcttctagtattactgggacaatgaccacgctgcctgtttgtctgtgagttacgggcaaccagcctcttcagcctcacacccattcccctgagagcaagaagcctgtgtggtctgggccagtctctgccatgtcctgagtctgcttcagtctggagctgtttgtggggcgagtgccatgtggacagtggtggatgatgtgtgtgcttcaggctgctccctgacccctctgacctttccacgagtgtcacatgggaatgtgtggggcgcaggggcgggtgcggagagagcacctttttgcttttcgagctcttgaccacctccaatgtgtaggtccctccaggctggggcttgggactgcttatgatttggggatcaagcctccatgtctattcttgttgcctgtccagatgccaaaactctgtgttgctgcagggtttgaacttttggaaaccaattaaaatgtgcctttggtgggcggggtcaagagcccctggatgtcgacctctcccgctgtgtggcgtccccctcccacctgttgaatacatagggatggctctctcagggccctgggaatgggaatggacagcactgctgtgggctgttcccctcccctaaagttaatctcttggtctggccaagttgatgtttcttctcctagccacacttggaggaaagttgcaggtgggttgggcagggagcaggcatggttctgctttgctgtttgtcttcctagttaaggctctttataaagagcttgttcttcatgttttaagcactttatgaagaataaaacattcatgtactgca

SEQ ID NO: 312970 - DNA, 3952 bp, Homo sapiens
agcgggccgagggggcggggtcacgagccgccagccgccgggtggagggtcccggccgggagccgcggaaagagtagggctccccagacaacggggtccgacgagcagttgggcacgggctgagtccgcctgccggcagaatgtccctggctgcttattgcgtcatctgttgcagaagaataggaacctctacttccccaccaaaaagtggcacacactggagagatatcagaaatataataaagtttactggatcacttattttaggaggttctttatttcttacatatgaagttctggccctgaagaaggctgtgacattagatactcaagtggtagaacgagaaaaaatgaagtcatatatatatgtgcacacagtttctttagataaaggagaaaatcatggtattgcctggcaggcaagaaaagaacttcacaaagcagtaagaaaagtattggcaacatcagccaagatactgcggaatccatttgctgatccttttagtacagttgatatagaagatcatgagtgtgctgtgtggctgctcctacggaagagcaagtcagatgacaaaaccacgcgactcgaggctgtgcgggaaatgtcggagacccatcactggcatgattaccagtataggataattgctcaagcctgtgatccgaaaactcttattggtttggcacgaagcgaagagagtgatcttcgcttttttctcctaccacctcctttgccatctttaaaagaagattcttccactgaagaagagctcagacagttgctggcttccttacctcaaacagagctagatgagtgtatccagtattttacatctttggctcttagtgaaagcagtcagagtctagctgctcagaagggtggtttatggtgttttggaggaaatggacttccttatgctgaaagttttggagaagttccttcagcaacagtggaaatgttctgtttagaagctatagtaaaacattctgagatatccacacattgtgataaaatcgaagcaaatggaggcctgcagctacttcagaggctgtaccgacttcacaaggactgccctaaagtacagagaaatataatgcgtgtcattggaaatatggctttgaatgaacatcttcattcttctatagttcgctcaggctgggtttccatcatggcagaagcaatgaaatctccccacattatggagtcctcacacgctgccagaatcctggcaaatctagaccgagaaactgtgcaagaaaaatatcaggatggcgtatatgtgctgcatccccaatatcgaacaagtcagcccattaaagcagatgtcctttttattcatggccttatgggagcagcattcaaaacatggcgccagcaggacagtgagcaggctgtaattgaaaaacctatggaggatgaagacagatatacgacgtgctggcccaagacatggttagcaaaagactgtcctgctctccgaattatatctgtggagtatgacaccagcctcagcgactggagagcaaggtgccctatggaaagaaagtccattgcattcagaagcaacgaacttcttaggaagctcagagctgctggtgttggggataggccagtggtttggatatcacatagcatgggaggtcttcttgtcaaaaagatgctgttggaagcctctacgaagccagaaatgagtactgttatcaacaataccagaggaataattttttatagtgtccctcatcatggatcacgtttggctgaatactctgttaatattcgctatcttctcttcccctcgttggaagtcaaagaactcagcaaggattctcctgcacttaaaacactacaagatgactttctggagtttgctaaagacaaaaacttccaggtgctgaattttgtggaaacactaccaacctacattggcagcatgattaagctccatgtggtacctgtggaatcagcagatttaggcattggagatctaattcctgtggatgttaaccatttgaacatttgtaagccaaagaaaaaggatgcttttttgtaccagcgtactttacaattcattcgtgaagctttagccaaagaccttgaaaactaacagttgtgctcttccagttttcatatgtgaattcagtgcaagaaacttggtgttctgtttcttcttttaagctctatgcaatcatgcaaacatagtgatcatagcgtcaacatggtctggagtgtgttgcagactacagaacattgttctcccttcaagcgctgtaaagcaccaacccggaagtggcaggcacagaaggaagggctggattgggcccctttggtgtaaagaagtccctgtgtgctgctttatggttcgcagtgttgggcttggtgactggagcaaagctgctgtgagagagtgtcctttcccatctgtgactttcctggtgcatccaggaggggcacggcaggttctgaggtaactcaacttaccataaaaatgccattaagagagtacctaaaatggagagaagaatgaactagaacattcaagactcttttacttctgggtattgatttgctgtacatttttaaagtttgagtttttagctcagttctaccttttatctgacacattattactagtgttaactttgttagacttattgtcatgtctgggtcagttccttgtatctattttcgtattcctgagaacaaatctttttcttagaaaaattctagcttataataattcttttcagactgtagctgcctatgcttggaatttgtcctagataaggataaagtagctaatccattattgatcacagtatgaagtaaaactattctaagccattatatgaattagcaattcttagtatcaagattctcagattctctttggctaaataaacctttcttcttccttgctcatttgcaagtggtattaattgacctctatagcatgtgagtagtagataatcatgtcgatgacctttttttctttagagtaacagcattattgagatataatttacataccataagattcacccttttaaattatacaattcatttttgttttgttttgtttgtttagagacagggtctgactctgttgcccaagctggagtgcagtggcatgatcatagctcattgtaacctcaaactcctgggctcaagagatccttttgcttcagcctcccaagcagctaggactacaggcacatgccaccacacttgggtaattaaaaaataaataaatacttttttgtagagacagggtctcactgtgttgcccaggtctcaaactcccgatctcaagccaccctcccaaaatgctgtgattataggccagagccattgttcccaggctcaattcattggtttttagtatagttcactgagttgtgcaacatcattgctatttaatttcaggctatttcatcatccccaaaagaaccccatacccatgagcagtcagttcccacctctgctttcccaagcctgcggtaaacactaatctgttttctgtctctatggatttgggaattttatgtaaatggaatcatacaatatgtggccctctctgccttcttccttctattagcatgttttcaaggttcattcatgatatagcatgtatcagtactacttcatttctttttatggccgaaattactccattgtatgatatgccatgtttctttatccattcatcagctgatggacatctaggttctgttcatttttgtctatgataaataatgctaccatgatcatttgtgtacaaatttatgtgtggatagatgtttttgattctcttgggtggaattgctggtcaaatggtaagtctatgtttaaattttgaagatggtgaacttttgtagaatgagatagtcgaagctaaaactggagtatggcatctgaaggtaaatggctcatcaataaactcgatatcaacaa

SEQ ID NO: 312971 - DNA, 1924 bp, Homo sapiens
agcgggccgagggggcggggtcacgagccgccagccgccgggtggagggtcccggccgggagccgcggaaagagtagggctccccagacaacggggtccgacgagcagttgggcacgggctgagtccgcctgccggcagaatgtccctggctgcttattgcgtcatctgttgcagaagaataggaacctctacttccccaccaaaaagtggcacacactggagagatatcagaaatataataaagtttactggatcacttattttaggaggttctttatttcttacatatgaagttctggccctgaagaaggctgtgacattagatactcaagtggtagaacgagaaaaaatgaagtcatatatatatgtgcacacagtttctttagataaaggagaaaatcatggtattgcctggcaggcaagaaaagaacttcacaaagcagtaagaaaagtattggcaacatcagccaagatactgcggaatccatttgctgatccttttagtacagttgatatagaagatcatgagtgtgctgtgtggctgctcctacggaagagcaagtcagatgacaaaaccacgcgactcgaggctgtgcgggaaatgtcggagacccatcactggcatgattaccagtataggataattgctcaagcctgtgatccgaaaactcttattggtttggcacgaagcgaagagagtgatcttcgcttttttctcctaccacctcctttgccatctttaaaagaagattcttccactgaagaagagctcagacagttgctggcttccttacctcaaacagagctagatgagtgtatccagtattttacatctttggctcttagtgaaagcagtcagagtctagctgctcagaagggtggtttatggtgttttggaggaaatggacttccttatgctgaaagttttggagaagttccttcagcaacagtggaaatgttctgtttagaagctatagtaaaacattctgagatatccacacattgtgataaaatcgaagcaaatggaggcctgcagctacttcagaggctgtaccgacttcacaaggactgccctaaagtacagagaaatataatgcgtgtcattggaaatatggctttgaatgaacatcttcattcttctatagttcgctcaggctgggtttccatcatggcagaagcaatgaaatctccccacattatggagtcctcacacgctgccagaatcctggcaaatctagaccgagaaactgtgcaagaaaaatatcaggatggcgtatatgtgctgcatccccaatatcgaacaagtcagcccattaaagcagatgtcctttttattcatggccttatgggagcagcattcaaaacatggcgccagcaggacagtgagcaggctgtaattgaaaaacctatggaggatgaagacagatatacgacgtgctggcccaagacatggttagcaaaagactgtcctgctctccgaattatatctgtggagtatgacaccagcctcagcgactggagagcaaggtgccctatggaaagaaagtccattgcattcagaagcaacgaacttcttaggaagctcagagctgctggtgttggggataggccagtggtttggatatcacatagcatgggaggtcttcttgtcaaaaagatgctgttggaagcctctacgaagccagaaatgagtactgttatcaacaataccagaggaataattttttatagtgtccctcatcatggatcacgtttggctgaatactctgttaatattcgctatcttctcttcccctcgttggaagtcaaagaactcagcaagggtaatactttttgtcataaaggaaattggggttatattaacatcagttacacagagaagaagaaaaagtttcttccttgaatgtattatctcattttaaa

SEQ ID NO: 312972 - DNA, 367 bp, Homo sapiens
gtaggacgtgaaggcaggggtggtgtgggggcggacgggggcgtcggcgcagctgggcgcggtggggagcggagaatggggagggcagggaccgggcacggccgagcaccgccgtctggcgcgcggaccggaccgaccagctgacgctcggctgggcgtgagggcctctctctctggtggtcgcgagcctgactcgtctttccctgtcgctgcctttctctggctgctgtcgaggccttggggagtgcacctgccggtccgtcttcccgggctcggtagtcacggagagatgaggaggaggaggaaagggcctcaccagtcacttctgagccttgcagaccaccgcttcctgctccctctctaaccc

SEQ ID NO: 312973 - DNA, 431 bp, Homo sapiens
gagcaagtcagatgacaaaaccacgcgactcgaggctgtgcgggaaatgtcggagacccatcactggcatggtaatgagactacctgaacaggtggcatgccttcagctggctcttgattgctgacataaaagacaagggagtggccaggtgcggtggctcacgcctgtaatcccagcactttgggaggccacgctggttggatcacaaggtcaggagttcaagacccaccctggctaacatggtgaaaccccgtctctactaaaaatacaaaaaaattagccaggcatggtggcgggcgtctgtagtcccagctactcgagaggctgaagcaggagaatggcgtgaacccaggaggcagagcttgcagtgagccgagattgcgccactgcactccagcctgggcaacagagcgagactccatctcaaaaa

SEQ ID NO: 312974 - DNA, 478 bp, Homo sapiens
aaatactggtaccacttcgagaccagagacttgaaaagatagtgctggaattgtttttacggtaccttcaaaccttattccagtgctatctttaattatagtgcaagaggcctttagttataaatttgatttactaggcagtaattgcagtggtgaagattcatacttgttctcacatatgttttattttacttagacatggttagcaaaagactgtcctgctctccgaattatatctgtggagtatgacaccagcctcagcgactggagagcaaggtgccctatggaaaggtaacagaggcgactttagaccaggaggacagggaagaattcaggccgcaagtttaggtcctcttggatgggaagtgattttaattttttgatgccacagacaggattttcttatgaagaacaaacctaatcttttttgtcttccttctagaaggagtttgctgtcaataagcagtggaatagtaga

SEQ ID NO: 312975 - DNA, 2496 bp, Homo sapiens
gactaaagttcttaactctaaaaattagacagcaaattgaggggatcgatagccttgtgtcatgcctgctgtttttgttttgttcagaaagtccattgcattcagaagcaacgaacttcttaggaagctcagagctgctggtgttggggataggccagtggtttggatatcacatagcatgggaggtcttcttgtcaaaaagatgctgttggaagcctctacgaagccagaaatgagtactgttatcaacaataccagaggaataattttttatagtgtccctcatcatggatcacgtttggctgaatactctgttaatattcgctatcttctcttcccctcgttggaagtcaaagaactcagcaaggattctcctgcacttaaaacactacaagatgactttctggagtttgctaaagacaaaaacttccaggtgctgaattttgtggaaacactaccaacctacattggcagcatgattaagctccatgtggtacctgtggaatcagcagatttaggcattggagatctaattcctgtggatgttaaccatttgaacatttgtaagccaaagaaaaaggatgcttttttgtaccagcgtactttacaattcattcgtgaagctttagccaaagaccttgaaaactaacagttgtgctcttccagttttcatatgtgaattcagtgcaagaaacttggtgttctgtttcttcttttaagctctatgcaatcatgcaaacatagtgatcatagcgtcaacatggtctggagtgtgttgcagactacagaacattgttctcccttcaagcgctgtaaagcaccaacccggaagtggcaggcacagaaggaagggctggattgggcccctttggtgtaaagaagtccctgtgtgctgctttatggttcgcagtgttgggcttggtgactggagcaaagctgctgtgagagagtgtcctttcccatctgtgactttcctggtgcatccaggaggggcacggcaggttctgaggtaactcaacttaccataaaaatgccattaagagagtacctaaaatggagagaagaatgaactagaacattcaagactcttttacttctgggtattgatttgctgtacatttttaaagtttgagtttttagctcagttctaccttttatctgacacattattactagtgttaactttgttagacttattgtcatgtctgggtcagttccttgtatctattttcgtattcctgagaacaaatctttttcttagaaaaattctagcttataataattcttttcagactgtagctgcctatgcttggaatttgtcctagataaggataaagtagctaatccattattgatcacagtatgaagtaaaactattctaagccattatatgaattagcaattcttagtatcaagattctcagattctctttggctaaataaacctttcttcttccttgctcatttgcaagtggtattaattgacctctatagcatgtgagtagtagataatcatgtcgatgacctttttttctttagagtaacagcattattgagatataatttacataccataagattcacccttttaaattatacaattcatttttgttttgttttgtttgtttagagacagggtctgactctgttgcccaagctggagtgcagtggcatgatcatagctcattgtaacctcaaactcctgggctcaagagatccttttgcttcagcctcccaagcagctaggactacaggcacatgccaccacacttgggtaattaaaaaataaataaatacttttttgtagagacagggtctcactgtgttgcccaggtctcaaactcccgatctcaagccaccctcccaaaatgctgtgattataggccagagccattgttcccaggctcaattcattggtttttagtatagttcactgagttgtgcaacatcattgctatttaatttcaggctatttcatcatccccaaaagaaccccatacccatgagcagtcagttcccacctctgctttcccaagcctgcggtaaacactaatctgttttctgtctctatggatttgggaattttatgtaaatggaatcatacaatatgtggccctctctgccttcttccttctattagcatgttttcaaggttcattcatgatatagcatgtatcagtactacttcatttctttttatggccgaaattactccattgtatgatatgccatgtttctttatccattcatcagctgatggacatctaggttctgttcatttttgtctatgataaataatgctaccatgatcatttgtgtacaaatttatgtgtggatagatgtttttgattctcttgggtggaattgctggtcaaatggtaagtctatgtttaaattttgaagatggtgaacttttgtagaatgagatagtcgaagctaaaactggagtatggcatctgaaggtaaatggctcatcaataaactcgatatcaacaa

SEQ ID NO: 312976 - DNA, 1931 bp, Homo sapiens
ttcagcaagttcccctgaaatttgggctgctgcttgggtgaatatcccaggatgggggttccattctaggagtggactggcaggctgagcctcccatggagctgatccagccaggatacagagaaggggaggcaaaggctgagacagaaccagcttgagagcggaggcgcaactcttgtctcctggtggccttgagcatttcacaatagggggataaaggataggagcagaaaagtggggctgacttcagaaatggggtcctctagagctcacgggagggtgttagattggagtgggagcttagtggaggtgagccttagaggcaaaagtctccagaccaatccagggcccctcttctatccgggggcccctcttctatccagggcccctcttctgtctgggagcccctcttctatctggggcctcatgcagtggggcctaggggaggttctctgaggacttggccttgatgacagggtggctggaggaatcagaacggtcagaccttctttgacctgcgggcacctttagttggaatggtcaggcctgggatggtggagggggctcttgcaggtggggactggggtggcggggaggaggctgtatggccgccatatctcctttggctgggggcgtcagggctggagaggtgtgaagagtccctgaggcctcgatgcatctcactccagctcaccaggtctgcatttgcccgtccccagctcctgctgccacctccggccgttttaggcacttggctcccttggcccagaggagcttgcctcacaggcctgtgcacctctgacccctgtgaaccagttttcctttgtgcctccacaccacagcctggcagctctgatcaggaaagtgaggaacagcaacaattccggaacattttcaagcagatagcaggagatgacatggagatctgtgcagatgagctcaagaaggtccttaacacagtcgtgaacaaacacaaggacctgaagacacacgggttcacactggagtcctgccgtagcatgattgcgctcatggatacagatggctctggaaagctcaacctgcaggagttccaccacctctggaacaagattaaggcctggcagaaaattttcaaacactatgacacagaccagtccggcaccatcaacagctacgagatgcgaaatgcagtcaacgacgcaggattccacctcaacaaccagctctatgacatcattaccatgcggtacgcagacaaacacatgaacatcgactttgacagtttcatctgctgcttcgttaggctggagggcatgttcagagcttttcatgcatttgacaaggatggagatggtatcatcaagctcaacgttctggagtggctgcagctcaccatgtatgcctgaaccaggctggcctcatccaaagccatgcaggatcactcaggatttcagtttcaccctctatttccaaagccatttacctcaaaggacccagcagctacacccctacaggcttccaggcacctcatcagtcatgttcctcctccattttaccccctacccatccttgatcggtcatgcctagcctgaccctttagtaaagcaatgaggtaggaagaacaaacccttgtccctttgccatgtggaggaaagtgcctgcctctggtccgagccgcctcggttctgaagcgagtgctcctgcttaccttgctctaggctgtctgcagaagcacctgccggtggcactcagcacctccttgtgctagagccctccatcaccttcacgctgtcccaccatgggccaggaaccaaaccagcactgggttctactgctgtggggtaaactaactcagtggaatagggctggttactttgggctgtccaactcataagtttggctgcattttgaaaaaagctgatctaaataaaggcatgtgtatggctggt

SEQ ID NO: 312977 - DNA, 373 bp, Homo sapiens
aagttcaaaaacaagactgtccttaagaagcgctgcaaggactgttacctgctgaagaggctgtgtcgctggtacgtctactgtccaagccctcggctgtacacggagagccctgcagaagcacctgccggtggcactcagcacctccttgtgctagagccctccatcaccttcacgctgtcccaccatgggccaggaaccaaaccagcactgggttctactgctgtggggtaaactaactcagtggaatagggctggttactttgggctgtccaactcataagtttggctgcattttgaaaaaagctgatctaaataaaggcatgtgtatggctggtaaaaaaataaaaatattaaaatagaccttccgaaa

SEQ ID NO: 312978 - DNA, 314 bp, Homo sapiens
tgcccctctgaactgtcttctgggcagtgacagtcatggtcataatcctgaccctgagccagtgccaggtctccaagtgccttctgaatgaccacaggcgattggttttagtggtaggtgtgtggggatctgttctggtcatctggatgctggtcatcggtgtgcagtattgatcaggacctgcaaacccaaaagcttatgggagctggcacgtcactgagtagagcaggcaggtgcaggggttttgatgtccctgcactgacacagttgtctgcagttctcaattgacatagggagattttctttggtaaaag

SEQ ID NO: 312979 - DNA, 1444 bp, Homo sapiens
tgcccctctgaactgtcttctgggcagtgacagtcatggtcataatcctgaccctgagccagtgccaggtctccaagtgccttctgaatgaccacaggcgattggttttagtggtaggtgtgtggggatctgttctggtcatctggatgctggtcatcggtgtgcagtattgatcaggacctgcaaacccaaaagcttatgggagctggcacgtcacaaaaagaaaaaaaccaagcccatcatcttcgtttcggacagagcaaacagcaacaaggagctgggtgtggaccaggagtcagaggagggcaaaggcaaaacaagccctgataagcaaaagcagtccccacagccacagcctggcagctctgatcaggaaagtgaggaacagcaacaattccggaacattttcaagcagatagcaggagatgacatggagatctgtgcagatgagctcaagaaggtccttaacacagtcgtgaacaaacacaaggacctgaagacacacgggttcacactggagtcctgccgtagcatgattgcgctcatggatacagatggctctggaaagctcaacctgcaggagttccaccacctctggaacaagattaaggcctggcagaaaattttcaaacactatgacacagaccagtccggcaccatcaacagctacgagatgcgaaatgcagtcaacgacgcaggattccacctcaacaaccagctctatgacatcattaccatgcggtacgcagacaaacacatgaacatcgactttgacagtttcatctgctgcttcgttaggctggagggcatgttcagagcttttcatgcatttgacaaggatggagatggtatcatcaagctcaacgttctggagtggctgcagctcaccatgtatgcctgaaccaggctggcctcatccaaagccatgcaggatcactcaggatttcagtttcaccctctatttccaaagccatttacctcaaaggacccagcagctacacccctacaggcttccaggcacctcatcagtcatgttcctcctccattttaccccctacccatccttgatcggtcatgcctagcctgaccctttagtaaagcaatgaggtaggaagaacaaacccttgtccctttgccatgtggaggaaagtgcctgcctctggtccgagccgcctcggttctgaagcgagtgctcctgcttaccttgctctaggctgtctgcagaagcacctgccggtggcactcagcacctccttgtgctagagccctccatcaccttcacgctgtcccaccatgggccaggaaccaaaccagcactgggttctactgctgtggggtaaactaactcagtggaatagggctggttactttgggctgtccaactcataagtttggctgcattttgaaaaaagctgatctaaataaaggcatgtgtatggctggt

SEQ ID NO: 312980 - DNA, 1312 bp, Homo sapiens
tgcccctctgaactgtcttctgggcagtgacagtcatggtcataatcctgaccctgagccagtgccaggtctccaagtgccttctgaatgaccacaggcgattggttttagtggtaggtgtgtggggatctgttctggtcatctggatgctggtcatcggtgtgcagtattgatcaggacctgcaaacccaaaagcttatgggagctggcacgtcacccacagcctggcagctctgatcaggaaagtgaggaacagcaacaattccggaacattttcaagcagatagcaggagatgacatggagatctgtgcagatgagctcaagaaggtccttaacacagtcgtgaacaaacacaaggacctgaagacacacgggttcacactggagtcctgccgtagcatgattgcgctcatggatacagatggctctggaaagctcaacctgcaggagttccaccacctctggaacaagattaaggcctggcagaaaattttcaaacactatgacacagaccagtccggcaccatcaacagctacgagatgcgaaatgcagtcaacgacgcaggattccacctcaacaaccagctctatgacatcattaccatgcggtacgcagacaaacacatgaacatcgactttgacagtttcatctgctgcttcgttaggctggagggcatgttcagagcttttcatgcatttgacaaggatggagatggtatcatcaagctcaacgttctggagtggctgcagctcaccatgtatgcctgaaccaggctggcctcatccaaagccatgcaggatcactcaggatttcagtttcaccctctatttccaaagccatttacctcaaaggacccagcagctacacccctacaggcttccaggcacctcatcagtcatgttcctcctccattttaccccctacccatccttgatcggtcatgcctagcctgaccctttagtaaagcaatgaggtaggaagaacaaacccttgtccctttgccatgtggaggaaagtgcctgcctctggtccgagccgcctcggttctgaagcgagtgctcctgcttaccttgctctaggctgtctgcagaagcacctgccggtggcactcagcacctccttgtgctagagccctccatcaccttcacgctgtcccaccatgggccaggaaccaaaccagcactgggttctactgctgtggggtaaactaactcagtggaatagggctggttactttgggctgtccaactcataagtttggctgcattttgaaaaaagctgatctaaataaaggcatgtgtatggctggt

SEQ ID NO: 312981 - DNA, 1426 bp, Homo sapiens
tgcccctctgaactgtcttctgggcagtgacagtcatggtcataatcctgaccctgagccagtgccaggtctccaagtgccttctgaatgaccacaggcgattggttttagtggtaggtgtgtggggatctgttctggtcatctggatgctggtcatcggtgtgcagtattgatcaggacctgcaaacccaaaagcttatgggagctggcacgtcaccccatcatcttcgtttcggacagagcaaacagcaacaaggagctgggtgtggaccaggagtcagaggagggcaaaggcaaaacaagccctgataagcaaaagcagtccccacagccacagcctggcagctctgatcaggaaagtgaggaacagcaacaattccggaacattttcaagcagatagcaggagatgacatggagatctgtgcagatgagctcaagaaggtccttaacacagtcgtgaacaaacacaaggacctgaagacacacgggttcacactggagtcctgccgtagcatgattgcgctcatggatacagatggctctggaaagctcaacctgcaggagttccaccacctctggaacaagattaaggcctggcagaaaattttcaaacactatgacacagaccagtccggcaccatcaacagctacgagatgcgaaatgcagtcaacgacgcaggattccacctcaacaaccagctctatgacatcattaccatgcggtacgcagacaaacacatgaacatcgactttgacagtttcatctgctgcttcgttaggctggagggcatgttcagagcttttcatgcatttgacaaggatggagatggtatcatcaagctcaacgttctggagtggctgcagctcaccatgtatgcctgaaccaggctggcctcatccaaagccatgcaggatcactcaggatttcagtttcaccctctatttccaaagccatttacctcaaaggacccagcagctacacccctacaggcttccaggcacctcatcagtcatgttcctcctccattttaccccctacccatccttgatcggtcatgcctagcctgaccctttagtaaagcaatgaggtaggaagaacaaacccttgtccctttgccatgtggaggaaagtgcctgcctctggtccgagccgcctcggttctgaagcgagtgctcctgcttaccttgctctaggctgtctgcagaagcacctgccggtggcactcagcacctccttgtgctagagccctccatcaccttcacgctgtcccaccatgggccaggaaccaaaccagcactgggttctactgctgtggggtaaactaactcagtggaatagggctggttactttgggctgtccaactcataagtttggctgcattttgaaaaaagctgatctaaataaaggcatgtgtatggctggt

SEQ ID NO: 312982 - DNA, 1547 bp, Homo sapiens
tgcccctctgaactgtcttctgggcagtgacagtcatggtcataatcctgaccctgagccagtgccaggtctccaagtgccttctgaatgaccacaggcgattggttttagtggtaggtgtgtggggatctgttctggtcatctggatgctggtcatcggtgtgcagtattgatcaggacctgcaaacccaaaagcttatgggagctggcacgtcacaaaaagaaaaaaaccaagcccatcatcttcgtttcggacagagcaaacagcaacaaggagctgggtgtggaccaggagtcagaggagggcaaaggcaaaacaagccctgataagcaaaagcagtccccacagccacagcctggcagctctgatcaggaaagtgaggaacagcaacaattccggaacattttcaagcagatagcaggagatgacatggagatctgtgcagatgagctcaagaaggtccttaacacagtcgtgaacaaacacaaggacctgaagacacacgggttcacactggagtcctgccgtagcatgattgcgctcatggatacagatggctctggaaagctcaacctgcaggagttccaccacctctggaacaagattaaggcctggcagaaaattttcaaacactatgacacagaccagtccggcaccatcaacagctacgagatgcgaaatgcagtcaacgacgcaggattccacctcaacaaccagctctatgacatcattaccatgcggtacgcagacaaacacatgaacatcgactttgacagtttcatctgctgcttcgttaggctggagggcatgttcagagcttttcatgcatttgacaaggatggagatggtatcatcaagctcaacgttctggagtggctgcagctcaccatgtatgcctgaaccaggctggcctcatccaaagccatgcaggatcactcaggatttcagtttcaccctctatttccaaagccatttacctcaaaggacccagcagctacacccctacaggcttccaggcacctcatcagtcatgttcctcctccattttaccccctacccatccttgatcggtcatgcctagcctgaccctttagtaaagcaatgaggtaggaagaacaaacccttgtccctttgccatgtggaggaaagtgcctgcctctggtccgagccgcctcggttctgaagcgagtgctcctgcttaccttgctctaggctgtctgcagaagcacctgccggtggcactcagcacctccttgtgctagagccctccatcaccttcacgctgtcccaccatgggccaggaaccaaaccagcactgggttctactgctgtggggctagtcggggccccgactagcccccccgactagcccgacagccgttggggagaggacggtggccccatggaccacgccccatagctcactgtgcatgccatatatacggaagcccaagaagttggccagcatcccgaccattgcggccctcaacttgtcttcggtgtcaagttttgcagcgactagcaccagctgtcctgtcgggctagt

SEQ ID NO: 312983 - DNA, 1365 bp, Homo sapiens
tgcccctctgaactgtcttctgggcagtgacagtcatggtcataatcctgaccctgagccagtgccaggtctccaagtgccttctgaatgaccacaggcgattggttttagtggtaggtgtgtggggatctgttctggtcatctggatgctggtcatcggtgtgcagtattgatcaggacctgcaaacccaaaagcttatgggagctggcacgtcacaaaaagaaaaaaaccaagcccatcatcttcgtttcggacagagcaaacagcaacaaggagctgggtgtggaccaggagtcagaggagggcaaaggcaaaacaagccctgataagcaaaagcagtccccacagccacagcctggcagctctgatcaggaaagtgaggaacagcaacaattccggaacattttcaagcagatagcaggagatgacatggagatctgtgcagatgagctcaagaaggtccttaacacagtcgtgaacaaacacaaggacctgaagacacacgggttcacactggagtcctgccgtagcatgattgcgctcatggatacagatggctctggaaagctcaacctgcaggagttccaccacctctggaacaagattaaggcctggcagaaaattttcaaacactatgacacagaccagtccggcaccatcaacagctacgagatgcgaaatgcagtcaacgacgcaggattccacctcaacaaccagctctatgacatcattaccatgcggtacgcagacaaacacatgaacatcgactttgacagtttcatctgctgcttcgttaggctggagggcatgttcagagcttttcatgcatttgacaaggatggagatggtatcatcaagctcaacgttctggagtggctgcagctcaccatgtatgcctgaaccaggctggcctcatccaaagccatgcaggatcactcaggatttcagtttcaccctctatttccaaagccatttacctcaaaggacccagcagctacacccctacaggcttccaggcacctcatcagtcatgttcctcctccattttaccccctacccatccttgatcggtcatgcctagcctgaccctttagtaaagcaatgagcgagtgctcctgcttaccttgctctaggctgtctgcagaagcacctgccggtggcactcagcacctccttgtgctagagccctccatcaccttcacgctgtcccaccatgggccaggaaccaaaccagcactgggttctactgctgtggggtaaactaactcagtggaatagggctggttactttgggctgtccaactcataagtttggctgcattttgaaaaaagctgatctaaataaaggcatgtgtatggctggt

SEQ ID NO: 312984 - DNA, 1302 bp, Homo sapiens
caacgaaagatacgagcgcgtacccgtttttatttcagtacgcgggccggcgttagctttatgttactgggcactgggtcttacaatatactacccatcatcttcgtttcggacagagcaaacagcaacaaggagctgggtgtggaccaggagtcagaggagggcaaaggcaaaacaagccctgataagcaaaagcagtccccacagccacagcctggcagctctgatcaggaaagtgaggaacagcaacaattccggaacattttcaagcagatagcaggagatgacatggagatctgtgcagatgagctcaagaaggtccttaacacagtcgtgaacaaacacaaggacctgaagacacacgggttcacactggagtcctgccgtagcatgattgcgctcatggatacagatggctctggaaagctcaacctgcaggagttccaccacctctggaacaagattaaggcctggcagaaaattttcaaacactatgacacagaccagtccggcaccatcaacagctacgagatgcgaaatgcagtcaacgacgcaggattccacctcaacaaccagctctatgacatcattaccatgcggtacgcagacaaacacatgaacatcgactttgacagtttcatctgctgcttcgttaggctggagggcatgttcagagcttttcatgcatttgacaaggatggagatggtatcatcaagctcaacgttctggagtggctgcagctcaccatgtatgcctgaaccaggctggcctcatccaaagccatgcaggatcactcaggatttcagtttcaccctctatttccaaagccatttacctcaaaggacccagcagctacacccctacaggcttccaggcacctcatcagtcatgttcctcctccattttaccccctacccatccttgatcggtcatgcctagcctgaccctttagtaaagcaatgaggtaggaagaacaaacccttgtccctttgccatgtggaggaaagtgcctgcctctggtccgagccgcctcggttctgaagcgagtgctcctgcttaccttgctctaggctgtctgcagaagcacctgccggtggcactcagcacctccttgtgctagagccctccatcaccttcacgctgtcccaccatgggccaggaaccaaaccagcactgggttctactgctgtggggtaaactaactcagtggaatagggctggttactttgggctgtccaactcataagtttggctgcattttgaaaaaagctgatctaaataaaggcatgtgtatggctggt

SEQ ID NO: 312985 - DNA, 1100 bp, Homo sapiens
tgcccctctgaactgtcttctgggcagtgacagtcatggtcataatcctgaccctgagccagtgccaggtctccaagtgccttctgaatgaccacaggcgattggttttagtggtaggtgtgtggggatctgttctggtcatctggatgctggtcatcggtgtgcagtattgatcaggacctgcaaacccaaaagcttatgggagctggcacgtcacaaaaagaaaaaaaccaagcccatcatcttcgtttcggacagagcaaacagcaacaaggagctgggtgtggaccaggagtcagaggagggcaaaggcaaaacaagccctgataagcaaaagcagtccccacagccacagcctggcagctctgatcaggaaagtgaggaacagcaacaattccggaacattttcaagcagatagcaggagatgacatggagatctgtgcagatgagctcaagaaggtccttaacacagtcgtgaacaaacacaaggacctgaagacacacgggttcacactggagtcctgccgtagcatgattgcgctcatggatacagatggctctggaaagctcaacctgcaggagttccaccacctctggaacaagattaaggcctggcagaaaattttcaaacactatgacacagaccagtccggcaccatcaacagctacgagatgcgaaatgcagtcaacgacgcaggattccacctcaacaaccagctctatgacatcattaccatgcggtacgcagacaaacacatgaacatcgactttgacagtttcatctgctgcttcgttaggctggagggcatgttcagagcttttcatgcatttgacaaggatggagatggtatcatcaagctcaacgttctggagctgcagaagcacctgccggtggcactcagcacctccttgtgctagagccctccatcaccttcacgctgtcccaccatgggccaggaaccaaaccagcactgggttctactgctgtggggtaaactaactcagtggaatagggctggttactttgggctgtccaactcataagtttggctgcattttgaaaaaagctgatctaaataaaggcatgtgtatggctggt

SEQ ID NO: 312986 - DNA, 1551 bp, Homo sapiens
tgcccctctgaactgtcttctgggcagtgacagtcatggtcataatcctgaccctgagccagtgccaggtctccaagtgccttctgaatgaccacaggcgattggttttagtggtaggtgtgtggggatctgttctggtcatctggatgctggtcatcggtgtgcagtattgatcaggacctgcaaacccaaaagcttatgggagctggcacgtcacaaaaagaaaaaaaccaagcccatcatcttcgtttcggacagagcaaacagcaacaaggagctgggtgtggaccaggagtcagaggagggcaaaggcaaaacaagccctgataagcaaaagcagtccccacagccacagcctggcagctctgatcaggaaagtgaggaacagcaacaattccggaacattttcaagcagatagcaggagatgacatggagatctgtgcagatgagctcaagaaggtccttaacacagtcgtgaacaaacacaaggacctgaagacacacgggttcacactggagtcctgccgtagcatgattgcgctcatggatacagatggctctggaaagctcaacctgcaggagttccaccacctctggaacaagattaaggcctggcagatgcgaaatgcagtcaacgacgcgattccacctcaacaaccagctctatgacatcattaccatgcggtacgcagacaaacacatgaacatcgactttgacagtttcatctgctgcttcgttaggctggagggcatgttcagagcttttcatgcatttgacaaggatggagatggtatcatcaagctcaacgttctggagtggctgcagctcaccatgtatgcctgaaccaggctggcctcatccaaagccatgcaggatcactcaggatttcagtttcaccctctatttccaaagccatttacctcaaaggacccagcagctacacccctacaggcttccaggcacctcatcagtcatgttcctcctccattttaccccctacccatccttgatcggtcatgcctagcctgaccctttagtaaagcaatgaggtaggaagaacaaacccttgtccctttgccatgtggaggaaagtgcctgcctctggtccgagccgcctcggttctgaagcgagtgctcctgcttaccttgctctaggctgtctgcagaagcacctgccggtggcactcagcacctccttgtgctagagccctccatcaccttcacgctgtcccaccatgggccaggaaccaaaccagcactgggttctactgctgtggggtaaactaactcagtggaatagggctggttactttgggctgtccaactcataagtttggctgcattttgaaaaaagctgatctaaataaaggcatgtgtatggctggtaaaaaaaaagcacaagacgcaaaacaaaccacaaacgacagaacaaagacggcacgcaacacagaacaccacaacgagcgcccacgcccacacaaaaacccccaccggagcccacgacacacgcgccccccacacacgcgaacaaggagcggcccccacagag

SEQ ID NO: 312987 - DNA, 1406 bp, Homo sapiens
gaggaacctctctgaggaagttgaaaataccatctccgtggatcggccagtgaaaaagaaaaaaaccaagcccatcatcttcgtttcggacagagcaaacagcaacaaggagctgggtgtggaccaggagtcagaggagggcaaaggcaaaacaagccctgataagcaaaagcagtccccacagccacagcctggcagctctgatcaggaaagtgaggaacagcaacaattccggaacattttcaagcagatagcaggagatgacatggagatctgtgcagatgagctcaagaaggtccttaacacagtcgtgaacaaacacaaggacctgaagacacacgggttcacactggagtcctgccgtagcatgattgcgctcatggatccctgacctccctcctccagacagatggctctggaaagctcaacctgcaggagttccaccacctctggaacaagattaaggcctggcagatgcgaaatgcagtcaacgacgcgattccacctcaacaaccagctctatgacatcattaccatgcggtacgcagacaaacacatgaacatcgactttgacagtttcatctgctgcttcgttaggctggagggcatgttcagagcttttcatgcatttgacaaggatggagatggtatcatcaagctcaacgttctggagtggctgcagctcaccatgtatgcctgaaccaggctggcctcatccaaagccatgcaggatcactcaggatttcagtttcaccctctatttccaaagccatttacctcaaaggacccagcagctacacccctacaggcttccaggcacctcatcagtcatgttcctcctccattttaccccctacccatccttgatcggtcatgcctagcctgaccctttagtaaagcaatgaggtaggaagaacaaacccttgtccctttgccatgtggaggaaagtgcctgcctctggtccgagccgcctcggttctgaagcgagtgctcctgcttaccttgctctaggctgtctgcagaagcacctgccggtggcactcagcacctccttgtgctagagccctccatcaccttcacgctgtcccaccatgggccaggaaccaaaccagcactgggttctactgctgtggggtaaactaactcagtggaatagggctggttactttgggctgtccaactcataagtttggctgcattttgaaaaaagctgatctaaataaaggcatgtgtatggctggtaaaaaaaaagcacaagacgcaaaacaaaccacaaacgacagaacaaagacggcacgcaacacagaacaccacaacgagcgcccacgcccacacaaaaacccccaccggagcccacgacacacgcgccccccacacacgcgaacaaggagcggcccccacagag

SEQ ID NO: 312988 - DNA, 1020 bp, Homo sapiens
  misc_feature (987)..(987): n is a, c, g, or t
  misc_feature (1019)..(1020): n is a, c, g, or t
tgcccctctgaactgtcttctgggcagtgacagtcatggtcataatcctgaccctgagccagtgccaggtctccaagtgccttctgaatgaccacaggcgattggttttagtggtaggtaaaaagaaaaaaaccaagcccatcatcttcgtttcggacagagcaaacagcaacaaggagctgggtgtggaccaggagtcagaggagggcaaaggcaaaacaagccctgataagcaaaagcagtccccacagccacagcctggcagctctgatcaggaaagtgaggaacagcaacaattccggaacattttcaagcagatagcaggagatgacatggagatctgtgcagatgagctcaagaaggtccttaacacagtcgtgaacaaacacaaggacctgaagacacacgggttcacactggagtcctgccgtagcatgattgcgctcatggatacagatggctctggaaagctcaacctgcaggagttccaccacctctggaacaagattaaggcctggcagaaaattttcaaacactatgacacagaccagtccggcaccatcaacagctacgagatgcgaaatgcagtcaacgacgcaggattccacctcaacaaccagctctatgacatcattaccatgcggtacgcagacaaacacatgaacatcgactttgacagtttcatctgctgcttcgttaggctggagggcatgttcagagctttcatgcctttgacacgatgggatggtatcatcagctcaacgttctggaagtggtgcagctcacatgtgtggcctgaccggtgggtcattcaagcatggggagcctccgattcgttcccccttttccagctttctccaggcccgttaccctaggccgggccttggggtgcccattagccccactttggggcagcgctttaaagggggggaaccccttcggagagagcggcgcccaggggtttctggaggcgcctgacctctcccngtggggtgtgttttggtgttctagacattctnn

SEQ ID NO: 312989 - DNA, 1102 bp, Homo sapiens
tgcccctctgaactgtcttctgggcagtgacagtcatggtcataatcctgaccctgagccagtgccaggtctccaagtgccttctgaatgaccacaggcgattggttttagtggtaggtgtgtggggatctgttctggtcatctggatgctggtcatcggtgtgcagtattgatcaggacctgcaaacccaaaagcttatgggagctggcacgtcactgagtagagcaggcaggtgcaggggttttgatgtccctgcactgacacagttgtctgcagttctcaattgacatttcgctccagtgtcgagggtcaacaggaatgttggggcgtggggcaatctggaagacacagggagcagggcccttggctcagctgatagttgccgcagggattacaggcccaggcagcctgccacagctggggcttttaccaaagaaaatctccctatgttaaatgcttgctcaaaaatttttaaaaaatattctgtaagtcaaaatccattgttaggtcagtttgagagagccatgtttttggtgttttagtaaccaatttcatttttttattatttatttatttgtttatttttgagacggagtttcactcttgtcacccaggctggagtgcaatggcatgatctcagctcactgcaacctccgcctcccgggttcaagcaattctcctgcctcagcctcctgagtagctgagattacaggtgcccaccatcacgcctggataatttttgtattttttagtcgagatggggtttcaccatgttggccaggatagtcctgaactactgacctcagataatccgcccacctcagcctcccaaagtgctgggattacaggcatgagccagcacgcccggccaccaatttcattttttaaaaaaggaagaaagaaaaccttagccagaagatctttttccttgccatatgcagtaagagtagattataaaaacaaagtcagagcagtcactggtgtctgggcatggaggagaaagaagaattctcttctcccttcaccctccatgcccctttttggctccatgtgattcagatttctggaccctggagccccaccccaagctaaagaccagga

SEQ ID NO: 312990 - DNA, 742 bp, Homo sapiens
tagtcatagtcgagctggtgtgattcggtcgggccctagccataagcttatggtgagctggccgtcgccccatcatcttcgtttcggacagagcaaacagcaacaaggagctgggtgtggaccaggagtcagaggagggcaaaggcaaaacaagccctgataagcaaaagcagtccccacagccacagcctggcagctctgatcaggaaagtgaggaacagcaacaattccggaacattttcaagcagatagcaggagatgacatggagatctgtgcagatgagctcaagaaggtccttaacacagtcgtgaacaaacacaaggacctgaagacacacgggttcacactggagtcctgccgtagcatgattgcgctcatggatacagatggctctggaaagctcaacctgcaggagttccaccacctctggaacaagattaaggcctggcagaaaattttcaaacactatgacacagaccagtccggcaccatcaacagctacgagatgcgaaatgcagtcaacgacgcagattccacctcaaaacagtctatgacatcattaccatgcggtaagctggagggcatgttcagagcgtttcatgcgtttgaccaggctggcgatggtttcatcaaagctcaccgtctggaggcggttggaaaccccgtccggtggctccgacctcttggtgtaaagcttcataactttcgcggcccacgggcggacccccacgggttctgcgg

SEQ ID NO: 312991 - DNA, 1607 bp, Homo sapiens
tgcccctctgaactgtcttctgggcagtgacagtcatggtcataatcctgaccctgagccagtgccaggtctccaagtgccttctgaatgaccacaggcgattggttttagtggtaggtgtgtggggatctgttctggtcatctggatgctggtcatcggtgtgcagtattgatcaggacctgcaaacccaaaagcttatgggagctggcacgtcacaaaaagaaaaaaaccaagcccatcatcttcgtttcggacagagcaaacagcaacaaggagctgggtgtggaccaggagtcagaggagggcaaaggcaaaacaagccctgataagcaaaagcagtccccacagccacagcctggcagctctgatcaggaaagtgaggaacagcaacaattccggaacattttcaagcagatagcaggagatgacatggagatctgtgcagatgagctcaagaaggtccttaacacagtcgtgaacaaacacaaggacctgaagacacacgggttcacactggagtcctgccgtagcatgattgcgctcatggatacagatggctctggaaagctcaacctgcaggagttccaccacctctggaacaagattaaggcctggcagaaaattttcaaacactatgacacagaccagtccggcaccatcaacagctacgagatgcgaaatgcagtcaacgacgcaggattccacctcaacaaccagctctatgacatcattaccatgcggtacgcagacaaacacatgaacatcgactttgacagtttcatctgctgcttcgttaggctggagggcatgttcagagcttttcatgcatttgacaaggatggagatggtatcatcaagctcaacgttctggagtggctgcagctcaccatgtatgcctgaaccaggctggcctcatccaaagccatgcaggatcactcaggatttcagtttcaccctctatttccaaagccatttacctcaaaggacccagcagctacacccctacaggcttccaggcacctcatcagtcatgttcctcctccattttaccccctacccatccttgatcggtcatgcctagcctgaccctttagtaaagcaatgaggtaggaagaacaaacccttgtccctttgccatgtggaggaaagtgcctgcctctggtccgagccgcctcggttctgaagcgagtgctcctgcttaccttgctctaggctgtctgcagaagcacctgccggtggcactcagcacctccttgtgctagagccctccatcaccttcacgctgtcccaccatgggccaggaaccaaaccagcactgggttctactgctgtggggtaaactaactcagtggaatagggctggttactttgggctgtccaactcataagtttggctgcattttgaaaaaagctgatctaaataaaggcatgtgtatggctggtaaaaaaaaagcacaagacgcaaaacaaaccacaaacgacagaacaaagacggcacgcaacacagaacaccacaacgagcgcccacgcccacacaaaaacccccaccggagcccacgacacacgcgccccccacacacgcgaacaaggagcggcccccacagag

SEQ ID NO: 312992 - DNA, 1426 bp, Homo sapiens
  misc_feature (18)..(18): n is a, c, g, or t
tatttcagtcaccgggantgggcgttaactgtagattagatggaccgtcgtccgtacagactcttctgaatgaccacaggcgattggttttagtggtaggtgtgtggggatctgttctggtcatctggatgctggtcatcggtgtgcagtattgatcaggacctgcaaacccaaaagcttatgggagctggcacgtcacaaaaagaaaaaaaccaagcccatcatcttcgtttcggacagagcaaacagcaacaaggagctgggtgtggaccaggagtcagaggagggcaaaggcaaaacaagccctgataagcaaaagcagtccccacagccacagcctggcagctctgatcaggaaagtgaggaacagcaacaattccggaacattttcaagcagatagcaggagatgacatggagatctgtgcagatgagctcaagaaggtccttaacacagtcgtgaacaaacacaaggacctgaagacacacgggttcacactggagtcctgccgtagcatgattgcgctcatggatacagatggctctggaaagctcaacctgcaggagttccaccacctctggaacaagattaaggcctggcagaaaattttcaaacactatgacacagaccagtccggcaccatcaacagctacgagatgcgaaatgcagtcaacgacgcaggattccacctcaacaaccagctctatgacatcattaccatgcggtacgcagacaaacacatgaacatcgactttgacagtttcatctgctgcttcgttaggctggagggcatgttcagagcttttcatgcatttgacaaggatggagatggtatcatcaagctcaacgttctggagtggctgcagctcaccatgtatgcctgaaccaggctggcctcatccaaagccatgcaggatcactcaggatttcagtttcaccctctatttccaaagccatttacctcaaaggacccagcagctacacccctacaggcttccaggcacctcatcagtcatgttcctcctccattttaccccctacccatccttgatcggtcatgcctagcctgaccctttagtaaagcaatgaggtaggaagaacaaacccttgtccctttgccatgtggaggaaagtgcctgcctctggtccgagccgcctcggttctgaagcgagtgctcctgcttaccttgctctaggctgtctgcagaagcacctgccggtggcactcagcacctccttgtgctagagccctccatcaccttcacgctgtcccaccatgggccaggaaccaaaccagcactgggttctactgctgtggggtaaactaactcagtggaatagggctggttactttgggctgtccaactcataagtttggctgcattttgaaaaaagctgatctaaataaaggcatgtgtatggctggt

SEQ ID NO: 312993 - DNA, 1333 bp, Homo sapiens
tgcccctctgaactgtcttctgggcagtgacagtcatggtcataatcctgaccctgagccagtgccaggtctccaagtgccttctgaatgaccacaggcgattggttttagtggtaggtgtgtggggatctgttctggtcatctggatgctggtcatcggtgtgcagtattgatcaggacctgcaaacccaaaagcttatgggagctggcacgtcacaaaaagaaaaaaaccaagcccatcatcttcgtttcggacagagcaaacagcaacaaggagctgggtgtggaccaggagtcagaggagggcaaaggcaaaacaagccctgataagcaaaagcagtccccacagccacagcctggcagctctgatcaggaaagtgaggaacagcaacaattccggaacattttcaagcagatagcaggagatgacatggagatctgtgcagatgagctcaagaaggtccttaacacagtcgtgaacaaacacaaggacctgaagacacacgggttcacactggagtcctgccgtagcatgattgcgctcatggatacagatggctctggaaagctcaacctgcaggagttccaccacctctggaacaagattaaggcctggcagaaaattttcaaacactatgacacagaccagtccggcaccatcaacagctacgagatgcgaaatgcagtcaacgacgcaggattccacctcaacaaccagctctatgacatcattaccatgcggtacgcagacaaacacatgaacatcgactttgacagtttcatctgctgcttcgttaggctggagggcatgttcagagcttttcatgcatttgacaaggatggagatggtatcatcaagctcaacgttctggagtggctgcagctcaccatgtatgcctgaaccaggctggcctcatccaaagccatgcaggatcactcaggatttcagtttcaccctctatttccaaagccatttacctcaaaggacccagcagctacacccctacaggcttccaggcacctcatcagtcatgttcctcctccattttaccccctacccatccttgatcggtcatgcctagcctgaccctttagtaaagcaatgagctgcagaagcacctgccggtggcactcagcacctccttgtgctagagccctccatcaccttcacgctgtcccaccatgggccaggaaccaaaccagcactgggttctactgctgtggggtaaactaactcagtggaatagggctggttactttgggctgtccaactcataagtttggctgcattttgaaaaaagctgatctaaataaaggcatgtgtatggctggt

SEQ ID NO: 312994 - DNA, 1312 bp, Homo sapiens
  misc_feature (18)..(18): n is a, c, g, or t
tatttcagtcaccgggantgggcgttaactgtagattagatggaccgtcgtccgtacagactcttctgaatgaccacaggcgattggttttagtggtaggtgtgtggggatctgttctggtcatctggatgctggtcatcggtgtgcagtattgatcaggacctgcaaacccaaaagcttatgggagctggcacgtcacaaaaagaaaaaaaccaagccacagcctggcagctctgatcaggaaagtgaggaacagcaacaattccggaacattttcaagcagatagcaggagatgacatggagatctgtgcagatgagctcaagaaggtccttaacacagtcgtgaacaaacacaaggacctgaagacacacgggttcacactggagtcctgccgtagcatgattgcgctcatggatacagatggctctggaaagctcaacctgcaggagttccaccacctctggaacaagattaaggcctggcagaaaattttcaaacactatgacacagaccagtccggcaccatcaacagctacgagatgcgaaatgcagtcaacgacgcaggattccacctcaacaaccagctctatgacatcattaccatgcggtacgcagacaaacacatgaacatcgactttgacagtttcatctgctgcttcgttaggctggagggcatgttcagagcttttcatgcatttgacaaggatggagatggtatcatcaagctcaacgttctggagtggctgcagctcaccatgtatgcctgaaccaggctggcctcatccaaagccatgcaggatcactcaggatttcagtttcaccctctatttccaaagccatttacctcaaaggacccagcagctacacccctacaggcttccaggcacctcatcagtcatgttcctcctccattttaccccctacccatccttgatcggtcatgcctagcctgaccctttagtaaagcaatgaggtaggaagaacaaacccttgtccctttgccatgtggaggaaagtgcctgcctctggtccgagccgcctcggttctgaagcgagtgctcctgcttaccttgctctaggctgtctgcagaagcacctgccggtggcactcagcacctccttgtgctagagccctccatcaccttcacgctgtcccaccatgggccaggaaccaaaccagcactgggttctactgctgtggggtaaactaactcagtggaatagggctggttactttgggctgtccaactcataagtttggctgcattttgaaaaaagctgatctaaataaaggcatgtgtatggctggt

SEQ ID NO: 312995 - DNA, 1279 bp, Homo sapiens
gaggaacctctctgaggaagttgaaaataccatctccgtggatcggccagtgaaaaagaaaaaaaccaagcccatcatcttcgtttcggacagagcaaacagcaacaaggagctgggtgtggaccaggagtcagaggagggcaaaggcaaaacaagccctgataagcaaaagcagtccccacagccacagcctggcagctctgatcaggaaagtgaggaacagcaacaattccggaacattttcaagcagatagcaggagatgacatggagatctgtgcagatgagctcaagaaggtccttaacacagtcgtgaacaaacacaaggacctgaagacacacgggttcacactggagtcctgccgtagcatgattgcgctcatggatacagatggctctggaaagctcaacctgcaggagttccaccacctctggaacaagattaaggcctggcagaaaattttcaaacactatgacacagaccagtccggcaccatcaacagctacgagatgcgaaatgcagtcaacgacgcaggattccacctcaacaaccagctctatgacatcattaccatgcggtacgcagacaaacacatgaacatcgactttgacagtttcatctgctgcttcgttaggctggagggcatgttcagagcttttcatgcatttgacaaggatggagatggtatcatcaagctcaacgttctggagtggctgcagctcaccatgtatgcctgaaccaggctggcctcatccaaagccatgcaggatcactcaggatttcagtttcaccctctatttccaaagccatttacctcaaaggacccagcagctacacccctacaggcttccaggcacctcatcagtcatgttcctcctccattttaccccctacccatccttgatcggtcatgcctagcctgaccctttagtaaagcaatgaggtaggaagaacaaacccttgtccctttgccatgtggaggaaagtgcctgcctctggtccgagccgcctcggttctgaagcgagtgctcctgcttaccttgctctaggctgtctgcagaagcacctgccggtggcactcagcacctccttgtgctagagccctccatcaccttcacgctgtcccaccatgggccaggaaccaaaccagcactgggttctactgctgtggggtaaactaactcagtggaatagggctggttactttgggctgtccaactcataagtttggctgcattttgaaaaaagctgatctaaataaaggcatgtgtatggctggt

SEQ ID NO: 312996 - DNA, 1521 bp, Homo sapiens
  misc_feature (18)..(18): n is a, c, g, or t
tatttcagtcaccgggantgggcgttaactgtagattagatggaccgtcgtccgtacagactcttctgaatgaccacaggcgattggttttagtggtaggtgtgtggggatctgttctggtcatctggatgctggtcatcggtgtgcagtattgatcaggacctgcaaacccaaaagcttatgggagctggcacgtcaccccatcatcttcgtttcggacagagcaaacagcaacaaggagctgggtgtggaccaggagtcagaggagggcaaaggcaaaacaagccctgataagcaaaagcagtccccacaggtgtctgggcatgtggcatgggtggggtggccagcacgctacaggggcttcctatgcgcttgggatacacaggggctggaggcttcccaggagtttgtcttgaacatctggagccacagcctggcagctctgatcaggaaagtgaggaacagcaacaattccggaacattttcaagcagatagcaggagatgacatggagatctgtgcagatgagctcaagaaggtccttaacacagtcgtgaacaaacacaaggacctgaagacacacgggttcacactggagtcctgccgtagcatgattgcgctcatggatacagatggctctggaaagctcaacctgcaggagttccaccacctctggaacaagattaaggcctggcagaaaattttcaaacactatgacacagaccagtccggcaccatcaacagctacgagatgcgaaatgcagtcaacgacgcaggattccacctcaacaaccagctctatgacatcattaccatgcggtacgcagacaaacacatgaacatcgactttgacagtttcatctgctgcttcgttaggctggagggcatgttcagagcttttcatgcatttgacaaggatggagatggtatcatcaagctcaacgttctggagtggctgcagctcaccatgtatgcctgaaccaggctggcctcatccaaagccatgcaggatcactcaggatttcagtttcaccctctatttccaaagccatttacctcaaaggacccagcagctacacccctacaggcttccaggcacctcatcagtcatgttcctcctccattttaccccctacccatccttgatcggtcatgcctagcctgaccctttagtaaagcaatgaggtaggaagaacaaacccttgtccctttgccatgtggaggaaagtgcctgcctctggtccgagccgcctcggttctgaagcgagtgctcctgcttaccttgctctaggctgtctgcagaagcacctgccggtggcactcagcacctccttgtgctagagccctccatcaccttcacgctgtcccaccatgggccaggaaccaaaccagcactgggttctactgctgtggggtaaactaactcagtggaatagggctggttactttgggctgtccaactcataagtttggctgcattttgaaaaaagctgatctaaataaaggcatgtgtatggctggt

SEQ ID NO: 312997 - DNA, 1226 bp, Homo sapiens
ggctgcaggattcggcacgagagtccacagcctggcagctctgatcaggaaagtgaggaacagcaacaattccggaacattttcaagcagatagcaggagatgacatggagatctgtgcagatgagctcaagaaggtccttaacacagtcgtgaacaaacacaaggacctgaagacacacgggttcacactggagtcctgccgtagcatgattgcgctcatggatacagatggctctggaaagctcaacctgcaggagttccaccacctctggaacaagattaaggcctggcagatgcgaaatgcagtcaacgacgcgattccacctcaacaaccagctctatgacatcattaccatgcggtacgcagacaaacacatgaacatcgactttgacagtttcatctgctgcttcgttaggctggagggcatgttcagagcttttcatgcatttgacaaggatggagatggtatcatcaagctcaacgttctggagtggctgcagctcaccatgtatgcctgaaccaggctggcctcatccaaagccatgcaggatcactcaggatttcagtttcaccctctatttccaaagccatttacctcaaaggacccagcagctacacccctacaggcttccaggcacctcatcagtcatgttcctcctccattttaccccctacccatccttgatcggtcatgcctagcctgaccctttagtaaagcaatgaggtaggaagaacaaacccttgtccctttgccatgtggaggaaagtgcctgcctctggtccgagccgcctcggttctgaagcgagtgctcctgcttaccttgctctaggctgtctgcagaagcacctgccggtggcactcagcacctccttgtgctagagccctccatcaccttcacgctgtcccaccatgggccaggaaccaaaccagcactgggttctactgctgtggggtaaactaactcagtggaatagggctggttactttgggctgtccaactcataagtttggctgcattttgaaaaaagctgatctaaataaaggcatgtgtatggctggtaaaaaaaaagcacaagacgcaaaacaaaccacaaacgacagaacaaagacggcacgcaacacagaacaccacaacgagcgcccacgcccacacaaaaacccccaccggagcccacgacacacgcgccccccacacacgcgaacaaggagcggcccccacagag

SEQ ID NO: 312998 - DNA, 891 bp, Homo sapiens
tgcccctctgaactgtcttctgggcagtgacagtcatggtcataatcctgaccctgagccagtgccaggtctccaagtgccttctgaatgaccacaggcgattggttttagtggtaggtgtgtggggatctgttctggtcatctggatgctggtcatcggtgtgcagtattgatcaggacctgcaaacccaaaagcttatgggagctggcacgtcaccccatcatcttcgtttcggacagagcaaacagcaacaaggagctgggtgtggaccaggagtcagaggagggcaaaggcaaaacaagccctgataagcaaaagcagtccccacagccacagcctggcagctctgatcaggaaagtgaggaacagcaacaattccggaacattttcaagcagatagcaggagatgacatggagatctgtgcagatgagctcaagaaggtccttaacacagtcgtgaacaaacacaaggacctgaagacacacgggttcacactggagtcctgccgtagcatgattgcgctcatggatacagatggctctggaaagctcaacctgcaggagttccaccacctctggaacaagattaaggcctggcagaaaattttcaaacactatgacacagaccagtccggcaccatcaacagctacgagatgcgaaatgcagtcaacgacgcagattccacctcaaaacagtctatgacatcattaccatgcggtaagctggagggcatgttcagagcgtttcatgcgtttgaccaggctggcgatggtttcatcaaagctcaccgtctggaggcggttggaaaccccgtccggtggctccgacctcttggtgtaaagcttcataactttcgcggcccacgggcggacccccacgggttctgcgg

SEQ ID NO: 312999 - DNA, 6585 bp, Homo sapiens
gaggcgctccgggatactgagggcggagggcggtggcagcgctggcgctggggaccggcttggtggcttcgggaaacagtttggcgccggcggccgtccgtgttactccgcatcccgccccgtctcggcacggctagcagccccctggccaccagcgtccagcaatgtgtctcaccggccgggcgtagcagctgcgcgtgcgcggaaccgcggggccatgagcgaagccggcggccggggctgtgggtccccggttccccagcgagcgcgatggagactagtggcggcgacggccgcgttctgcctggtgtcggccacctccgtgtggacggcgggggccgagcccatgagtagggaggagaaacagaagcttgggaatcaagtactggaaatgtttgatcatgcttatggtaactatatggaacatgcttaccctgctgatgaactcatgcctttaacctgtagaggtcgagttagaggccaagagccaagtcgcggtgacgttgatgatgccttgggaaaattttctctgacactgattgattctttggacactcttgttttaaataaaactaaagaatttgaagatgcagtgagaaaagttttaagagatgttaatttagataacgatgtagtcgtatcagtctttgaaacaaacatcagagttcttgggggtcttttgggtgggcactccctggcaatcatgctgaaagaaaaaggtgaatatatgcagtggtacaatgatgaacttctccaaatggcaaagcagttaggttacaaacttttaccggctttcaacactaccagtggccttccttatccaagaattaatttaaagtttggcatcagaaaaccagaagctcggacaggaactgagacagatacctgtacagcttgtgcaggtaccttgatccttgaatttgctgctttaagtcgattcacaggagcaacaatatttgaggaatatgccagaaaagctcttgattttctctgggaaaaaagacagcgaagtagtaatttagtgggcgtgactataaatattcatactggagattgggtacgaaaagatagtggagttggagcagggattgattcatattatgaatatctgttgaaagcctatgtcttgcttggagatgacagttttctggaaagatttaacacacactatgatgccataatgaggtatattagccagccacctcttctacttgatgtgcatatccacaaaccaatgctgaatgctcggacttggatggatgctttgcttgccttcttcccaggcttgcaggtgttaaagggggatattagacctgctattgaaactcatgaaatgttatatcaggtgattaaaaaacacaattttctaccagaggcatttaccacagatttcagagtacactgggctcaacatcctttaaggccagaatttgcagaaagtacctacttcttatataaagctacaggagatccttactaccttgaagtagggaagacacttattgaaaatttaaataaatatgctagagtgccttgcggatttgctgccatgaaggatgttcgtactggaagtcatgaggacagaatggattctttcttcttggctgaaatgtttaaatatctttacctgttatttgctgataaagaagacattatttttgacatagaagattacatctttacaacagaagctcatctgttacctctttggctctctactacaaatcaaagcatctctaaaaagaacacaacctcggaatatacagaactggatgacagtaacttcgattggacttgtccaaatactcagatcctctttcctaatgacccattgtatgctcaaagtattcgtgagcccttgaaaaatgtggtggataagagctgtcctagaggcatcatcagagtagaggagagtttcaggagtggagctaaaccccctctgagagccagagatttcatggccactaaccctgagcatttagaaatcctgaagaagatgggggtgagtttgattcacctcaaagatgggagagtccagttggtccaacatgcaatccaagctgctagttcaatcgacgctgaagatgggttgaggttcatgcaggagatgattgaattgtcaagtcagcaacaaaaagaacagcagctgcctccacgagctgtacaaattgtttcccacccattttttggcagggtagtattgactgctggaccagctcagtttgggctggatctgtctaaacataaagagacaagaggatttgttgcaagcagtaaaccatccaatggttgttcagagcttactaacccagaggcagtgatgggaaaaatcgcactgatacaaagaggacagtgcatgtttgcagaaaaggcacgcaacatccagaatgctggagccattggtggcattgttattgatgacaatgaggggagcagcagtgatactgcccctctgttccagatggcaggtgatggaaaggatacagatgacatcaagatccccatgctgttcttattcagcaaagaaggaagtatcatactggatgccatccgggaatatgaggaggtagaagtgctcctctctgataaagcaaaagatcgagatcctgaaatggaaaatgaagaacaaccatcctctgaaaatgattctcagaatcagagtggtgaacagatttcatcaagttctcaggaggttgatttggttgatcaagagtcttctgaggaaaattctctaaattctcacccagaatcattatctctagcagatatggacaatgctgcaagcatttccccttctgaacagacttctaatcccacagaaaaccatgagactacaaatcttaatggtgaatgtacagatttagataaccagcttcaagaacaatcagaaactgaggaagattccaatcctaatgttagctggggtaaaaaggtccagcctatagactccatattagcagactggaatgaagatatagaagcatttgaaatgatggagaaggatgagctatgacttgctaaacaatctgttggtaggtatttaaaaagaaaaggtaaactgtgtgtggttaatagacatcctaatactaagcaggctttctaatgggaggctttaagtatggtgatgaacaaccacgttctgactggcgtagttatcgtaggaatctggagcatgctgtgttagaattgaccttgtttaaaactgtcccatcaaaaatggaaatccacagttcccccttcaaatgcagcactgcaccaccctgcaacacctcaggccagggaaagattactgagcattcctgcgaaccagatttctgttgtctctggatagacaagaaacaaaattcatttagtagtggagtggggaataggagtttggatagccttctaattaaaggaagctcgcctttcttggttttgggggttagaggctcttttgggaagatgcatccgagtattgtggcattctgattatgctgccttcacaaaacactctaagtgacctaagtggttatgaagcaaatgcatttatggtgaaaacagtctttgctcattgctttctcttgtttcatttagtgacaaatgatcaagatgacttgattttttttccttcttaacaatgtcttttttatttaaaccaaaggtgaagccagtgtactttctcagtgagttctctgcataaagactaatcagtgggaccaggtaaaaaggtcatataatacattgtggagattgcttacttaatacttctgaaaaatggagtaagggagaaactgtaatgttgcaatatgaacctcccattgggccttccatagggaaagctgtgactactctgaaatggaacctagcattatatccttgtagggtagattataaatcatttccagttcatttctcttagaggtgattacctctagccatcagccttactccatcccatgtttggtatgcaatttgagccacaaggctcgtatcgccaacagctatatacattttgttccatttttctgtcttacagagccatgataaaactgtggttagtgagttaaaattcctggagtaactactgtttttctcctttgaaacttaggtttctaaagttgcacctaaggaatctgtcacattttctgttgaatcatggtttttgtttttgtttttaacagatattccttctgatacggacttgaaaattagtgtatggtgacctgtgtttaaaaaaaaaagtacaatacaactacatatagctatatagcttaatgagacttccaccccccccctttttttttttggtttgttgttgttgtagtagtctggtgctggccacatttaagtcttaaaaatttttaaattttgttgttgatgtttgtagacagccctgttgttgaaatcatggctttattcattttatttattttttaaacttgcctgaatttgttctaaaggaatatttaagagacataattttcttctctttaccataacattacacaaaactttttcctaaaacacggttgtgaggtactgatgaggtgtaagtggagctgttaaaaacagcagtgctgtattgcagttatgtatattcgtgtacagtatgtttagatcccaggtaaacatattcttttctgagaggataaatacctgcattcagatattccaggtaaatataattgagtcagggagtagtaaatctgatggagaattcactttggggaggggaaaaagaatagtatgcaagacccttattggcttttaattatacctgaaaccaaaatggatatttttagtctctctgcatgtgagatttggtgtaacaagatagaactataatatatacagtatatggaaggatagatatagtgctttgttcattttaattgcaaagctgccaaaatagttgaagcttaattacttgacttgccttgatttataggactggggcttggagaaaatgagcagatgttcctctaagacatcgattacagaagccttatatacatggatttgattttgtatttgtagctgaaagtcactgttgtctaaaactaacttttctaagttatcaaaacaacctaatttcttttccaacaaggagaacttaatggcatgaaggattgtgtgacacattggaaaagccagcttactgccactctcttcctttggccattagagggaggtgttgcctttcattgacgcttagaagcaaattgttcacttgttaagaaaagtaaatccttaaaaaaagaaaaggaaaaaatttaaccaatttttcttaatacccagaaggaattatactcaatatttccctagttaagaaaagaggagataatgttcgtctaaaaaactccaacgttgtaattacaactctacattcatttacttacttgacatactgccacaaagtagtttttgagttcattaaaaattccaaaggcattagttgtttttttttttttttagtgttttgttttttagttaacttttatagacattttagtaacttgctaaagattcaggggattctatgaaaccccgaatttagaaacatctggtctacctcagttaaatgttgactgcttagaaatatagctgaagtgatcaccacagccataaaattgtttaagaaagatttatataatgtttacaaatctggaatcaaggattttagctgaaatcctttaagagatattagagcaagtatttaattcaggtattttcaagttttaaaacttaacctgtttacctactaaaaataaaatagctagtttttttctgcatataaaagttcattgaaatgatatgcccttatttgcaatacttttcccataaagttttaagtgtgaaagaattgtaatttactagatatgtttggtatgggatattttgttaggcaagttttcttttttcttcttaaattgcaataggcttccaaaaagagtataattgtttcagaacaaattaactcttggcattatacgtctccctttttctttacagtattagtaaaaagaaaaattgtacactttctgattttaacttcactaatgtaattactctctcaagaagcttttaaaatttaaattaccatcacacaaccttttttatagtaaagccaacatttgttctctcaccaaaccccatgccaaattcatcatgaagaaagctcagcataagtaattcaaatactgcttataattttagaggggggtagaatttagtaaatattccagccggtcgttttatgcacaaggcttcagtcagaacatagaaaaaaaaaacattctgtgaatgaaatattgtatgttcagattttataaaagacatttttaaaagcccaatttacagccgtatattttcttatgatgtaatttatgaaaaagatgtctgtactaacaggtgctgtaacactactgttgttggattttattgtttggtgataaatgtatacaatatttctaagggaaactatgtactgtgatgtaaaagtctgggcaaaatgtatataatcctgtatataattatgtatttgattataattactgattgtaaagatttaataaaatatgtaaatattccagtttagtttta

SEQ ID NO: 313000 - DNA, 742 bp, Homo sapiens
gaggcgctccgggatactgagggcggagggcggtggcagcgctggcgctggggaccggcttggtggcttcgggaaacagtttggcgccggcggccgtccgtgttactccgcatcccgccccgtctcggcacggctagcagccccctggccaccagcgtccagcaatgtgtctcaccggccgggcgtagcagctgcgcgtgcgcggaaccgcggggccatgagcgaagccggcggccggggctgtgggtccccggttccccagcgagcgcgatggagactagtggcggcgacggccgcgttctgcctggtgtcggccacctccgtgtggacggcgggggccgagcccatgagtagggaggagaaacagaagcttgggaacatgcttaccctgctgatgaactcatgcctttaacctgtagaggtcgagttagaggccaagagccaagtcgcggtgacgttgatgatgccttgggaaaattttctctgacactgattgattctttggacactcttgttttaaataaaactaaagaatttgaagatgcagtgagaaaagttttaagagatgttaatttagataacgatgtagtcgtatcagtctttgaaacaaacatcagagttcttggggggtctttgggtgggacatccctgggaatcaatggtgaaaggaaaaagggggaattttttgcacaggggtaccaaaggatgaacttcttccaatgggcaaaggagtagggtacaa

SEQ ID NO: 313001 - DNA, 3247 bp, Homo sapiens
gaggcgctccgggatactgagggcggagggcggtggcagcgctggcgctggggaccggcttggtggcttcgggaaacagtttggcgccggcggccgtccgtgttactccgcatcccgccccgtctcggcacggctagcagccccctggccaccagcgtccagcaatgtgtctcaccggccgggcgtagcagctgcgcgtgcgcggaaccgcggggccatgagcgaagccggcggccggggctgtgggtccccggttccccagcgagcgcgatggagactagtggcggcgacggccgcgttctgcctggtgtcggccacctccgtgtggacggcgggggccgagcccatgagtagggaggagaaacagaagcttgggaatcaagtactggaaatgtttgatcatgcttatggtaactatatggaacatgcttaccctgctgatgaactcatgcctttaacctgtagaggtcgagttagaggccaagagccaagtcgcggtgacgttgatgatgccttgggaaaattttctctgacactgattgattctttggacactcttttagaggtgattacctctagccatcagccttactccatcccatgtttggtatgcaatttgagccacaaggctcgtatcgccaacagctatatacattttgttccatttttctgtcttacagagccatgataaaactgtggttagtgagttaaaattcctggagtaactactgtttttctcctttgaaacttaggtttctaaagttgcacctaaggaatctgtcacattttctgttgaatcatggtttttgtttttgtttttaacagatattccttctgatacggacttgaaaattagtgtatggtgacctgtgtttaaaaaaaaaagtacaatacaactacatatagctatatagcttaatgagacttccaccccccccctttttttttttggtttgttgttgttgtagtagtctggtgctggccacatttaagtcttaaaaatttttaaattttgttgttgatgtttgtagacagccctgttgttgaaatcatggctttattcattttatttattttttaaacttgcctgaatttgttctaaaggaatatttaagagacataattttcttctctttaccataacattacacaaaactttttcctaaaacacggttgtgaggtactgatgaggtgtaagtggagctgttaaaaacagcagtgctgtattgcagttatgtatattcgtgtacagtatgtttagatcccaggtaaacatattcttttctgagaggataaatacctgcattcagatattccaggtaaatataattgagtcagggagtagtaaatctgatggagaattcactttggggaggggaaaaagaatagtatgcaagacccttattggcttttaattatacctgaaaccaaaatggatatttttagtctctctgcatgtgagatttggtgtaacaagatagaactataatatatacagtatatggaaggatagatatagtgctttgttcattttaattgcaaagctgccaaaatagttgaagcttaattacttgacttgccttgatttataggactggggcttggagaaaatgagcagatgttcctctaagacatcgattacagaagccttatatacatggatttgattttgtatttgtagctgaaagtcactgttgtctaaaactaacttttctaagttatcaaaacaacctaatttcttttccaacaaggagaacttaatggcatgaaggattgtgtgacacattggaaaagccagcttactgccactctcttcctttggccattagagggaggtgttgcctttcattgacgcttagaagcaaattgttcacttgttaagaaaagtaaatccttaaaaaaagaaaaggaaaaaatttaaccaatttttcttaatacccagaaggaattatactcaatatttccctagttaagaaaagaggagataatgttcgtctaaaaaactccaacgttgtaattacaactctacattcatttacttacttgacatactgccacaaagtagtttttgagttcattaaaaattccaaaggcattagttgtttttttttttttttagtgttttgttttttagttaacttttatagacattttagtaacttgctaaagattcaggggattctatgaaaccccgaatttagaaacatctggtctacctcagttaaatgttgactgcttagaaatatagctgaagtgatcaccacagccataaaattgtttaagaaagatttatataatgtttacaaatctggaatcaaggattttagctgaaatcctttaagagatattagagcaagtatttaattcaggtattttcaagttttaaaacttaacctgtttacctactaaaaataaaatagctagtttttttctgcatataaaagttcattgaaatgatatgcccttatttgcaatacttttcccataaagttttaagtgtgaaagaattgtaatttactagatatgtttggtatgggatattttgttaggcaagttttcttttttcttcttaaattgcaataggcttccaaaaagagtataattgtttcagaacaaattaactcttggcattatacgtctccctttttctttacagtattagtaaaaagaaaaattgtacactttctgattttaacttcactaatgtaattactctctcaagaagcttttaaaatttaaattaccatcacacaaccttttttatagtaaagccaacatttgttctctcaccaaaccccatgccaaattcatcatgaagaaagctcagcataagtaattcaaatactgcttataattttagaggggggtagaatttagtaaatattccagccggtcgttttatgcacaaggcttcagtcagaacatagaaaaaaaaaacattctgtgaatgaaatattgtatgttcagattttataaaagacatttttaaaagcccaatttacagccgtatattttcttatgatgtaatttatgaaaaagatgtctgtactaacaggtgctgtaacactactgttgttggattttattgtttggtgataaatgtatacaatatttctaagggaaactatgtactgtgatgtaaaagtctgggcaaaatgtatataatcctgtatataattatgtatttgattataattactgattgtaaagatttaataaaatatgtaaatattccagtttagtttta

SEQ ID NO: 313002 - DNA, 3236 bp, Homo sapiens
gaggcgctccgggatactgagggcggagggcggtggcagcgctggcgctggggaccggcttggtggcttcgggaaacagtttggcgccggcggccgtccgtgttactccgcatcccgccccgtctcggcacggctagcagccccctggccaccagcgtccagcaatgtgtctcaccggccgggcgtagcagctgcgcgtgcgcggaaccgcggggccatgagcgaagccggcggccggggctgtgggtccccggttccccagcgagcgcgatggagactagtggcggcgacggccgcgttctgcctggtgtcggccacctccgtgtggacggcgggggccgagcccatgagtagggaggagaaacagaagcttgggaatcaagtactggaaatgtttgatcatgcttatggtaactatatggaacatgcttaccctgctgatgaactcatgcctttaacctgtagaggtcgagttagaggccaagagccaagtcgcggtgacgttgatgatgccttgggaaaattttctctgacactgattgattctttggacactcttttagaggtgattacctctagccatcagccttactccatcccatgtttggtatgcaatttgagccacaaggctcgtatcgccaacagctatatacattttgttccatttttctgtcttacagagccatgataaaactgtggttagtgagttaaaattcctggagtaactactgtttttctcctttgaaacttaggtttctaaagttgcacctaaggaatctgtcacattttctgttgaatcatggtttttgtttttgtttttaacagatattccttctgatacggacttgaaaattagtgtatggtgacctgtgtttaaaaaaaaaagtacaatacaactacatatagctatatagcttaatgagacttccaccccccccctttttttttttggtttgttgttgttgtagtagtctggtgctggccacatttaagtcttaaaaatttttaaattttgttgttgatgtttgtagacagccctgttgttgaaatcatggctttattcattttatttattttttaaacttgcctgaatttgttctaaaggaatatttaagagacataattttcttctctttaccataacattacacaaaactttttcctaaaacacggttgtgaggtactgatgaggtgtaagtggagctgttaaaaacagcagtgctgtattgcagttatgtatattcgtgtacagtatgtttagatcccaggtaaacatattcttttctgagaggataaatacctgcattcagatattccaggtaaatataattgagtcagggagtagtaaatctgatggagaattcactttggggaggggaaaaagaatagtatgcaagacccttattggcttttaattatacctgaaaccaaaatggatatttttagtctctctgcatgtgagatttggtgtaacaagatagaactataatatatacagtatatggaaggatagatatagtgctttgttcattttaattgcaaagctgccaaaatagttgaagcttaattacttgacttgccttgatttataggactggggcttggagaaaatgagcagatgttcctctaagacatcgattacagaagccttatatacatggatttgattttgtatttgtagctgaaagtcactgttgtctaaaactaacttttctaagttatcaaaacaacctaatttcttttccaacaaggagaacttaatggcatgaaggattgtgtgacacattggaaaagccagcttactgccactctcttcctttggccattagagggaggtgttgcctttcattgacgcttagaagcaaattgttcacttgttaagaaaagtaaatccttaaaaaaagaaaaggaaaaaatttaaccaatttttcttaatacccagaaggaattatactcaatatttccctagttaagaaaagaggagataatgttcgtctaaaaaactccaacgttgtaattacaactctacattcatttacttacttgacatactgccacaaagtagtttttgagttcattaaaaattccaaaggcattagttgtttttttttttttttagtgttttgttttttagttaacttttatagacattttagtaacttgctaaagattcaggggattctatgaaaccccgaatttagaaacatctggtctacctcagttaaatgttgactgcttagaaatatagctgaagtgatcaccacagccataaaattgtttaagaaagatttatataatgtttacaaatctggaatcaaggattttagctgaaatcctttaagagatattagagcaagtatttaattcaggtattttcaagttttaaaacttaacctgtttacctactaaaaataaaatagctagtttttttctgcatataaaagttcattgaaatgatatgcccttatttgcaatacttttcccataaagttttaagtgtgaaagaattgtaatttactagatatgtttggtatgggatattttgttaggcaagttttcttttttcttcttaaattgcaataggcttccaaaaagagtataattgtttcagaacaaattaactcttggcattatacgtctccctttttctttacagtattagtaaaaagaaaaattgtacactttctgattttaacttcactaatgtaattactctctcaagaagcttttaaaatttaaattaccatcacacaaccttttttatagtaaagccaacatttgttctctcaccaaaccccatgccaaattcatcatgaagaaagctcagcataagtaattcaaatactgcttataattttagaggggggtagaatttagtaaatattccagccggtcgttttatgcacaaggcttcagtcagaacatagaaaaaaaaaacattctgtgaatgaaatattgtatgttcagattttataaaagacatttttaaaagcccaatttacagccgtatattttcttatgatgtaatttatgaaaaagatgtctgtactaacaggtgctgtaacactactgttgttggattttattgtttggtgataaatgtatacaatatttctaagggaaactatgtactgtgatgtaaaagtctgggcaaaatgtatataatcctgtatataattatgtatttgattataattactgattgtaaagattgggttttctttgtaaaaattcca

SEQ ID NO: 313003 - DNA, 4259 bp, Homo sapiens
gaggcgctccgggatactgagggcggagggcggtggcagcgctggcgctggggaccggcttggtggcttcgggaaacagtttggcgccggcggccgtccgtgttactccgcatcccgccccgtctcggcacggctagcagccccctggccaccagcgtccagcaatgtgtctcaccggccgggcgtagcagctgcgcgtgcgcggaaccgcggggccatgagcgaagccggcggccggggctgtgggtccccggttccccagcgagcgcgatggagactagtggcggcgacggccgcgttctgcctggtgtcggccacctccgtgtggacggcgggggccgagcccatgagtagggaggagaaacagaagcttgggaatcaagtactggaaatgtttgatcatgcttatggtaactatatggaacatgcttaccctgctgatgaactcatgcctttaacctgtagaggtcgagttagaggccaagagccaagtcgcggtgacgttgatgatgccttgggaaaattttctctgacactgattgattctttggacactcttgttttaaataaaactaaagaatttgaagatgcagtgagaaaagttttaagagatgttaatttagataacgatgtagtcgtatcagtctttgaaacaaacatcagagttcttgggggtcttttgggtgggcactccctggcaatcatgctgaaagaaaaaggtgaatatatgcagtggtacaatgatgaacttctccaaatggcaaagcagttaggttacaaacttttaccggctttcaacactaccagtggccttccttatccaagaattaatttaaagtttggcatcagaaaaccagaagctcggacaggaactgagacagatacctgtacagcttgtgcaggtaccttgatccttgaatttgctgctttaagtcgattcacaggagcaacaatatttgaggaatatgccagaaaagctcttgattttctctgggaaaaaagacagcgaagtagtaatttagtgggcgtgactataaatattcatactggagattgggtacgaaaagatagtggagttggagcagggattgattcatattatgaatatctgttgaaagcctatgtcttgcttggagatgacagttttctggaaagatttaacacacactatgatgccataatgaggtatattagccagccacctcttctacttgatgtgcatatccacaaaccaatgctgaatgctcggacttggatggatgctttgcttgccttcttcccaggcttgcaggtgttaaagggggatattagacctgctattgaaactcatgaaatgttatatcaggtgattaaaaaacacaattttctaccagaggcatttaccacagatttcagagtacactgggctcaacatcctttaaggccagaatttgcagaaagtacctacttcttatataaagctacaggagatccttactaccttgaagtagggaagacacttattgaaaatttaaataaatatgctagagtgccttgcggatttgctgccatgaaggatgttcgtactggaagtcatgaggacagaatggattctttcttcttggctgaaatgtttaaatatctttacctgttatttgctgataaagaagacattatttttgacatagaagattacatctttacaacagaagctcatctgttacctctttggctctctactacaaatcaaagcatctctaaaaagaacacaacctcggaatatacagaactggatgacagtaacttcgattggacttgtccaaatactcagatcctctttcctaatgacccattgtatgctcaaagtattcgtgagcccttgaaaaatgtggtggataagagctgtcctagaggcatcatcagagtagaggagagtttcaggagtggagctaaaccccctctgagagccagagatttcatggccactaaccctgagcatttagaaatcctgaagaagatgggggtgagtttgattcacctcaaagatgggagagtccagttggtccaacatgcaatccaagctgctagttcaatcgacgctgaagatgggttgaggttcatgcaggagatgattgaattgtcaagtcagcaacaaaaagaacagcagctgcctccacgagctgtacaaattgtttcccacccattttttggcagggtagtattgactgctggaccagctcagtttgggctggatctgtctaaacataaagagacaagaggatttgttgcaagcagtaaaccatccaatggttgttcagagcttactaacccagaggcagtgatgggaaaaatcgcactgatacaaagaggacagtgcatgtttgcagaaaaggcacgcaacatccagaatgctggagccattggtggcattgttattgatgacaatgaggggagcagcagtgatactgcccctctgttccagatggcaggtgatggaaaggatacagatgacatcaagatccccatgctgttcttattcagcaaagaaggaagtatcatactggatgccatccgggaatatgaggaggtagaagtgctcctctctgataaagcaaaagatcgagatcctgaaatggaaaatgaagaacaaccatcctctgaaaatgattctcagaatcagagtggtgaacagatttcatcaagttctcaggaggttgatttggttgatcaagagtcttctgaggaaaattctctaaattctcacccagaatcattatctctagcagatatggacaatgctgcaagcatttccccttctgaacagacttctaatcccacagaaaaccatgagactacaaatcttaatggtgaatgtacagatttagataaccagcttcaagaacaatcagaaactgaggaagattccaatcctaatgttagctggggtaaaaaggtccagcctatagactccatattagcagactggaatgaagatatagaagcatttgaaatgatggagaaggatgagctatgacttgctaaacaatctgttggtaggtatttaaaaagaaaaggtaaactgtgtgtggttaatagacatcctaatactaagcaggctttctaatgggaggctttaagtatggtgatgaacaaccacgttctgactggcgtagttatcgtaggaatctggagcatgctgtgttagaattgaccttgtttaaaactgtcccatcaaaaatggaaatccacagttcccccttcaaatgcagcactgcaccaccctgcaacacctcaggccagggaaagattactgagcattcctgcgaaccagatttctgttgtctctggatagacaagaaacaaaattcatttagtagtggagtggggaataggagtttggatagccttctaattaaaggaagctcgcctttcttggttttgggggttagaggctcttttgggaagatgcatccgagtattgtggcattctgattatgctgccttcacaaaacactctaagtgacctaagtggttatgaagcaaatgcatttatggtgaaaacagtctttgctcattgctttctcttgtttcatttagtgacaaatgatcaagatgacttgattttttttccttcttaacaatgtcttttttatttaaaccaaaggtgaagccagtgtactttctcagtgagttctctgcataaagactaatcagtgggaccaggtaaaaaggtcatataatacattgtggagattgcttacttaatacttctgaaaaatggagtaagggagaaactgtaatgttgcaatatgaacctcccattgggccttccatagggaaagctgtgactactctgaaatggaacctagcattatatccttgtagggtagattataaatcatttccagttcatttctcttagaggtgattacctctagccatcagccttactccatcccatgtttggtatgcaatttgagccacaaggctcgtatcgccaacagctatatacattttgttccatttttctgtcttacagagccatgataaaactgtggttagtgagttaaaattcctggagtaactactgtttttctcctttgaaacttaggtttctaaagttgcacctaaggaatctgtcacattttctgttgaatcatggtttttgtttttgtttttaacagatattccttctgatacggacttgaaaattagtgtatggtgacctgtgtttaaaaaaggggcactcacacatggggatagtgttaagcgctcccccc

SEQ ID NO: 313004 - DNA, 3841 bp, Homo sapiens
gaggcgctccgggatactgagggcggagggcggtggcagcgctggcgctggggaccggcttggtggcttcgggaaacagtttggcgccggcggccgtccgtgttactccgcatcccgccccgtctcggcacggctagcagccccctggccaccagcgtccagcaatgtgtctcaccggccgggcgtagcagctgcgcgtgcgcggaaccgcggggccatgagcgaagccggcggccggggctgtgggtccccggttccccagcgagcgcgatggagactagtggcggcgacggccgcgttctgcctggtgtcggccacctccgtgtggacggcgggggccgagcccatgagtagggaggagaaacagaagcttgggaatcaagtactggaaatgtttgatcatgcttatggtaactatatggaacatgcttaccctgctgatgaactcatgcctttaacctgtagaggtcgagttagaggccaagagccaagtcgcggtgacgttgatgatgccttgggaaaattttctctgacactgattgattctttggacactcttgttttaaataaaactaaagaatttgaagatgcagtgagaaaagttttaagagatgttaatttagataacgatgtagtcgtatcagtctttgaaacaaacatcagagttcttgggggtcttttgggtgggcactccctggcaatcatgctgaaagaaaaaggtgaatatatgcagtggtacaatgatgaacttctccaaatggcaaagcagttaggttacaaacttttaccggctttcaacactaccagtggccttccttatccaagaattaatttaaagtttggcatcagaaaaccagaagctcggacaggaactgagacagatacctgtacagcttgtgcaggtaccttgatccttgaatttgctgctttaagtcgattcacaggagcaacaatatttgaggaatatgccagaaaagctcttgattttctctgggaaaaaagacagcgaagtagtaatttagtgggcgtgactataaatattcatactggagattgggtacgaaaagatagtggagttggagcagggattgattcatattatgaatatctgttgaaagcctatgtcttgcttggagatgacagttttctggaaagatttaacacacactatgatgccataatgaggtatattagccagccacctcttctacttgatgtgcatatccacaaaccaatgctgaatgctcggacttggatggatgctttgcttgccttcttcccaggcttgcaggtgttaaagggggatattagacctgctattgaaactcatgaaatgttatatcaggtgattaaaaaacacaattttctaccagaggcatttaccacagatttcagagtacactgggctcaacatcctttaaggccagaatttgcagaaagtacctacttcttatataaagctacaggagatccttactaccttgaagtagggaagacacttattgaaaatttaaataaatatgctagagtgccttgcggatttgctgccatgaaggatgttcgtactggaagtcatgaggacagaatggattctttcttcttggctgaaatgtttaaatatctttacctgttatttgctgataaagaagacattatttttgacatagaagattacatctttacaacagaagctcatctgttacctctttggctctctactacaaatcaaagcatctctaaaaagaacacaacctcggaatatacagaactggatgacagtaacttcgattggacttgtccaaatactcagatcctctttcctaatgacccattgtatgctcaaagtattcgtgagcccttgaaaaatgtggtggataagagctgtcctagaggcatcatcagagtagaggagagtttcaggagtggagctaaaccccctctgagagccagagatttcatggccactaaccctgagcatttagaaatcctgaagaagatgggggtgagtttgattcacctcaaagatgggagagtccagttggtccaacatgcaatccaagctgctagttcaatcgacgctgaagatgggttgaggttcatgcaggagatgattgaattgtcaagtcagcaacaaaaagaacagcagctgcctccacgagctgtacaaattgtttcccacccattttttggcagggtagtattgactgctggaccagctcagtttgggctggatctgtctaaacataaagagacaagaggatttgttgcaagcagtaaaccatccaatggttgttcagagcttactaacccagaggcagtgatgggaaaaatcgcactgatacaaagaggacagtgcatgtttgcagaaaaggcacgcaacatccagaatgctggagccattggtggcattgttattgatgacaatgaggggagcagcagtgatactgcccctctgttccagatggcaggtgatggaaaggatacagatgacatcaagatccccatgctgttcttattcagcaaagaaggaagtatcatactggatgccatccgggaatatgaggaggtagaagtgctcctctctgataaagcaaaagatcgagatcctgaaatggaaaatgaagaacaaccatcctctgaaaatgattctcagaatcagagtggtgaacagatttcatcaagttctcaggaggttgatttggttgatcaagagtcttctgaggaaaattctctaaattctcacccagaatcattatctctagcagatatggacaatgctgcaagcatttccccttctgaacagacttctaatcccacagaaaaccatgagactacaaatcttaatggtgaatgtacagatttagataaccagcttcaagaacaatcagaaactgaggaagattccaatcctaatgttagctggggtaaaaaggtccagcctatagactccatattagcagactggaatgaagatatagaagcatttgaaatgatggagaaggatgagctatgacttgctaaacaatctgttggtaggtatttaaaaagaaaaggtaaactgtgtgtggttaatagacatcctaatactaagcaggctttctaatgggaggctttaagtatggtgatgaacaaccacgttctgactggcgtagttatcgtaggaatctggagcatgctgtgttagaattgaccttgtttaaaactgtcccatcaaaaatggaaatccacagttcccccttcaaatgcagcactgcaccaccctgcaacacctcaggccagggaaagattactgagcattcctgcgaaccagatttctgttgtctctggatagacaagaaacaaaattcatttagtagtggagtggggaataggagtttggatagccttctaattaaaggaagctcgcctttcttggttttgggggttagaggctcttttgggaagatgcatccgagtattgtggcattctgattatgctgccttcacaaaacactctaagtgacctaagtggttatgaagcaaatgcatttatggtgaaaacagtctttgctcattgctttctcttgtttcatttagtgacaaatgatcaagatgacttgattttttttccttcttaacaatgtcttttttatttaaaccaaaggtgaagccagtgtactttctcagtgagttctctgcataaagactaatcagtgggaccaggtaaaaaggtcatataatacattgtggagattgcttacttaatacttctgaaaaatggagtaagggagaaactgtaatgttgcagtgtgcttccgaccgatattccagcacactgcgccgtactatgaacgagcgcgta

SEQ ID NO: 313005 - DNA, 476 bp, Homo sapiens
gtggccttccttatccaagagtaagtacttctgaaaaatatgagtctttatatactttctttgctgttttacaaaatgaagttttgtgatcagagccattgttcttcaccagcttgaggctgaaaaaaaaatgcttcaaagctatataacaaatttatattttcatttcaattaactgattatacttctaagtgatgtgataattagattagtttaagctttaaaaaagttttatttctgatttctgtgggtacatagtaggtatatattaatggggtatgtgagatattttgatacaatcatacaatgcataataatcacatcagggtaaatgaggtggccattacctcgagcatttatcatttctttgtgttacaaacattccaattatactcttttagttgttttaaaatgtatgatacatttctgttgactgtaatcgctctgttgtgctattaaatactgtatcttattca

SEQ ID NO: 313006 - DNA, 359 bp, Homo sapiens
tgaagtagggaagacacttattgaaaatttaaataaatatgctagagtgccttgcggatttgctgccatgaaggatgttcgtactggaagtcatgaggacaggtaaaacaattgctaacatcctctttcctcagggtctctctgaaacaacacaaaatgcagctaccatttaggattcaaataagtttaattcttttacaaaggatagaaacctttgttccttgtgtttacttttttaaactctgttgaatacactaattttaatttgtttgaaaagtttgtatttttatcatagtgcctggcatatagtaggtgctcaaatgatttttaaataaatgaatcgatgattgttaaatatc

SEQ ID NO: 313007 - DNA, 1646 bp, Homo sapiens
gaggcgctccgggatactgagggcggagggcggtggcagcgctggcgctggggaccggcttggtggcttcgggaaacagtttggcgccggcggccgtccgtgttactccgcatcccgccccgtctcggcacggctagcagccccctggccaccagcgtccagcaatgtgtctcaccggccgggcgtagcagctgcgcgtgcgcggaaccgcggggccatgagcgaagccggcggccggggctgtgggtccccggttccccagcgagcgcgatggagactagtggcggcgacggccgcgttctgcctggtgtcggccacctccgtgtggacggcgggggccgagcccatgagtagggaggagaaacagaagcttgggtaagggtgctggcagcctggggtgggtttctcggtgaggctgacaacaggaggggtgcctgtcattgcgacccggtcgcgtagtggcctctcctgtcgcgattggaacggctcttcccgcgcgagaaccctagaggggtggacagggtccggggaggtgggaaccgccgcccgcgacctgacctcgggggagctgacggggtgtcgccctggccgccggtgacatgtgcaggctccttgaagccaggcgcggtgtgtcaacgcggctgccatgtcagtggcccaagaagggggctacagcccgcatcgctgcgcgctggagttctgcggttggctgcctgtcgaccgaagcatggttagctttctcgcgcaagtgagcttccaactgggaaaatgttgctgatctcacagtagttaaggaaatgatgtttacacctgttacggaaaagggggcgttcattggaacttgaactttacacattttactatttccttgcagtgttttcttgcactgtattttcataatagaatgtttggggggaaattattcaaaagtctcaagtatacctattcagtagtttttatccgtcttggaagtgtgttaaaattatcaattctatttacaccatttaattcagagtaatacatacacgaggtcctacacatgaataagaaaaaagcgaagaaccagtaggaaatgggagaaaggcatgaacggttaagccagaagaggaaatggaagtggtaaataaacatgaaaagttactcaacctccataaacgtaggagatgcagattaaaacgaggagctagctggtttttgcccatcagattagtaaatataatacaaaacacaaggatacggttctggttagttaaggaatagaaaaaaaaggcttagtgagagtgtaaattgctgtaacttattggtagtatctactaaaatttaaattgtgcacactttgattcatcagttctatttctgagaatctaccctaagaaaataaaagcactcttaatgcagagatagatccagcctgggcaacaagagcgaaactctgtctcgaaaaaaaaaaaaaaagtgcattttgaaagaacagctcttccttggaggaaatggttcaatagggtacgttcatattatggaataatattgagacattaagaagaaggaagtacgtcactggaagcctatccagaatatatttccaaaacaaaaaaaaatgcaagttgtagaataatatgtatagtatcatcccatgttttttttaa

SEQ ID NO: 313008 - DNA, 6451 bp, Homo sapiens
gaggcgctccgggatactgagggcggagggcggtggcagcgctggcgctggggaccggcttggtggcttcgggaaacagtttggcgccggcggccgtccgtgttactccgcatcccgccccgtctcggcacggctagcagccccctggccaccagcgtccagcaatgtgtctcaccggccgggcgtagcagctgcgcgtgcgcggaaccgcggggccatgagcgaagccggcggccggggctgtgggtccccggttccccagcgagcgcgatggagactagtggcggcgacggccgcgttctgcctggtgtcggccacctccgtgtggacggcgggggccgagcccatgagtagggaggagaaacagaagcttgggaatcaagtactggaaatgtttgatcatgcttatggtaactatatggaacatgcttaccctgctgatgaactcatgcctttaacctgtagaggtcgagttagaggccaagagccaagtcgcggtgacgttgatgatgccttgggaaaattttctctgacactgattgattctttggacactcttgttttaaataaaactaaagaatttgaagatgcagtgagaaaagttttaagagatgttaatttagataacgatgtagtcgtatcagtctttgaaacaaacatcagagttcttgggggtcttttgggtgggcactccctggcaatcatgctgaaagaaaaaggtgaatatatgcagtggtacaatgatgaacttctccaaatggcaaagcagttaggttacaaacttttaccggctttcaacactaccagtggccttccttatccaagaattaatttaaagtttggcatcagaaaaccagaagctcggacaggaactgagacagatacctgtacagcttgtgcaggtaccttgatccttgaatttgctgctttaagtcgattcacaggagcaacaatatttgaggaatatgccagaaaagctcttgattttctctgggaaaaaagacagcgaagtagtaatttagtgggcgtgactataaatattcatactggagattgggtacgaaaagatagtggagttggagcagggattgattcatattatgaatatctgttgaaagcctatgtcttgcttggagatgacagttttctggaaagatttaacacacactatgatgccataatgaggtatattagccagccacctcttctacttgatgtgcatatccacaaaccaatgctgaatgctcggacttggatggatgctttgcttgccttcttcccaggcttgcaggtgttaaagggggatattagacctgctattgaaactcatgaaatgttatatcaggtgattaaaaaacacaattttctaccagaggcatttaccacagatttcagagtacactgggctcaacatcctttaaggccagaatttgcagaaagtacctacttcttatataaagctacaggagatccttactaccttgaagtagggaagacacttattgaaaatttaaataaatatgctagagtgccttgcggatttgctgccatgaaggatgttcgtactggaagtcatgaggacagaatggattctttcttcttggctgaaatgtttaaatatctttacctgttatttgctgataaagaagacattatttttgacatagaagattacatctttacaacagaagctcatctgttacctctttggctctctactacaaatcaaagcatctctaaaaagaacacaacctcggaatatacagaactggatgacagtaacttcgattggacttgtccaaatactcagatcctctttcctaatgacccattgtatgctcaaagtattcgtgagcccttgaaaaatgtggtggataagagctgtcctagaggcatcatcagagtagaggagagtttcaggagtggagctaaaccccctctgagagccagagatttcatggccactaaccctgagcatttagaaatcctgaagaagatgggggtgagtttgattcacctcaaagatgggagagtccagttggtccaacatgcaatccaaggtagtattgactgctggaccagctcagtttgggctggatctgtctaaacataaagagacaagaggatttgttgcaagcagtaaaccatccaatggttgttcagagcttactaacccagaggcagtgatgggaaaaatcgcactgatacaaagaggacagtgcatgtttgcagaaaaggcacgcaacatccagaatgctggagccattggtggcattgttattgatgacaatgaggggagcagcagtgatactgcccctctgttccagatggcaggtgatggaaaggatacagatgacatcaagatccccatgctgttcttattcagcaaagaaggaagtatcatactggatgccatccgggaatatgaggaggtagaagtgctcctctctgataaagcaaaagatcgagatcctgaaatggaaaatgaagaacaaccatcctctgaaaatgattctcagaatcagagtggtgaacagatttcatcaagttctcaggaggttgatttggttgatcaagagtcttctgaggaaaattctctaaattctcacccagaatcattatctctagcagatatggacaatgctgcaagcatttccccttctgaacagacttctaatcccacagaaaaccatgagactacaaatcttaatggtgaatgtacagatttagataaccagcttcaagaacaatcagaaactgaggaagattccaatcctaatgttagctggggtaaaaaggtccagcctatagactccatattagcagactggaatgaagatatagaagcatttgaaatgatggagaaggatgagctatgacttgctaaacaatctgttggtaggtatttaaaaagaaaaggtaaactgtgtgtggttaatagacatcctaatactaagcaggctttctaatgggaggctttaagtatggtgatgaacaaccacgttctgactggcgtagttatcgtaggaatctggagcatgctgtgttagaattgaccttgtttaaaactgtcccatcaaaaatggaaatccacagttcccccttcaaatgcagcactgcaccaccctgcaacacctcaggccagggaaagattactgagcattcctgcgaaccagatttctgttgtctctggatagacaagaaacaaaattcatttagtagtggagtggggaataggagtttggatagccttctaattaaaggaagctcgcctttcttggttttgggggttagaggctcttttgggaagatgcatccgagtattgtggcattctgattatgctgccttcacaaaacactctaagtgacctaagtggttatgaagcaaatgcatttatggtgaaaacagtctttgctcattgctttctcttgtttcatttagtgacaaatgatcaagatgacttgattttttttccttcttaacaatgtcttttttatttaaaccaaaggtgaagccagtgtactttctcagtgagttctctgcataaagactaatcagtgggaccaggtaaaaaggtcatataatacattgtggagattgcttacttaatacttctgaaaaatggagtaagggagaaactgtaatgttgcaatatgaacctcccattgggccttccatagggaaagctgtgactactctgaaatggaacctagcattatatccttgtagggtagattataaatcatttccagttcatttctcttagaggtgattacctctagccatcagccttactccatcccatgtttggtatgcaatttgagccacaaggctcgtatcgccaacagctatatacattttgttccatttttctgtcttacagagccatgataaaactgtggttagtgagttaaaattcctggagtaactactgtttttctcctttgaaacttaggtttctaaagttgcacctaaggaatctgtcacattttctgttgaatcatggtttttgtttttgtttttaacagatattccttctgatacggacttgaaaattagtgtatggtgacctgtgtttaaaaaaaaaagtacaatacaactacatatagctatatagcttaatgagacttccaccccccccctttttttttttggtttgttgttgttgtagtagtctggtgctggccacatttaagtcttaaaaatttttaaattttgttgttgatgtttgtagacagccctgttgttgaaatcatggctttattcattttatttattttttaaacttgcctgaatttgttctaaaggaatatttaagagacataattttcttctctttaccataacattacacaaaactttttcctaaaacacggttgtgaggtactgatgaggtgtaagtggagctgttaaaaacagcagtgctgtattgcagttatgtatattcgtgtacagtatgtttagatcccaggtaaacatattcttttctgagaggataaatacctgcattcagatattccaggtaaatataattgagtcagggagtagtaaatctgatggagaattcactttggggaggggaaaaagaatagtatgcaagacccttattggcttttaattatacctgaaaccaaaatggatatttttagtctctctgcatgtgagatttggtgtaacaagatagaactataatatatacagtatatggaaggatagatatagtgctttgttcattttaattgcaaagctgccaaaatagttgaagcttaattacttgacttgccttgatttataggactggggcttggagaaaatgagcagatgttcctctaagacatcgattacagaagccttatatacatggatttgattttgtatttgtagctgaaagtcactgttgtctaaaactaacttttctaagttatcaaaacaacctaatttcttttccaacaaggagaacttaatggcatgaaggattgtgtgacacattggaaaagccagcttactgccactctcttcctttggccattagagggaggtgttgcctttcattgacgcttagaagcaaattgttcacttgttaagaaaagtaaatccttaaaaaaagaaaaggaaaaaatttaaccaatttttcttaatacccagaaggaattatactcaatatttccctagttaagaaaagaggagataatgttcgtctaaaaaactccaacgttgtaattacaactctacattcatttacttacttgacatactgccacaaagtagtttttgagttcattaaaaattccaaaggcattagttgtttttttttttttttagtgttttgttttttagttaacttttatagacattttagtaacttgctaaagattcaggggattctatgaaaccccgaatttagaaacatctggtctacctcagttaaatgttgactgcttagaaatatagctgaagtgatcaccacagccataaaattgtttaagaaagatttatataatgtttacaaatctggaatcaaggattttagctgaaatcctttaagagatattagagcaagtatttaattcaggtattttcaagttttaaaacttaacctgtttacctactaaaaataaaatagctagtttttttctgcatataaaagttcattgaaatgatatgcccttatttgcaatacttttcccataaagttttaagtgtgaaagaattgtaatttactagatatgtttggtatgggatattttgttaggcaagttttcttttttcttcttaaattgcaataggcttccaaaaagagtataattgtttcagaacaaattaactcttggcattatacgtctccctttttctttacagtattagtaaaaagaaaaattgtacactttctgattttaacttcactaatgtaattactctctcaagaagcttttaaaatttaaattaccatcacacaaccttttttatagtaaagccaacatttgttctctcaccaaaccccatgccaaattcatcatgaagaaagctcagcataagtaattcaaatactgcttataattttagaggggggtagaatttagtaaatattccagccggtcgttttatgcacaaggcttcagtcagaacatagaaaaaaaaaacattctgtgaatgaaatattgtatgttcagattttataaaagacatttttaaaagcccaatttacagccgtatattttcttatgatgtaatttatgaaaaagatgtctgtactaacaggtgctgtaacactactgttgttggattttattgtttggtgataaatgtatacaatatttctaagggaaactatgtactgtgatgtaaaagtctgggcaaaatgtatataatcctgtatataattatgtatttgattataattactgattgtaaagatttaataaaatatgtaaatattccagtttagtttta

SEQ ID NO: 313009 - DNA, 4754 bp, Homo sapiens
gaggcgctccgggatactgagggcggagggcggtggcagcgctggcgctggggaccggcttggtggcttcgggaaacagtttggcgccggcggccgtccgtgttactccgcatcccgccccgtctcggcacggctagcagccccctggccaccagcgtccagcaatgtgtctcaccggccgggcgtagcagctgcgcgtgcgcggaaccgcggggccatgagcgaagccggcggccggggctgtgggtccccggttccccagcgagcgcgatggagactagtggcggcgacggccgcgttctgcctggtgtcggccacctccgtgtggacggcgggggccgagcccatgagtagggaggagaaacagaagcttgggaatcaagtactggaaatgtttgatcatgcttatggtaactatatggaacatgcttaccctgctgatgaactcatgcctttaacctgtagaggtcgagttagaggccaagagccaagtcgcggtgacgttgatgatgccttgggaaaattttctctgacactgattgattctttggacactcttgttttaaataaaactaaagaatttgaagatgcagtgagaaaagttttaagagatgttaatttagataacgatgtagtcgtatcagtctttgaaacaaacatcagagttcttgggggtcttttgggtgggcactccctggcaatcatgctgaaagaaaaaggtgaatatatgcagtggtacaatgatgaacttctccaaatggcaaagcagttaggttacaaacttttaccggctttcaacactaccagtggccttccttatccaagaattaatttaaagtttggcatcagaaaaccagaagctcggacaggaactgagacagatacctgtacagcttgtgcaggtaccttgatccttgaatttgctgctttaagtcgattcacaggagcaacaatatttgaggaatatgccagaaaagctcttgattttctctgggaaaaaagacagcgaagtagtaatttagtgggcgtgactataaatattcatactggagattgggtacgaaaagatagtggagttggagcagggattgattcatattatgaatatctgttgaaagcctatgtcttgcttggagatgacagttttctggaaagatttaacacacactatgatgccataatgaggtatattagccagccacctcttctacttgatgtgcatatccacaaaccaatgctgaatgctcggacttggatggatgctttgcttgccttcttcccaggcttgcaggtgttaaagggggatattagacctgctattgaaactcatgaaatgttatatcaggtgattaaaaaacacaattttctaccagaggcatttaccacagatttcagagtacactgggctcaacatcctttaaggccagaatttgcagaaagtacctacttcttatataaagctacaggagatccttactaccttgaagtagggaagacacttattgaaaatttaaataaatatgctagagtgccttgcggatttgctgccatgaaggatgttcgtactggaagtcatgaggacagaatggattctttcttcttggctgaaatgtttaaatatctttacctgttatttgctgataaagaagacattatttttgacatagaagattacatctttacaacagaagctcatctgttacctctttggctctctactacaaatcaaagcatctctaaaaagaacacaacctcggaatatacagaactggatgacagtaacttcgattggacttgtccaaatactcagatcctctttcctaatgacccattgtatgctcaaagtattcgtgagcccttgaaaaatgtggtggataagagctgtcctagaggcatcatcagagtagaggagagtttcaggagtggagctaaaccccctctgagagccagagatttcatggccactaaccctgagcatttagaaatcctgaagaagatgggggtgagtttgattcacctcaaagatgggagagtccagttggtccaacatgcaatccaagctgctagttcaatcgacgctgaagatgggttgaggttcatgcaggagatgattgaattgtcaagtcagcaacaaaaagaacagcagctgcctccacgagctgtacaaattgtttcccacccattttttggcagggtagtattgactgctggaccagctcagtttgggctggatctgtctaaacataaagagacaagaggatttgttgcaagcagtaaaccatccaatggttgttcagagcttactaacccagaggcagtgatgggaaaaatcgcactgatacaaagaggacagtgcatgtttgcagaaaaggcacgcaacatccagaatgctggagccattggtggcattgttattgatgacaatgaggggagcagcagtgatactgcccctctgttccagatggcaggtgatggaaaggatacagatgacatcaagatccccatgctgttcttattcagcaaagaaggaagtatcatactggatgccatccgggaatatgaggaggtagaagtgctcctctctgataaagcaaaagatcgagatcctgaaatggaaaatgaagaacaaccatcctctgaaaatgattctcagaatcagagtggtgaacagatttcatcaagttctcaggaggttgatttggttgatcaagagtcttctgaggaaaattctctaaattctcacccagaatcattatctctagcagatatggacaatgctgcaagcatttccccttctgaacagacttctaatcccacagaaaaccatgagactacaaatcttaatggtgaatgtacagatttagataaccagcttcaagaacaatcagaaactgaggaagattccaatcctaatgttagctggggtaaaaaggtccagcctatagactccatattagcagactggaatgaagatatagaagcatttgaaatgatggagaaggatgagctatgacttgctaaacaatctgttggtgaagccagtgtactttctcagtgagttctctgcataaagactaatcagtgggaccaggtaaaaaggactggggcttggagaaaatgagcagatgttcctctaagacatcgattacagaagccttatatacatggatttgattttgtatttgtagctgaaagtcactgttgtctaaaactaacttttctaagttatcaaaacaacctaatttcttttccaacaaggagaacttaatggcatgaaggattgtgtgacacattggaaaagccagcttactgccactctcttcctttggccattagagggaggtgttgcctttcattgacgcttagaagcaaattgttcacttgttaagaaaagtaaatccttaaaaaaagaaaaggaaaaaatttaaccaatttttcttaatacccagaaggaattatactcaatatttccctagttaagaaaagaggagataatgttcgtctaaaaaactccaacgttgtaattacaactctacattcatttacttacttgacatactgccacaaagtagtttttgagttcattaaaaattccaaaggcattagttgtttttttttttttttagtgttttgttttttagttaacttttatagacattttagtaacttgctaaagattcaggggattctatgaaaccccgaatttagaaacatctggtctacctcagttaaatgttgactgcttagaaatatagctgaagtgatcaccacagccataaaattgtttaagaaagatttatataatgtttacaaatctggaatcaaggattttagctgaaatcctttaagagatattagagcaagtatttaattcaggtattttcaagttttaaaacttaacctgtttacctactaaaaataaaatagctagtttttttctgcatataaaagttcattgaaatgatatgcccttatttgcaatacttttcccataaagttttaagtgtgaaagaattgtaatttactagatatgtttggtatgggatattttgttaggcaagttttcttttttcttcttaaattgcaataggcttccaaaaagagtataattgtttcagaacaaattaactcttggcattatacgtctccctttttctttacagtattagtaaaaagaaaaattgtacactttctgattttaacttcactaatgtaattactctctcaagaagcttttaaaatttaaattaccatcacacaaccttttttatagtaaagccaacatttgttctctcaccaaaccccatgccaaattcatcatgaagaaagctcagcataagtaattcaaatactgcttataattttagaggggggtagaatttagtaaatattccagccggtcgttttatgcacaaggcttcagtcagaacatagaaaaaaaaaacattctgtgaatgaaatattgtatgttcagattttataaaagacatttttaaaagcccaatttacagccgtatattttcttatgatgtaatttatgaaaaagatgtctgtactaacaggtgctgtaacactactgttgttggattttattgtttggtgataaatgtatacaatatttctaagggaaactatgtactgtgatgtaaaagtctgggcaaaatgtatataatcctgtatataattatgtatttgattataattactgattgtaaagatttaataaaatatgtaaatattccagtttagtttta

SEQ ID NO: 313010 - DNA, 998 bp, Homo sapiens
cttttcctccctgtcgccaccgaggtcgcacgcgtgagacttctccgccgcctccgccgcagacgccgccgcgatgcgctacgtcgcctcctacctgctggctgccctagggggcaactcctcccccagcgccaaggacatcaagaagatcttggacagcgtgggtatcgaggcggacgacgaccggctcaacaaggttatcagtgagctgaatggaaaaaacattgaagacgtcattgcccagggtattggcaagcttgccagtgtacctgctggtggggctgtagccgtctctgctgccccaggctctgcagcccctgctgctggttctgcccctgctgcagcagaggagaagaaagatgagaagaaggaggagtctgaagagtcagatgatgacatgggatttggcctttttgattaaattcctgctcccctgcaaataaagcctttttacacatctaaaaaaaaaaaaaaaaaaaaaaaaatttaaattaccatcacacaaccttttttatagtaaagccaacatttgttctctcaccaaaccccatgccaaattcatcatgaagaaagctcagcataagtaattcaaatactgcttataattttagaggggggtagaatttagtaaatattccagccggtcgttttatgcacaaggcttcagtcagaacatagaaaaaaaaaacattctgtgaatgaaatattgtatgttcagattttataaaagacatttttaaaagcccaatttacagccgtatattttcttatgatgtaatttatgaaaaagatgtctgtactaacaggtgctgtaacactactgttgttggattttattgtttggtgataaatgtatacaatatttctaagggaaactatgtactgtgatgtaaaagtctgggcaaaatgtatataatcctgtatataattatgtatttgattataattactgattgtaaagatttaataaaatatgtaaatattccagtttagtttta

SEQ ID NO: 313011 - DNA, 4147 bp, Homo sapiens
  misc_feature (3464)..(3464): n is a, c, g, or t
atccaacacgagtaactactaaattaaacgtctgttttagctgatgtctgaaaggccattacctcatagttgattggcaaaatatgagttcataaagaattttcctttctgcttaggaggataaagcaatacaataattaaaggatatctaatatgcaaaagtctatatttagggaaatattaaatattctctttaaaatgttcaaatgtcatacatatgttaatgtatccaatgctttgaaactttataggggcaatatagggatgaaaattaaaaagcagtgactgaggggcctggcataggcaaaatcatagagatagaaaatagagctgagtgtgattagtgtttagtgggtggagtttctgtttgggatagcaaaaagttctggatgtggacagtggtaatagttgcaagacaacacgaatgtacttaatgtcactgaattgtacgcttaaatgataaccattgacatttttctattacaaacttaaatctaaatttcaccataatttaaacaaaaagcaatggctagagtgaggagagtcagcttcaatgcttcagtaggcccccgaccagctgggagcagatctggaagatggacggttgtggtgtcttctaaatgtaaaattgcacaattttggtattcgctatcccatttactcctcacaataattatgtgagatgtgtatggcagaaaactccattttaaagattaagtatcgaaaaacagaaaaatatttaaaaattatatcaaaagtcatctcttaaaagagattatcttgaaatcaaaagagaaccaaataataatcatcatcagtaaaagacccagtaaaacatgggacctcccaactgtagccaaagaaaaagcaatttctgataacatctcatttcattcccctttatcacttcttcagtgctttctttgtcctccttcctcagctactataattcatcttcattatcttaaaaagaagtctgcattaggaaagggtgagagataatgaagtaacagaaaaataatctcaaacactttactatttaaataataaacctgggttatagcttatgaaacagtgcaatgaagtatcatattacaataagaacaagtttcaaaaccaacattaaaataagcgataagtaagaaagccataaaaaaggaaacaataaattgttataatattgtttttataatttgcttactaactcgtatgtttttaggcatttataatgcagtatggcacacacctgaaattccttaactcagtggtttttaaacttaattgttgccgggtgcgttggctcatgcctgtaatcccagcactttgggagcccgaggcgggcagatcacttgaggtcaggagtttgagaccagcctggccaacatggtgaaaccctgtctctactaaaaatacaaaaattagccagccatggtagtgcatgtctgtaatcctggctgctagggaggctgaggcagaagaattgcttgaacccagcaggcggaggttgcagtgagcagagatcatgccactgcactccagcctgggcgacagagtaagactctgtctcaaaaaaaaaaaaccaacttaattgtatatctaaaattcttgtggcttgtttcacccttccttccatcccaggcctctaaatcagaacagaggcaggttagtgtttgttttttaagtttcaagtgattctaatgtaccagccttgggaaatacctccgtaactgttgaaaagggttcagaatataattttaaataaaattactttagatcaaaacagacttacaataagtataatatcacataaaggatcaactttcaagcgccaaagaatacaggtgtgtacttgaagaccttttagtagtgaaactcagcagctgtaggcagtgaagaaaggagcatatgtgataaacaaaattagctgtggtcaacaattatgctatagctaacttatgtagtcagtactttccagtgaagttgaaaataaagcaaagttccatgtattaaccctgttttccactaacccttctttacatgtaggacatatgccagggtaccaaaaactgcaggaatattccctagcattgcagcctcagttctaataccaaaatctccctgcagactaaatgtctagagcagcactgtatcaatagaacataggggcagatctcataccttccaagggtagaaatcgctgagcacaggtaaaaataaaatattccagagggaaatattattttacaaatttttataaacacttttgtaaaataatgtacacagccttgcacactgaaagagtcaaagccatttaactctgtataaccactgcagaatctttatcttcttttttacctgacttccaattggcgggtgttactaaaactttatcaccaaagttatttcactagctgagcgtggtggctcatgcctgtaatcccaacactttgggaggccaaggcaggtggatcatttgaggccaggagtttgacaccaacctggccaacacggtgaaacctcatctccactaaaaatacaacaaattggctgggtgtggtggcgcatacctgtaatcccagctactcagaaggctgaggcacgagaatcacttgagcctgggaggcataggttgcaatgagtcaagatcgcgccactgcactccagcctgggagacagagcaagactgtctcaatgtctcaaaaaaaaaaaaaaaagttatttcactagcaacatataattaccataaaacaaaggagggttttaaatgaactacacatgcaaaatacactagaaaagctagatatttttaaaaacgtggtgaattatttggtaaagccaaaatattttaattcataagttactattcccccaatgcatctattttgtaaatgctgtttcacatatgaggtttgtaaaaaagcaaaatatatgtataaaatggcgtacataaagatgttctacaaatatagccagaagttattgttttactgtatgcaaagagtgatggcaatttttaattcaaatgtttttaaatatttcgaactgaaactaaatcttaccaatgtaaaattgccacaaagacggctggaaaagagaaaagttattaaaagctgctttattataaaataccattaaaacaagtatttcaaatgtattattttacatgtctagaaaagatagcacagaaagcaagatggccagctaatcctgtctctatgagcataggaaaaaatccaggacacaaagtaaattctgaacagagcttacctctctgcagcagggcttgacaagcaaagggagagacttgagagggtttttttacttcagttaattggtaggagtgatggaattatggaatattgtgaccttttttgtttttctttttagtattctattcctttatatgaaattttttaaagaagtaaatatatacagtatgcttcagctcgttctaaccaagaggngccactctagatcagtttctctagcattcatcagaagacgattaaatgcaggcaatcacttcctcagcagcacatctaaaagccccattgtgcaactcaacccttgatgaattgcaagctctttgcaagcgcccagacttaggaactactagatggcctaggagacttatctggaggcacctgtgccagcaccccatgtatacgtaagacttcaccagggagctgggagacactgctctgggtatggagcttttaccagagctgcaaacgcagcctgtgcccctgtttcgttggggaattgcttgttttcaagggtaccatggagctggagagagaaaagtggggaatagaacaagttaaaacaccacagactttgctgttcttatagaggttcagcagcttttcttgaattaatgccctttagattgttgtaaacctttggttaacttccaaagttttgaagaaaatgattttgataattttccaagtattttcattgtcatcatggaggagtgcatttccttggctattccagaagtcctacctcccttctgagattttataatggtatttcttatggttatcccaaatatacttggcaagtcgtcttataaaccaccaataatagcctcttaaaaattcaaaaattactcctcttggctaacaaaataaatgcaaattaa

SEQ ID NO: 313012 - DNA, 5103 bp, Homo sapiens
  misc_feature (3464)..(3464): n is a, c, g, or t
atccaacacgagtaactactaaattaaacgtctgttttagctgatgtctgaaaggccattacctcatagttgattggcaaaatatgagttcataaagaattttcctttctgcttaggaggataaagcaatacaataattaaaggatatctaatatgcaaaagtctatatttagggaaatattaaatattctctttaaaatgttcaaatgtcatacatatgttaatgtatccaatgctttgaaactttataggggcaatatagggatgaaaattaaaaagcagtgactgaggggcctggcataggcaaaatcatagagatagaaaatagagctgagtgtgattagtgtttagtgggtggagtttctgtttgggatagcaaaaagttctggatgtggacagtggtaatagttgcaagacaacacgaatgtacttaatgtcactgaattgtacgcttaaatgataaccattgacatttttctattacaaacttaaatctaaatttcaccataatttaaacaaaaagcaatggctagagtgaggagagtcagcttcaatgcttcagtaggcccccgaccagctgggagcagatctggaagatggacggttgtggtgtcttctaaatgtaaaattgcacaattttggtattcgctatcccatttactcctcacaataattatgtgagatgtgtatggcagaaaactccattttaaagattaagtatcgaaaaacagaaaaatatttaaaaattatatcaaaagtcatctcttaaaagagattatcttgaaatcaaaagagaaccaaataataatcatcatcagtaaaagacccagtaaaacatgggacctcccaactgtagccaaagaaaaagcaatttctgataacatctcatttcattcccctttatcacttcttcagtgctttctttgtcctccttcctcagctactataattcatcttcattatcttaaaaagaagtctgcattaggaaagggtgagagataatgaagtaacagaaaaataatctcaaacactttactatttaaataataaacctgggttatagcttatgaaacagtgcaatgaagtatcatattacaataagaacaagtttcaaaaccaacattaaaataagcgataagtaagaaagccataaaaaaggaaacaataaattgttataatattgtttttataatttgcttactaactcgtatgtttttaggcatttataatgcagtatggcacacacctgaaattccttaactcagtggtttttaaacttaattgttgccgggtgcgttggctcatgcctgtaatcccagcactttgggagcccgaggcgggcagatcacttgaggtcaggagtttgagaccagcctggccaacatggtgaaaccctgtctctactaaaaatacaaaaattagccagccatggtagtgcatgtctgtaatcctggctgctagggaggctgaggcagaagaattgcttgaacccagcaggcggaggttgcagtgagcagagatcatgccactgcactccagcctgggcgacagagtaagactctgtctcaaaaaaaaaaaaccaacttaattgtatatctaaaattcttgtggcttgtttcacccttccttccatcccaggcctctaaatcagaacagaggcaggttagtgtttgttttttaagtttcaagtgattctaatgtaccagccttgggaaatacctccgtaactgttgaaaagggttcagaatataattttaaataaaattactttagatcaaaacagacttacaataagtataatatcacataaaggatcaactttcaagcgccaaagaatacaggtgtgtacttgaagaccttttagtagtgaaactcagcagctgtaggcagtgaagaaaggagcatatgtgataaacaaaattagctgtggtcaacaattatgctatagctaacttatgtagtcagtactttccagtgaagttgaaaataaagcaaagttccatgtattaaccctgttttccactaacccttctttacatgtaggacatatgccagggtaccaaaaactgcaggaatattccctagcattgcagcctcagttctaataccaaaatctccctgcagactaaatgtctagagcagcactgtatcaatagaacataggggcagatctcataccttccaagggtagaaatcgctgagcacaggtaaaaataaaatattccagagggaaatattattttacaaatttttataaacacttttgtaaaataatgtacacagccttgcacactgaaagagtcaaagccatttaactctgtataaccactgcagaatctttatcttcttttttacctgacttccaattggcgggtgttactaaaactttatcaccaaagttatttcactagctgagcgtggtggctcatgcctgtaatcccaacactttgggaggccaaggcaggtggatcatttgaggccaggagtttgacaccaacctggccaacacggtgaaacctcatctccactaaaaatacaacaaattggctgggtgtggtggcgcatacctgtaatcccagctactcagaaggctgaggcacgagaatcacttgagcctgggaggcataggttgcaatgagtcaagatcgcgccactgcactccagcctgggagacagagcaagactgtctcaatgtctcaaaaaaaaaaaaaaaagttatttcactagcaacatataattaccataaaacaaaggagggttttaaatgaactacacatgcaaaatacactagaaaagctagatatttttaaaaacgtggtgaattatttggtaaagccaaaatattttaattcataagttactattcccccaatgcatctattttgtaaatgctgtttcacatatgaggtttgtaaaaaagcaaaatatatgtataaaatggcgtacataaagatgttctacaaatatagccagaagttattgttttactgtatgcaaagagtgatggcaatttttaattcaaatgtttttaaatatttcgaactgaaactaaatcttaccaatgtaaaattgccacaaagacggctggaaaagagaaaagttattaaaagctgctttattataaaataccattaaaacaagtatttcaaatgtattattttacatgtctagaaaagatagcacagaaagcaagatggccagctaatcctgtctctatgagcataggaaaaaatccaggacacaaagtaaattctgaacagagcttacctctctgcagcagggcttgacaagcaaagggagagacttgagagggtttttttacttcagttaattggtaggagtgatggaattatggaatattgtgaccttttttgtttttctttttagtattctattcctttatatgaaattttttaaagaagtaaatatatacagtatgcttcagctcgttctaaccaagaggngccactctagatcagtttctctagcattcatcagaagacgattaaatgcaggcaatcacttcctcagcagcacatctaaaagccccattgtgcaactcaacccttgatgaattgcaagctctttgcaagcgcccagacttaggaactactagatggcctaggagacttatctggaggcacctgtgccagcaccccatgtatacgtaagacttcaccagggagctgggagacactgctctgggtatggagcttttaccagagctgcaaacgcagcctgtgcccctgtttcgttggggaattgcttgttttcaagggtaccatggagctggagagagaaaagtggggaatagaacaagttaaaacaccacagactttgctgttcttatagaggttcagcagcttttcttgaattaatgccctttagattgttgtaaacctttggttaacttccaaagttttgaagaaaatgattttgataattttccaagtattttcattgtcatcatggaggagtgcatttccttggctattccagaagtcctacctcccttctgagattttataatggtatttcttatggttatcccaaatatacttggcaagtcgtcttataaaccaccaataatagcctcttaaaaattcaaaaattactcctcttggctaacaaaataaatgcaaattaatttaataattgttgaagaaattaaattttttaaaattaaaaaattgcaatgttgaaattctcaaccatgcttatccagaccttttcctatactactaactgccctgggcttatcttaaatacttctcagaagatttacttgttttacaccaggataggcaaagtatggcccacagtgtatttttggactgtctgcaagcacagttgctataatttttaaaaggctgaaaactttaaatttttgtaaatatgctcattaactgtttattaggcttcattaattttaaaatatacagagactatcctattcaactatatttgtatcctatttctaattctcctaacaattatatacactggcaaaaactcttcagatgatatataaggaaaaggtcaaatatactaccgaattcatccagctttccaaagatgctcaaaatctttctgtgtctctcactccctcccttaacccacataccacatctgaaaaaaaatgatatggtgtaacgatgccagtattctaaatgcttgaagggcttatcacatgccctttccaagctgtgacagaagcatgtcccttggaccccggcatcctgtcaatctcacctctgaaggtgacccagtctcatacttcactgaaacaaagaccattagacgccagcactcccgacttcttttatctccactttaacatttctccatatagtaatcctcacttttctactccctgtcatctcagaaaaggaattctctctcctcttttccacagttagcttctcaaatttgtgcctttaattctacccctcccaaatattccaagacttgctccactaattatttcctctcttggaatcttaatctcatcctcttcccttgatccctcccctcagcctttaaaactcctagaccttaaaacactctctgtgatctgacagcccttcaaaccaatatactccc

SEQ ID NO: 313013 - DNA, 2321 bp, Homo sapiens
  misc_feature (1638)..(1638): n is a, c, g, or t
atccaacacgagtaactactaaattaaacgtctgttttagctgatgtctgaaaggccattacctcatagttgattggcaaaatatgagttcataaagaattttcctttctgcttaggaggataaagcaatacaataattaaaggatatctaatatgcaaaagtctatatttagggaaatattaaatattctctttaaaatgttcaaatgtcatacatatgttaatgtatccaatgctttgaaactttataggggcaatatagggatgaaaattaaaaagcagtgactgaggggcctggcataggcaaaatcatagagatagaaaatagagctgagtgtgattagtgtttagtgggtggagtttctgtttgggatagcaaaaagttctggatgtggacagtggtaatagttgcaagacaacacgaatgtacttaatgtcactgaattgtacgcttaaatgataaccattgacatttttctattacaaacttaaatctaaatttcaccataatttaaacaaaaagcaatggctagagtgaggagagtcagcttcaatgcttcagtaggcccccgaccagctgggagcagatctggaagatggacggttgtggtgtcttctaaatgtaaaattgcacaattttggtattcgctatcccatttactcctcacaataattatgtgagatgtgtatggcagaaaactccattttaaagattaagtatcgaaaaacagaaaaatatttaaaaattatatcaaaagtcatctcttaaaagagattatcttgaaatcaaaagagaaccaaataataatcatcatcagtaaaagacccagtaaaacatgggacctcccaactgtagccaaagaaaaagcaatttctgataacatctcatttcattcccctttatcacttcttcagtgctttctttgtcctccttcctcagctactataattcatcttcattatcttaaaaagaagtctgcattaggaaagggtgagagataatgaagtaacagaaaaataatctcaaacactttatattcccccaatgcatctattttgtaaatgctgtttcacatatgaggtttgtaaaaaagcaaaatatatgtataaaatggcgtacataaagatgttctacaaatatagccagaagttattgttttactgtatgcaaagagtgatggcaatttttaattcaaatgtttttaaatatttcgaactgaaactaaatcttaccaatgtaaaattgccacaaagacggctggaaaagagaaaagttattaaaagctgctttattataaaataccattaaaacaagtatttcaaatgtattattttacatgtctagaaaagatagcacagaaagcaagatggccagctaatcctgtctctatgagcataggaaaaaatccaggacacaaagtaaattctgaacagagcttacctctctgcagcagggcttgacaagcaaagggagagacttgagagggtttttttacttcagttaattggtaggagtgatggaattatggaatattgtgaccttttttgtttttctttttagtattctattcctttatatgaaattttttaaagaagtaaatatatacagtatgcttcagctcgttctaaccaagaggngccactctagatcagtttctctagcattcatcagaagacgattaaatgcaggcaatcacttcctcagcagcacatctaaaagccccattgtgcaactcaacccttgatgaattgcaagctctttgcaagcgcccagacttaggaactactagatggcctaggagacttatctggaggcacctgtgccagcaccccatgtatacgtaagacttcaccagggagctgggagacactgctctgggtatggagcttttaccagagctgcaaacgcagcctgtgcccctgtttcgttggggaattgcttgttttcaagggtaccatggagctggagagagaaaagtggggaatagaacaagttaaaacaccacagactttgctgttcttatagaggttcagcagcttttcttgaattaatgccctttagattgttgtaaacctttggttaacttccaaagttttgaagaaaatgattttgataattttccaagtattttcattgtcatcatggaggagtgcatttccttggctattccagaagtcctacctcccttctgagattttataatggtatttcttatggttatcccaaatatacttggcaagtcgtcttataaaccaccaataatagcctcttaaaaattcaaaaattactcctcttggctaacaaaataaatgcaaattaa

SEQ ID NO: 313014 - DNA, 1601 bp, Homo sapiens
  misc_feature (918)..(918): n is a, c, g, or t
gactaaatatcttggttaagagaataaggtcccttaaattacccttatttgggaaaactttaaagatggagacttagataaaaaaaataaaggttgagaatatgtttatcaggggctaaaacagcaccagttggggggcctttttttgtctcaaaaaaaaaaaaaaaagttatttcactagcaacatataattaccataaaacaaaggagggttttaaatgaactacacatgcaaaatacactagaaaagctagatatttttaaaaacgtggtgaattatttggtaaagccaaaatattttaattcataagttactattcccccaatgcatctattttgtaaatgctgtttcacatatgaggtttgtaaaaaagcaaaatatatgtataaaatggcgtacataaagatgttctacaaatatagccagaagttattgttttactgtatgcaaagagtgatggcaatttttaattcaaatgtttttaaatatttcgaactgaaactaaatcttaccaatgtaaaattgccacaaagacggctggaaaagagaaaagttattaaaagctgctttattataaaataccattaaaacaagtatttcaaatgtattattttacatgtctagaaaagatagcacagaaagcaagatggccagctaatcctgtctctatgagcataggaaaaaatccaggacacaaagtaaattctgaacagagcttacctctctgcagcagggcttgacaagcaaagggagagacttgagagggtttttttacttcagttaattggtaggagtgatggaattatggaatattgtgaccttttttgtttttctttttagtattctattcctttatatgaaattttttaaagaagtaaatatatacagtatgcttcagctcgttctaaccaagaggngccactctagatcagtttctctagcattcatcagaagacgattaaatgcaggcaatcacttcctcagcagcacatctaaaagccccattgtgcaactcaacccttgatgaattgcaagctctttgcaagcgcccagacttaggaactactagatggcctaggagacttatctggaggcacctgtgccagcaccccatgtatacgtaagacttcaccagggagctgggagacactgctctgggtatggagcttttaccagagctgcaaacgcagcctgtgcccctgtttcgttggggaattgcttgttttcaagggtaccatggagctggagagagaaaagtggggaatagaacaagttaaaacaccacagactttgctgttcttatagaggttcagcagcttttcttgaattaatgccctttagattgttgtaaacctttggttaacttccaaagttttgaagaaaatgattttgataattttccaagtattttcattgtcatcatggaggagtgcatttccttggctattccagaagtcctacctcccttctgagattttataatggtatttcttatggttatcccaaatatacttggcaagtcgtcttataaaccaccaataatagcctcttaaaaattcaaaaattactcctcttggctaacaaaataaatgcaaattaa

SEQ ID NO: 313015 - DNA, 424 bp, Homo sapiens
tttggtgaggggggtggtgtggtgataaaaagagtagaaaaaaggaaaagaaaaaataaaaaagaaaaaaaaaaaaaaaaaaaaaaaaaaaaaaaaaaaaaaaaaaaaatctacctgctttacagactgtgggaaaagaatctacctgctttacagttgcatgacatggtcacttaagagagtggggacagaaagacatggacctgggtagctttggaaaatggtgttttgactataatctataaaaactacaaaaagaactgcataaacgctgtactctagtgggtaaagtttctcatgggacacaggttgacagttccaacgctgctttatatatgtacaagggttaaacaaatagtgaaggggtggtggatggagagagccaagtttcccacagctggagaggaaagtcaaaggtatgcaa

SEQ ID NO: 313016 - DNA, 806 bp, Homo sapiens
tgatttctagtgattgcatgtaattcattttccagcctgtaggtgtaacataattttttcaactatttacttattactgaattttaaataacactgcagtgaacattattctagttttattgaatgacttccagcaattaactgtgttgaattactaaacatagtagtttctttcaataaatttgtggaatatgttcatcttattagtatctgagtaatttacttcgtggtccagaactgagctaggtgtcagggatacacgtagacataagtattgtagtactaaggataaaacaatgcgtataccaataggaagggatgtcagctacttaagtaaatagactttaattatttagataaaatagacatgaaagaactttagtgtatgcaaatttataaaacatcaaccagcagctgttcatacctctccatgtgtggggtgttgggagtggggcactgagatgcagactgtggcaaaaaaaaaaaaaaaatctacctgctttacagactgtgggaaaagaatctacctgctttacagttgcatgacatggtcacttaagagagtggggacagaaagacatggacctgggtagctttggaaaatggtgttttgactataatctataaaaactacaaaaagaactgcataaacgctgtactctagtgggtaaagtttctcatgggacacaggttgacagttccaacgctgctttatatatgtacaagggttaaacaaatagtgaaggggtggtggatggagagagccaagtttcccacagctggagaggaaagtcaaaggtatgcaa

SEQ ID NO: 313017 - DNA, 6658 bp, Homo sapiens
aaagccctcagcctttgtgtccttctctgcgccggagtggctgcagctcacccctcagctccccttggggcccagctgggagccgagatagaagctcctgtcgccgctgggcttctcgcctcccgcagagggccacacagagaccgggatggccacctccatgggcctgctgctgctgctgctgctgctcctgacccagcccggggcggggacgggagctgacacggaggcggtggtctgcgtggggaccgcctgctacacggcccactcgggcaagctgagcgctgccgaggcccagaaccactgcaaccagaacgggggcaacctggccactgtgaagagcaaggaggaggcccagcacgtccagcgagtactggcccagctcctgaggcgggaggcagccctgacggcgaggatgagcaagttctggattgggctccagcgagagaagggcaagtgcctggaccctagtctgccgctgaagggcttcagctgggtgggcgggggggaggacacgccttactctaactggcacaaggagctccggaactcgtgcatctccaagcgctgtgtgtctctgctgctggacctgtcccagccgctccttcccaaccgcctgcccaagtggtctgagggcccctgtgggagcccaggctcccccggaagtaacattgagggcttcgtgtgcaagttcagcttcaaaggcatgtgccggcctctggccctggggggcccaggtcaggtgacctacaccacccccttccagaccaccagttcctccttggaggctgtgccctttgcctctgcggccaatgtagcctgtggggaaggtgacaaggacgagactcagagtcattatttcctgtgcaaggagaaggcccccgatgtgttcgactggggcagctcgggccccctctgtgtcagccccaagtatggctgcaacttcaacaatgggggctgccaccaggactgctttgaagggggggatggctccttcctctgcggctgccgaccaggattccggctgctggatgacctggtgacctgtgcctctcgaaacccttgcagctccagcccatgtcgtgggggggccacgtgcgtcctgggaccccatgggaaaaactacacgtgccgctgcccccaagggtaccagctggactcgagtcagctggactgtgtggacgtggatgaatgccaggactccccctgtgcccaggagtgtgtcaacacccctgggggcttccgctgcgaatgctgggttggctatgagccgggcggtcctggagagggggcctgtcaggatgtggatgagtgtgctctgggtcgctcgccttgcgcccagggctgcaccaacacagatggctcatttcactgctcctgtgaggagggctacgtcctggccggggaggacgggactcagtgccaggacgtggatgagtgtgtgggcccggggggccccctctgcgacagcttgtgcttcaacacacaagggtccttccactgtggctgcctgccaggctgggtgctggccccaaatggggtctcttgcaccatggggcctgtgtctctgggaccaccatctgggccccccgatgaggaggacaaaggagagaaagaagggagcaccgtgccccgcgctgcaacagccagtcccacaaggggccccgagggcacccccaaggctacacccaccacaagtagaccttcgctgtcatctgacgcccccatcacatctgccccactcaagatgctggcccccagtgggtcctcaggcgtctggagggagcccagcatccatcacgccacagctgcctctggcccccaggagcctgcaggtggggactcctccgtggccacacaaaacaacgatggcactgacgggcaaaagctgcttttattctacatcctaggcaccgtggtggccatcctactcctgctggccctggctctggggctactggtctatcgcaagcggagagcgaagagggaggagaagaaggagaagaagccccagaatgcggcagacagttactcctgggttccagagcgagctgagagcagggccatggagaaccagtacagtccgacacctgggacagactgctgaaagtgaggtggccctagagacactagagtcaccagccaccatcctcagagctttgaactccccattccaaaggggcacccacatttttttgaaagactggactggaatcttagcaaacaattgtaagtctcctccttaaaggccccttggaacatgcaggtattttctacgggtgtttgatgttcctgaagtggaagctgtgtgttggcgtgccacggtggggatttcgtgactctataatgattgttactccccctcccttttcaaattccaatgtgaccaattccggatcagggtgtgaggaggctggggctaaggggctcccctgaatatcttctctgctcacttccaccatctaagaggaaaaggtgagttgctcatgctgattaggattgaaatgatttgtttctcttcctaggatgaaaactaaatcaattaattattcaattaggtaagaagatctggttttttggtcaaagggaacatgttcggactggaaacatttctttacatttgcattcctccatttcgccagcacaagtcttgctaaatgtgatactgttgacatcctccagaatggccagaagtgcaattaacctcttaggtggcaaggaggcaggaagtgcctctttagttcttacatttctaatagccttgggtttatttgcaaaggaagcttgaaaaatatgagaaaagttgcttgaagtgcattacaggtgtttgtgaagtcacataatctacggggctagggcgagagaggccagggatttgttcacagatacttgaattaattcatccaaatgtactgaggttaccacacacttgactacggatgtgatcaacactaacaaggaaacaaattcaaggacaacctgtctttgagccagggcaggcctcagacaccctgcctgtggccccgcctccacttcatcctgcccggaatgccagtgctccgagctcagacagaggaagccctgcagaaagttccatcaggctgtttcctaaaggatgtgtgaacgggagatgatgcactgtgttttgaaagttgtcattttaaagcattttagcacagttcatagtccacagttgatgcagcatcctgagattttaaatcctgaagtgtgggtggcgcacacaccaagtagggagctagtcaggcagtttgcttaaggaacttttgttctctgtctcttttccttaaaattgggggtaaggagggaaggaagagggaaagagatgactaactaaaatcatttttacagcaaaaactgctcaaagccatttaaattatatcctcattttaaaagttacatttgcaaatatttctccctatgataatgtagtcgatagtgtgcactctttctctctctctctctctctcacacacacacacacacacacacacacacacacagagacacggcaccattctgcctggggcactggaacacattcctgggggtcaccgatggtcagagtcactagaagttacctgagtatctctgggaggcctcatgtctcctgtgggctttttaccaccactgtgcaggagaacagacagaggaaatgtgtctccctccaaggccccaaagcctcagagaaagggtgtttctggttttgccttagcaatgcatcggtctctgaggtgacactctggagcggttgaagggccacaaggtgcagggttaatactcttgccagttttgaaatatagatgctatggttcagattgtttttaatagaaaactaaaggggcaggggaagtgaaaggaaagatggaggttttgtgcggctcgatggggcatttggaacttctttttaaagtcatctcatggtctccagttttcagttggaactctggtgtttaacacttaagggagacaaaggctgtgtccatttggcaaaacttccttggccacgagactctaggtgatgtgtgaagctgggcagtctgtggtgtggagagcagccatctgtctggccattcagaggattctaaagacatggctggatgcgctgctgaccaacatcagcacttaaataaatgcaaatgcaacatttctccctctgggccttgaaaatccttgcccttatcatttggggtgaaggagacatttctgtccttggcttcccacagccccaacgcagtctgtgtatgattcctgggatccaacgagccctcctattttcacagtgttctgattgctctcacagcccaggcccatcgtctgttctctgaatgcagccctgttctcaacaacagggaggtcatggaacccctctgtggaacccacaaggggagaaatgggtgataaagaatccagttcctcaaaaccttccctggcaggctgggtccctctcctgctgggtggtgctttctcttgcacaccactcccaccacggggggagagccagcaacccaaccagacagctcaggttgtgcatctgatggaaaccactgggctcaaacacgtgctttattctcctgtttatttttgctgttactttgaagcatggaaattcttgtttgggggatcttggggctacagtagtgggtaaacaaatgcccaccggccaagaggccattaacaaatcgtccttgtcctgaggggccccagcttgctcgggcgtggcacagtggggaatccaagggtcacagtatggggagaggtgcaccctgccacctgctaacttctcgctagacacagtgtttctgcccaggtgacctgttcagcagcagaacaagccagggccatggggacgggggaagttttcacttggagatggacaccaagacaatgaagatttgttgtccaaataggtcaataattctgggagactcttggaaaaaactgaatatattcaggaccaactctctccctcccctcatcccacatctcaaagcagacaatgtaaagagagaacatctcacacacccagctcgccatgcctactcattcctgaatttcaggtgccatcactgctctttctttcttctttgtcatttgagaaaggatgcaggaggacaattcccacagataatctgaggaatgcagatgtagagggactccacccctgctcaacagcttggcttccaggcaagaccaaccacatctggtctctgccttcggtggcccacacacctaagcgtcatcgtcattgccatagcatcatgatgcaacacatctacgtgtagcactacgacgttatgtttgggtaatgtggggatgaactgcatgaggctctgattaaggatgtggggaagtgggctgcggtcactgtcggccttgcaaggccacctggaggcctgtctgttagccagtggtggaggagcaaggcttcaggaagggccagccacatgccatcttccctgcgatcaggcaaaaaagtggaattaaaaagtcaaacctttatatgcatgtgttatgtccattttgcaggatgaactgagtttaaaagaatttttttttctcttcaagttgctttgtcttttccatcctcatcacaagcccttgtttgagtgtcttatccctgagcaatctttcgatggatggagatgatcattaggtacttttgtttcaacctttattcctgtaaatatttctgtgaaaactaggagaacagagatgagatttgacaaaaaaaaattgaattaaaaataacacagtctttttaaaactaacataggaaagcctttcctattatttctcttcttagcttctccattgtctaaatcaggaaaacaggaaaacacagctttctagcagctgcaaaatggtttaatgccccctacatatttccatcaccttgaacaatagctttagcttgggaatctgagatatgatcccagaaaacatctgtctctacttcggctgcaaaacccatggtttaaatctatatggtttgtgcattttctcaactaaaaatagagatgataatccgaattctccatatattcactaatcaaagacactattttcatactagattcctgagacaaatactcactgaagggcttgtttaaaaataaattgtgttttggtctgttcttgtagataatgcccttctattttaggtagaagctctggaatccctttattgtgctgttgctcttatctgcaaggtggcaagcagttcttttcagcagattttgcccactattcctctgagctgaagttctttgcatagatttggcttaagcttgaattagatccctgcaaaggcttgctctgtgatgtcagatgtaattgtaaatgtcagtaatcacttcatgaacgctaaatgagaatgtaagtatttttaaatgtgtgtatttcaaatttgtttgactaattctggaattacaagatttctatgcaggatttaccttcatcctgtgcatgtttcccaaactgtgaggagggaaggctcagagatcgagcttctcctctgagttctaacaaaatggtgctttgagggtcagcctttaggaaggtgcagctttgttgtcctttgagctttctgttatgtgcctatcctaataaactcttaaacacattgattgtgaaaaag

SEQ ID NO: 313018 - DNA, 6712 bp, Homo sapiens
aaagccctcagcctttgtgtccttctctgcgccggagtggctgcagctcacccctcagctccccttggggcccagctgggagccgagatagaagctcctgtcgccgctgggcttctcgcctcccgcagagggccacacagagaccgggatggccacctccatgggcctgctgctgctgctgctgctgctcctgacccagcccggggcggggacgggagctgacacggaggcggtggtctgcgtggggaccgcctgctacacggcccactcgggcaagctgagcgctgccgaggcccagaaccactgcaaccagaacgggggcaacctggccactgtgaagagcaaggaggaggcccagcacgtccagcgagtactggcccagctcctgaggcgggaggcagccctgacggcgaggatgagcaagttctggattgggctccagcgagagaagggcaagtgcctggaccctagtctgccgctgaagggcttcagctgggtgggcgggggggaggacacgccttactctaactggcacaaggagctccggaactcgtgcatctccaagcgctgtgtgtctctgctgctggacctgtcccagccgctccttcccaaccgcctgcccaagtggtctgagggcccctgtgggagcccaggctcccccggaagtaacattgagggcttcgtgtgcaagttcagcttcaaaggcatgtgccggcctctggccctggggggcccaggtcaggtgacctacaccacccccttccagaccaccagttcctccttggaggctgtgccctttgcctctgcggccaatgtagcctgtggggaaggtgacaaggacgagactcagagtcattatttcctgtgcaaggagaaggcccccgatgtgttcgactggggcagctcgggccccctctgtgtcagccccaagtatggctgcaacttcaacaatgggggctgccaccaggactgctttgaagggggggatggctccttcctctgcggctgccgaccaggattccggctgctggatgacctggtgacctgtgcctctcgaaacccttgcagctccagcccatgtcgtgggggggccacgtgcgtcctgggaccccatgggaaaaactacacgtgccgctgcccccaagggtaccagctggactcgagtcagctggactgtgtggacgtggatgaatgccaggactccccctgtgcccaggagtgtgtcaacacccctgggggcttccgctgcgaatgctgggttggctatgagccgggcggtcctggagagggggcctgtcaggatgtggatgagtgtgctctgggtcgctcgccttgcgcccagggctgcaccaacacagatggctcatttcactgctcctgtgaggagggctacgtcctggccggggaggacgggactcagtgccaggacgtggatgagtgtgtgggcccggggggccccctctgcgacagcttgtgcttcaacacacaagggtccttccactgtggctgcctgccaggctgggtgctggccccaaatggggtctcttgcaccatggggcctgtgtctctgggaccaccatctgggccccccgatgaggaggacaaaggagagaaagaagggagcaccgtgccccgcgctgcaacagccagtcccacaaggggccccgagggcacccccaaggctacacccaccacaagtagaccttcgctgtcatctgacgcccccatcacatctgccccactcaagatgctggcccccagtgggtcctcaggcgtctggagggagcccagcatccatcacgccacagctgcctctggcccccaggagcctgcaggtggggactcctccgtggccacacaaaacaacgatggcactgacgggcaaaagctgcttttattctacatcctaggcaccgtggtggccatcctactcctgctggccctggctctggggctactggtctatcgcaagcggagagcgaagagggaggagaagaaggagaagaagccccagaatgcggcagacagttactcctgggttccagagcgagctgagagcagggccatggagaaccagtacagtccgacacctgggacagactgctgaaagtgaggtggccctagagacactagagtcaccagccaccatcctcagagctttgaactccccattccaaaggggcacccacatttttttgaaagactggactggaatcttagcaaacaattgtaagtctcctccttaaaggccccttggaacatgcaggtattttctacgggtgtttgatgttcctgaagtggaagctgtgtgttggcgtgccacggtggggatttcgtgactctataatgattgttactccccctcccttttcaaattccaatgtgaccaattccggatcagggtgtgaggaggctggggctaaggggctcccctgaatatcttctctgctcacttccaccatctaagaggaaaaggtgagttgctcatgctgattaggattgaaatgatttgtttctcttcctaggatgaaaactaaatcaattaattattcaattaggtaagaagatctggttttttggtcaaagggaacatgttcggactggaaacatttctttacatttgcattcctccatttcgccagcacaagtcttgctaaatgtgatactgttgacatcctccagaatggccagaagtgcaattaacctcttaggtggcaaggaggcaggaagtgcctctttagttcttacatttctaatagccttgggtttatttgcaaaggaagcttgaaaaatatgagaaaagttgcttgaagtgcattacaggtgtttgtgaagtcacataatctacggggctagggcgagagaggccagggatttgttcacagatacttgaattaattcatccaaatgtactgaggttaccacacacttgactacggatgtgatcaacactaacaaggaaacaaattcaaggacaacctgtctttgagccagggcaggcctcagacaccctgcctgtggccccgcctccacttcatcctgcccggaatgccagtgctccgagctcagacagaggaagccctgcagaaagttccatcaggctgtttcctaaaggatgtgtgaacgggagatgatgcactgtgttttgaaagttgtcattttaaagcattttagcacagttcatagtccacagttgatgcagcatcctgagattttaaatcctgaagtgtgggtggcgcacacaccaagtagggagctagtcaggcagtttgcttaaggaacttttgttctctgtctcttttccttaaaattgggggtaaggagggaaggaagagggaaagagatgactaactaaaatcatttttacagcaaaaactgctcaaagccatttaaattatatcctcattttaaaagttacatttgcaaatatttctccctatgataatgtagtcgatagtgtgcactctttctctctctctctctctctcacacacacacacacacacacacacacacacacagagacacggcaccattctgcctggggcactggaacacattcctgggggtcaccgatggtcagagtcactagaagttacctgagtatctctgggaggcctcatgtctcctgtgggctttttaccaccactgtgcaggagaacagacagaggaaatgtgtctccctccaaggccccaaagcctcagagaaagggtgtttctggttttgccttagcaatgcatcggtctctgaggtgacactctggagcggttgaagggccacaaggtgcagggttaatactcttgccagttttgaaatatagatgctatggttcagattgtttttaatagaaaactaaaggggcaggggaagtgaaaggaaagatggaggttttgtgcggctcgatggggcatttggaacttctttttaaagtcatctcatggtctccagttttcagttggaactctggtgtttaacacttaagggagacaaaggctgtgtccatttggcaaaacttccttggccacgagactctaggtgatgtgtgaagctgggcagtctgtggtgtggagagcagccatctgtctggccattcagaggattctaaagacatggctggatgcgctgctgaccaacatcagcacttaaataaatgcaaatgcaacatttctccctctgggccttgaaaatccttgcccttatcatttggggtgaaggagacatttctgtccttggcttcccacagccccaacgcagtctgtgtatgattcctgggatccaacgagccctcctattttcacagtgttctgattgctctcacagcccaggcccatcgtctgttctctgaatgcagccctgttctcaacaacagggaggtcatggaacccctctgtggaacccacaaggggagaaatgggtgataaagaatccagttcctcaaaaccttccctggcaggctgggtccctctcctgctgggtggtgctttctcttgcacaccactcccaccacggggggagagccagcaacccaaccagacagctcaggttgtgcatctgatggaaaccactgggctcaaacacgtgctttattctcctgtttatttttgctgttactttgaagcatggaaattcttgtttgggggatcttggggctacagtagtgggtaaacaaatgcccaccggccaagaggccattaacaaatcgtccttgtcctgaggggccccagcttgctcgggcgtggcacagtggggaatccaagggtcacagtatggggagaggtgcaccctgccacctgctaacttctcgctagacacagtgtttctgcccaggtgacctgttcagcagcagaacaagccagggccatggggacgggggaagttttcacttggagatggacaccaagacaatgaagatttgttgtccaaataggtcaataattctgggagactcttggaaaaaactgaatatattcaggaccaactctctccctcccctcatcccacatctcaaagcagacaatgtaaagagagaacatctcacacacccagctcgccatgcctactcattcctgaatttcaggtgccatcactgctctttctttcttctttgtcatttgagaaaggatgcaggaggacaattcccacagataatctgaggaatgcagaaaaaccagggcaggacagttatcgacaatgcattagaacttggtgagcatcctctgtagagggactccacccctgctcaacagcttggcttccaggcaagaccaaccacatctggtctctgccttcggtggcccacacacctaagcgtcatcgtcattgccatagcatcatgatgcaacacatctacgtgtagcactacgacgttatgtttgggtaatgtggggatgaactgcatgaggctctgattaaggatgtggggaagtgggctgcggtcactgtcggccttgcaaggccacctggaggcctgtctgttagccagtggtggaggagcaaggcttcaggaagggccagccacatgccatcttccctgcgatcaggcaaaaaagtggaattaaaaagtcaaacctttatatgcatgtgttatgtccattttgcaggatgaactgagtttaaaagaatttttttttctcttcaagttgctttgtcttttccatcctcatcacaagcccttgtttgagtgtcttatccctgagcaatctttcgatggatggagatgatcattaggtacttttgtttcaacctttattcctgtaaatatttctgtgaaaactaggagaacagagatgagatttgacaaaaaaaaattgaattaaaaataacacagtctttttaaaactaacataggaaagcctttcctattatttctcttcttagcttctccattgtctaaatcaggaaaacaggaaaacacagctttctagcagctgcaaaatggtttaatgccccctacatatttccatcaccttgaacaatagctttagcttgggaatctgagatatgatcccagaaaacatctgtctctacttcggctgcaaaacccatggtttaaatctatatggtttgtgcattttctcaactaaaaatagagatgataatccgaattctccatatattcactaatcaaagacactattttcatactagattcctgagacaaatactcactgaagggcttgtttaaaaataaattgtgttttggtctgttcttgtagataatgcccttctattttaggtagaagctctggaatccctttattgtgctgttgctcttatctgcaaggtggcaagcagttcttttcagcagattttgcccactattcctctgagctgaagttctttgcatagatttggcttaagcttgaattagatccctgcaaaggcttgctctgtgatgtcagatgtaattgtaaatgtcagtaatcacttcatgaacgctaaatgagaatgtaagtatttttaaatgtgtgtatttcaaatttgtttgactaattctggaattacaagatttctatgcaggatttaccttcatcctgtgcatgtttcccaaactgtgaggagggaaggctcagagatcgagcttctcctctgagttctaacaaaatggtgctttgagggtcagcctttaggaaggtgcagctttgttgtcctttgagctttctgttatgtgcctatcctaataaactcttaaacacattgattgtgaaaaag

SEQ ID NO: 313019 - DNA, 5374 bp, Homo sapiens
aaagccctcagcctttgtgtccttctctgcgccggagtggctgcagctcacccctcagctccccttggggcccagctgggagccgagatagaagctcctgtcgccgctgggcttctcgcctcccgcagagggccacacagagaccgggatggccacctccatgggcctgctgctgctgctgctgctgctcctgacccagcccggggcggggacgggagctgacacggaggcggtggtctgcgtggggaccgcctgctacacggcccactcgggcaagctgagcgctgccgaggcccagaaccactgcaaccagaacgggggcaacctggccactgtgaagagcaaggaggaggcccagcacgtccagcgagtactggcccagctcctgaggcgggaggcagccctgacggcgaggatgagcaagttctggattgggctccagcgagagaagggcaagtgcctggaccctagtctgccgctgaagggcttcagctgggtgggcgggggggaggacacgccttactctaactggcacaaggagctccggaactcgtgcatctccaagcgctgtgtgtctctgctgctggacctgtcccagccgctccttcccaaccgcctgcccaagtggtctgagggcccctgtgggagcccaggctcccccggaagtaacattgagggcttcgtgtgcaagttcagcttcaaaggcatgtgccggcctctggccctggggggcccaggtcaggtgacctacaccacccccttccagaccaccagttcctccttggaggctgtgccctttgcctctgcggccaatgtagcctgtggggaaggtgacaaggacgagactcagagtcattatttcctgtgcaaggagaaggcccccgatgtgttcgactggggcagctcgggccccctctgtgtcagccccaagtatggctgcaacttcaacaatgggggctgccaccaggactgctttgaagggggggatggctccttcctctgcggctgccgaccaggattccggctgctggatgacctggtgacctgtgcctctcgaaacccttgcagctccagcccatgtcgtgggggggccacgtgcgtcctgggaccccatgggaaaaactacacgtgccgctgcccccaagggtaccagctggactcgagtcagctggactgtgtggacgtggatgaatgccaggactccccctgtgcccaggagtgtgtcaacacccctgggggcttccgctgcgaatgctgggttggctatgagccgggcggtcctggagagggggcctgtcaggatgtggatgagtgtgctctgggtcgctcgccttgcgcccagggctgcaccaacacagatggctcatttcactgctcctgtgaggagggctacgtcctggccggggaggacgggactcagtgccaggacgtggatgagtgtgtgggcccggggggccccctctgcgacagcttgtgcttcaacacacaagggtccttccactgtggctgcctgccaggctgggtgctggccccaaatggggtctcttgcaccatggggcctgtgtctctgggaccaccatctgggccccccgatgaggaggacaaaggagagaaagaagggagcaccgtgccccgcgctgcaacagccagtcccacaaggggccccgagggcacccccaaggctacacccaccacaagtagaccttcgctgtcatctgacgcccccatcacatctgccccactcaagatgctggcccccagtgggtcctcaggcgtctggagggagcccagcatccatcacgccacagctgcctctggcccccaggagcctgcaggtggggactcctccgtggccacacaaaacaacgatggcactgacgggcaaaagctgcttttattctacatcctaggcaccgtggtggccatcctactcctgctggccctggctctggggctactggtctatcgcaagcggagagcgaagagggaggagaagaaggagaagaagccccagaatgcggcagacagttactcctgggttccagagcgagctgagagcagggccatggagaaccagtacagtccgacacctgggacagactgctgaaagtgaggtggccctagagacactagagtcaccagccaccatcctcagagctttgaactccccattccaaaggggcacccacatttttttgaaagactggactggaatcttagcaaacaattgtaagtctcctccttaaaggccccttggaacatgcaggtattttctacgggtgtttgatgttcctgaagtggaagctgtgtgttggcgtgccacggtggggatttcgtgactctataatgattgttactccccctcccttttcaaattccaatgtgaccaattccggatcagggtgtgaggaggctggggctaaggggctcccctgaatatcttctctgctcacttccaccatctaagaggaaaaggtgagttgctcatgctgattaggattgaaatgatttgtttctcttcctaggatgaaaactaaatcaattaattattcaattaggtaagaagatctggttttttggtcaaagggaacatgttcggactggaaacatttctttacatttgcattcctccatttcgccagcacaagtcttgctaaatgtgatactgttgacatcctccagaatggccagaagtgcaattaacctcttaggtggcaaggaggcaggaagtgcctctttagttcttacatttctaatagccttgggtttatttgcaaaggaagcttgaaaaatatgagaaaagttgcttgaagtgcattacaggtgtttgtgaagtcacataatctacggggctagggcgagagaggccagggatttgttcacagatacttgaattaattcatccaaatgtactgaggttaccacacacttgactacggatgtgatcaacactaacaaggaaacaaattcaaggacaacctgtctttgagccagggcaggcctcagacaccctgcctgtggccccgcctccacttcatcctgcccggaatgccagtgctccgagctcagacagaggaagccctgcagaaagttccatcaggctgtttcctaaaggatgtgtgaacgggagatgatgcactgtgttttgaaagttgtcattttaaagcattttagcacagttcatagtccacagttgatgcagcatcctgagattttaaatcctgaagtgtgggtggcgcacacaccaagtagggagctagtcaggcagtttgcttaaggaacttttgttctctgtctcttttccttaaaattgggggtaaggagggaaggaagagggaaagagatgactaactaaaatcatttttacagcaaaaactgctcaaagccatttaaattatatcctcattttaaaagttacatttgcaaatatttctccctatgataatgtagtcgatagtgtgcactctttctctctctctctctctctcacacacacacacacacagcagaacaagccagggccatggggacgggggaagttttcacttggagatggacaccaagacaatgaagatttgttgtccaaataggtcaataattctgggagactcttggaaaaaactgaatatattcaggaccaactctctccctcccctcatcccacatctcaaagcagacaatgtaaagagagaacatctcacacacccagctcgccatgcctactcattcctgaatttcaggtgccatcactgctctttctttcttctttgtcatttgagaaaggatgcaggaggacaattcccacagataatctgaggaatgcagaaaaaccagggcaggacagttatcgacaatgcattagaacttggtgagcatcctctgtagagggactccacccctgctcaacagcttggcttccaggcaagaccaaccacatctggtctctgccttcggtggcccacacacctaagcgtcatcgtcattgccatagcatcatgatgcaacacatctacgtgtagcactacgacgttatgtttgggtaatgtggggatgaactgcatgaggctctgattaaggatgtggggaagtgggctgcggtcactgtcggccttgcaaggccacctggaggcctgtctgttagccagtggtggaggagcaaggcttcaggaagggccagccacatgccatcttccctgcgatcaggcaaaaaagtggaattaaaaagtcaaacctttatatgcatgtgttatgtccattttgcaggatgaactgagtttaaaagaatttttttttctcttcaagttgctttgtcttttccatcctcatcacaagcccttgtttgagtgtcttatccctgagcaatctttcgatggatggagatgatcattaggtacttttgtttcaacctttattcctgtaaatatttctgtgaaaactaggagaacagagatgagatttgacaaaaaaaaattgaattaaaaataacacagtctttttaaaactaacataggaaagcctttcctattatttctcttcttagcttctccattgtctaaatcaggaaaacaggaaaacacagctttctagcagctgcaaaatggtttaatgccccctacatatttccatcaccttgaacaatagctttagcttgggaatctgagatatgatcccagaaaacatctgtctctacttcggctgcaaaacccatggtttaaatctatatggtttgtgcattttctcaactaaaaatagagatgataatccgaattctccatatattcactaatcaaagacactattttcatactagattcctgagacaaatactcactgaagggcttgtttaaaaataaattgtgttttggtctgttcttgtagataatgcccttctattttaggtagaagctctggaatccctttattgtgctgttgctcttatctgcaaggtggcaagcagttcttttcagcagattttgcccactattcctctgagctgaagttctttgcatagatttggcttaagcttgaattagatccctgcaaaggcttgctctgtgatgtcagatgtaattgtaaatgtcagtaatcacttcatgaacgctaaatgagaatgtaagtatttttaaatgtgtgtatttcaaatttgtttgactaattctggaattacaagatttctatgcaggatttaccttcatcctgtgcatgtttcccaaactgtgaggagggaaggctcagagatcgagcttctcctctgagttctaacaaaatggtgctttgagggtcagcctttaggaaggtgcagctttgttgtcctttgagctttctgttatgtgcctatcctaataaactcttaaacacattgattgtgaaaaag

SEQ ID NO: 313020 - DNA, 208 bp, Homo sapiens
tgtgtgtttgtacttgtttgagtgcccgttttcagttcctctgggtgtatacacctaggaatggaattgcaggctcatacaataattttctgtttagctttctgaggaactgctaagccgttttccagtggctgtatcctgtcataggtccaccagcaatgtgtgagggttcctgtttctccagatcctcagcaatgcttgttttctg

SEQ ID NO: 313021 - DNA, 383 bp, Homo sapiens
  misc_feature (307)..(307): n is a, c, g, or t
gattttgtgttgctttgttaaatcatcttattttcattggaagcaactgttttcagcaccttttatatgtaaggaagtaccaatatactttttaaaatttggttatttttgaagtttgttttctttttatttagcaggacagatttggtgatggtattatactcacttgataactattttcttcagatttcactatatcacacagttttcttctgtcctgaaaaatttttgttgagaatccactggctatctcataagagtattcttgcaaataatatcactttttttttttttttttttgatattntagagatattttagcggagtgaaatcgcgccatttcactccggcctggggaacaacagtgaaactccatctcaaaa

SEQ ID NO: 313022 - DNA, 1375 bp, Homo sapiens
  misc_feature (236)..(236): n is a, c, g, or t
tacgtagtgggcgcggaagtgggaggctctactcggcggtgggcggcccgcgattaagcttgcgtgattagcgatactatttatagcgagagtgtactgggattcacggcgcaaaaatccggccccgaggccgtcgtaagttttcgctcggaaagcagcgtgtccaatcaggcacgcagcttgagcggagaggacggcttccgggatgtggcgggatttgtccgcttctttgtctntggctgccgctggaactccgggtctcgtcttcactgctctgtgtcctctgctcctagaggcccagcctctggtcctgtgacctgcaggtattgggaatccacagctaagacgccgggacaccctggaagcctagaaatggacaacctgaggtatggagtgtatcctgtcaagggggcaagtggataccctggggctgagaggaatcttctggagtactcttattttgaaaaggggccgttgacatttagggatgtggtcatagaattctctcaggaggagtggcaatgcctggacactgctcagcaagatttgtataggaaagtgatgttagagaacttcagaaacctggtgttcttgggtattgatgtctctaagccagatctgatcacctgtctggagcaaggaaaagatccctggaatatgaagagacacagtatggtagccacacccccagatggagtttcactgttgttccccaggccggagtgaaatggcgcgatttcacctcgctgtgtcccaggttcaagcagttctcctacctcagcctcccgagtagctgggattacgggcatatgccaccacacccagctaagtttgtatttttagtagagacagggtttctccatgttggtcaggctagtctcgatctcctgacctcaggtgattcacccacctcagcttcccaaagtgccgggattacaagcttgagctaccgcgcccagccaacacatcacttttatcttgcagctcccgagattctcttttctgtgacttttaaaattgtgcttacatatgtgtttgatataaatatctttgtattctagtttgtttgttcagcttcttcatttttacatcactttttaaaagatttctgttattttttatattttttacctccataatttctgtttttccaatattttaaatatttctgttcttatttccagttttctgattttctgtagttctctgtgttcatattttactcattgagtattcaatttattttgtttttaaaattaatgtatacattttttatttctttctgaaaaatttataataattttgttggtactacattgccctgttttgtatatattctaatcttttattaaaatttgcacattaaaaaaaaaaa

SEQ ID NO: 313023 - DNA, 990 bp, Homo sapiens
  misc_feature (236)..(236): n is a, c, g, or t
tacgtagtgggcgcggaagtgggaggctctactcggcggtgggcggcccgcgattaagcttgcgtgattagcgatactatttatagcgagagtgtactgggattcacggcgcaaaaatccggccccgaggccgtcgtaagttttcgctcggaaagcagcgtgtccaatcaggcacgcagcttgagcggagaggacggcttccgggatgtggcgggatttgtccgcttctttgtctntggctgccgctggaactccgggtctcgtcttcactgctctgtgtcctctgctcctagaggcccagcctctggtcctgtgacctgcaggtattgggaatccacagctaagacgccgggacaccctggaagcctagaaatggacaacctgaggtatggagtgtatcctgtcaagggggcaagtggataccctggggctgagaggaatcttctggagtactcttattttgaaaaggggccgttgacatttagggatgtggtcatagaattctctcaggaggagtggcaatgcctggacactgctcagcaagatttgtataggaaagtgatgttagagaacttcagaaacctggtgttcttgggtattgatgtctctaagccagatctgatcacctgtctggagcaaggaaaagatccctggaatatgaagagacacagtatggtagccacacccccaggcatattctttgtggtacgtgggggattacataaaacctttaagagatacaatgtatttcagtctagttaaaaatgaacttttgttgcatgcaaaaattttttctcattacatatgttctcagatttgttcttgatgttgctaattatatttttatatgtatatttattaacatgtttataatgatttctatgcctttatctttcaaattttggggaataattaaaaatttcttctgtgccattatgataatgctaagaaatgtatttttgtgtatgtgcgtatctttcccagaaaata

SEQ ID NO: 313024 - DNA, 902 bp, Homo sapiens
  misc_feature (236)..(236): n is a, c, g, or t
  misc_feature (898)..(898): n is a, c, g, or t
tacgtagtgggcgcggaagtgggaggctctactcggcggtgggcggcccgcgattaagcttgcgtgattagcgatactatttatagcgagagtgtactgggattcacggcgcaaaaatccggccccgaggccgtcgtaagttttcgctcggaaagcagcgtgtccaatcaggcacgcagcttgagcggagaggacggcttccgggatgtggcgggatttgtccgcttctttgtctntggctgccgctggaactccgggtctcgtcttcactgctctgtgtcctctgctcctagaggcccagcctctggtcctgtgacctgcaggtattgggaatccacagctaagacgccgggacaccctggaagcctagaaatggacaacctgaggtatggagtgtatcctgtcaagggggcaagtggataccctggggctgagaggaatcttctggagtactcttattttgaaaaggggccgttgacatttagggatgtggtcatagaattctctcaggaggagtggcaatgcctggacactgctcagcaagatttgtataggaaagtgatgttagagaacttcagaaacctggtgttcttgggtattgatgtctctaagccagatctgatcacctgtctggagcaaggaaaagatccctggaatatgaagagacacagtatggtagccacacccccagatggagtttcactgttgttccccaggccggagtgaaatggcgcgatttcacctcgctgtgtcccaggttcaagcagttctcctacctcagcctcccagctactcaggaggctgaggcaggagaatcgcttgaacctgggaggtggaagttgcagtgagctgagatcacgccattgcactccagcctgggcaacaagcgaaactctgntctc

SEQ ID NO: 313025 - DNA, 1230 bp, Homo sapiens
  misc_feature (236)..(236): n is a, c, g, or t
  misc_feature (1126)..(1126): n is a, c, g, or t
tacgtagtgggcgcggaagtgggaggctctactcggcggtgggcggcccgcgattaagcttgcgtgattagcgatactatttatagcgagagtgtactgggattcacggcgcaaaaatccggccccgaggccgtcgtaagttttcgctcggaaagcagcgtgtccaatcaggcacgcagcttgagcggagaggacggcttccgggatgtggcgggatttgtccgcttctttgtctntggctgccgctggaactccgggtctcgtcttcactgctctgtgtcctctgctcctagaggcccagcctctggtcctgtgacctgcaggtattgggaatccacagctaagacgccgggacaccctggaagcctagaaatggacaacctgaggtatggagtgtatcctgtcaagggggcaagtggataccctggggctgagaggaatcttctggagtactcttattttgaaaaggggccgttgacatttagggatgtggtcatagaattctctcaggaggagtggcaatgcctggacactgctcagcaagatttgtataggaaagtgatgttagagaacttcagaaacctggtgttcttgggtattgatgtctctaagccagatctgatcacctgtctggagcaaggaaaagatccctggaatatgaagagacacagtatggtagccacacccccagaaagtggggtattgaaatttcctactataattatattgctgtctaggtgtttcttccagtctgtcaatatttgctttatatatttggaaccttagtgtgacatacacacagacacacagacgtgcacacacacacacacacacacaaaatttgtcataggttcccagttaataaatctattattgtttaatgtctttctttgtctctttgcagttttgacttaaagtactttatgtaagatatgacagtttttgacttaagatgtagcttttgtaatactattttgacctcttctgctctcatttgggttaatatttgcatgcaatgtctaaatctatcttgccaccttcagtatgtttttaatcattaggatgtcagctgacccttgtaggaaaggcaaattgggatcttgggtttttaattaattttaaaatnaaatttctttattggaaagtatgtctcttggattgggaaagttttctggaaaccaaaggggacttaccaattttttttgttgttctatttgattcttgcatctt

SEQ ID NO: 313026 - DNA, 821 bp, Homo sapiens
  misc_feature (236)..(236): n is a, c, g, or t
tacgtagtgggcgcggaagtgggaggctctactcggcggtgggcggcccgcgattaagcttgcgtgattagcgatactatttatagcgagagtgtactgggattcacggcgcaaaaatccggccccgaggccgtcgtaagttttcgctcggaaagcagcgtgtccaatcaggcacgcagcttgagcggagaggacggcttccgggatgtggcgggatttgtccgcttctttgtctntggctgccgctggaactccgggtctcgtcttcactgctctgtgtcctctgctcctagaggcccagcctctggtcctgtgacctgcaggtattgggaatccacagctaagacgccgggacaccctggaagcctagaaatggacaacctgaggtatggagtgtatcctgtcaagggggcaagtggataccctggggctgagaggaatcttctggagtactcttattttgaaaagacggagtttcgctcttgttgcccaggctggagtgcaatggcgcgatctcagctcacctcaacctccgcctcccgggttcaagcgattctcctgcctcagcctcccgagtagctgggattacaggcatgcaccaccaccctggctaattttgtatttttagtagagacggggtttctccatgttggtcaggctggtcttgaactcccgacctcaggtgacctacctacctcgacctcccaaaatgctgggattacaggcatgagccaccgtgccaggccaaggctatgtttttaaggtgaagaattgaagatgcattttagaaatgagacaaactatattcctttcaagggctg

SEQ ID NO: 313027 - DNA, 216 bp, Homo sapiens
gcacaaaggttcaatttcaaagcattatttactacagtgttgtttctaggcagttacatggatcacctatgctcactaaattcattataatggtgaacaaaacacctagggacagaatagcaagcccaacttacagtcccccacaaaagctaaaattcatgtcattgactagagtgactgcaacggatcaggagctgaaagaggacaggaaaattt

SEQ ID NO: 313028 - DNA, 297 bp, Homo sapiens
gtgatccacccaccttggcttcccaaagtgctagtattacagacatgaaccactgcacctggccccctgtctgttaaacgggcaattccatgcccacctcctctggctgttatgagaattaaatgaaaataaggacaagtcccagcagacttcgtaaactgtcaagtgctacacagacgccagcactgctctgtgtctgtgaggctcacacgttctaactaagcagaggagtcaaaactccagctcctgtctcgtcaatatcttggtgaaacacagacctggattcaaatcttgcct

SEQ ID NO: 313029 - DNA, 817 bp, Homo sapiens
gtaaagtaattccaaaaattaaataagaatacacattgttcagttgctaagaaaaatgcattctaacagtacaaatgaagtccagagtcagatcttttctcaaaatacttggcatatcaacacattacacataaacaaataaaaaccagtcctgtccctcatgataatgggtttctaatgtgatgtattcttgcaatctgaaacaccttataaagctgtattttcctgattgatgttggaaaaagcattcccaaaatgtgaattattgtttttatgaatagttacggaggatgtgatgacaatatgccagataatctatgtaattctttattcctggatacaagcacatggtggactgttttctcacaaccgattaaaattggatttatttttgcatgagaattgtaagggagccacaaccatgagtagtaacataattaatatacagtgtcaatattttatatttaatgagacatttattctataatcagttcttatttataaagaggcgcaaatcaatttcaacctgtaattacctctgtgctttgtgactcaggcacaatctaaacccagcttaatgaatcaaagagatgtttcttggcaagatattttcattaaagttatttggaaagggcaattaactgcaaaagggacttttttttttttaactgacaagatactatctaaactaatagtttaaaataacattgcttttatgtcaaagcactttggtaacttggcctcacatgctgacagttttggctaaatattacaaatcttgatcccagaagagcaagagagaaagttttactaatat

SEQ ID NO: 313030 - DNA, 2209 bp, Homo sapiens
ccccttcctgtggggttcattggggcatcccctttctgctgcaggaacctctcatcagaccgcctgagggaagcggcgcccggagacccgccccggcccggtccacattctccccaggaagccggactctatggggcgggaccctgggggagcctgagccgagcccggagccagccccgaacccctgaacctccagccaggggcgccccgggagcagccagcccgtgggcgagccgcccgcccgccgagcagccatgagcgagacggtcatctgttccagccgggccactgtgatgctttatgatgatggcaacaagcgatggctccctgctggcacgggtccccaggccttcagccgcgtccagatctaccacaaccccacggccaattcctttcgcgtcgtgggccggaagatgcagcccgaccagcaggtggtcatcaactgtgccatcgtccggggtgtcaagtataaccaggccacccccaacttccatcagtggcgcgacgctcgccaggtctggggcctcaacttcggcagcaaggaggatgcggcccagtttgccgccggcatggccagtgccctagaggcgttggaaggaggtgggccccctccacccccagcacttcccacctggtcggtcccgaacggcccctccccggaggaggtggagcagcagaaaaggcagcagcccggcccgtcggagcacatagagcgccgggtctccaatgcaggaggcccacctgctccccccgctgggggtccacccccaccaccaggacctccccctcctccaggtccccccccacccccaggtttgcccccttcgggggtcccagctgcagcgcacggagcagggggaggaccaccccctgcaccccctctcccggcagcacagggccctggtggtgggggagctggggccccaggcctggccgcagctattgctggagccaaactcaggaaagtcagcaagcaggaggaggcctcaggggggcccacagcccccaaagctgagagtggtcgaagcggaggtgggggactcatggaagagatgaacgccatgctggcccggagaaggaaagccacgcaagttggggagaaaacccccaaggatgaatctgccaatcaggaggagccagaggccagagtcccggcccagagtgaatctgtgcggagaccctgggagaagaacagcacaaccttgccaaggatgaagtcgtcttcttcggtgaccacttccgagacccaaccctgcacgcccagctccagtgattactcggacctacagagggtgaaacaggagcttctggaagaggtgaagaaggaattgcagaaagtgaaagaggaaatcattgaagccttcgtccaggagctgaggaagcggggttctccctgaccacagggacccagaagacccgcttctcctttccgcacacccggcctgtcaccctgctttccctgcctctacttgacttggaattggctgaagactacacaggaatgcatcgttcccactccccatcccacttggaaaactccaagggggtgtggcttccctgctcacacccacactggctgctgattggctggggaggcccccgcccttttctccctttggtccttcccctctgccatccccttggggccggtccctctgctggggatgcaccaatgaaccccacaggaagggggaaggaaggagggaatttcacattcccttgttctagattcactttaacgcttaatgccttcaaagttttggtttttttaagaaaaaaaaatatatatatatttgggttttgggggaaaagggaaatttttttttctctttggttttgataaaatgggatgtgggagtttttaaatgctatagccctgggcttgccccatttggggcagctatttaaggggaggggatgtctcaccgggctgggggtgagacatccccccaccccagggactccccttccctctggctccttccccttttctatgaggaaataagatgctgtaactttttggaacctcagttttttgattttttatttgggtaggttttggggtccaggccattttttttaccccttggaggaaataagatgagggagaaaggaaaaggggaggaaacttctcccctcccaccttcacctttagcttcttgaaaatgggcccctgcagaataaatctgccagtttttataaatgctaa

SEQ ID NO: 313031 - DNA, 3041 bp, Homo sapiens
  misc_feature (2869)..(2870): n is a, c, g, or t
  misc_feature (2877)..(2877): n is a, c, g, or t
  misc_feature (2880)..(2880): n is a, c, g, or t
  misc_feature (2886)..(2886): n is a, c, g, or t
  misc_feature (2888)..(2888): n is a, c, g, or t
tatactcctaacatcaacaatacgtcagtcagagaccagggattaaatcgagcacgaggcctcaccttcccggggcgggcggggtggggtgagaggggttgggccctactcccccgacttccactcccgtgcgggtgggggtctcgcccccttagtaacctctccgaaattgacagaagagaaacgctggggaggggcggtgttccgaagatgggatttcagggagaaaatctgagaccacttgcttaacttgagggtcctcctcgacccccaaaattgagcggagtacgagatggagaagtcgatggggaaagaaatcgcgccccttccgagaccctcctcagaattcccacagtgggagcgaactaggaagcaagggaggtccccttccccttcaccaacttgcccctcaggtgggggtgattcccagggtgcacccctgggctacaacattggggagaggagcgagatcgcggaagccgagggtgcagagttgcccttttaagcgccctccaccccctcgcctggaggcgcacgcggcccctttaaggcgcggggcattgtgggtgcggggagtggaattttggaacgaaatgtaacgaagagaagtacagtagtaagagtaacactgtagccgccaccggcaaggggtgcgcgctggggagcggacgctgcatcccctttctgctgcaggaacctctcatcagaccgcctgagggaagcggcgcccggagacccgccccggcccggtccacattctccccaggaagccggactctatggggcgggaccctgggggagcctgagccgagcccggagccagccccgaacccctgaacctccagccaggggcgccccgggagcagccagcccgtgggcgagccgcccgcccgccgagcagccatgagcgagacggtcatctgttccagccgggccactgtgatgctttatgatgatggcaacaagcgatggctccctgctggcacgggtccccaggccttcagccgcgtccagatctaccacaaccccacggccaattcctttcgcgtcgtgggccggaagatgcagcccgaccagcaggtggtcatcaactgtgccatcgtccggggtgtcaagtataaccaggccacccccaacttccatcagtggcgcgacgctcgccaggtctggggcctcaacttcggcagcaaggaggatgcggcccagtttgccgccggcatggccagtgccctagaggcgttggaaggaggtgggccccctccacccccagcacttcccacctggtcggtcccgaacggcccctccccggaggaggtggagcagcagaaaaggcagcagcccggcccgtcggagcacatagagcgccgggtctccaatgcaggaggcccacctgctccccccgctgggggtccacccccaccaccaggacctccccctcctccaggtccccccccacccccaggtttgcccccttcgggggtcccagctgcagcgcacggagcagggggaggaccaccccctgcaccccctctcccggcagcacagggccctggtggtgggggagctggggccccaggcctggccgcagctattgctggagccaaactcaggaaagtcagcaagcaggaggaggcctcaggggggcccacagcccccaaagctgagagtggtcgaagcggaggtgggggactcatggaagagatgaacgccatgctggcccggagaaggaaagccacgcaagttggggagaaaacccccaaggatgaatctgccaatcaggaggagccagaggccagagtcccggcccagagtgaatctgtgcggagaccctgggagaagaacagcacaaccttgccaaggatgaagtcgtcttcttcggtgaccacttccgagacccaaccctgcacgcccagctccagtgattactcggacctacagagggtgaaacaggagcttctggaagaggtgaagaaggaattgcagaaagtgaaagaggaaatcattgaagccttcgtccaggagctgaggaagcggggttctccctgaccacagggacccagaagacccgcttctcctttccgcacacccggcctgtcaccctgctttccctgcctctacttgacttggaattggctgaagactacacaggaatgcatcgttcccactccccatcccacttggaaaactccaagggggtgtggcttccctgctcacacccacactggctgctgattggctggggaggcccccgcccttttctccctttggtccttcccctctgccatccccttggggccggtccctctgctggggatgcaccaatgaaccccacaggaagggggaaggaaggagggaatttcacattcccttgttctagattcactttaacgcttaatgccttcaaagttttggtttttttaagaaaaaaaaatatatatatatttgggttttgggggaaaagggaaatttttttttctctttggttttgataaaatgggatgtgggagtttttaaatgctatagccctgggcttgccccatttggggcagctatttaaggggaggggatgtctcaccgggctgggggtgagacatccccccaccccagggactccccttccctctggctccttccccttttctatgaggaaataagatgctgtaactttttggaacctcagttttttgattttttatttgggtaggttttggggtccaggccattttttttaccccttggaggaaataagatgagggagaaaggaaaaggggaggaaacttctcccctcccaccttcacctttagcttcttgaaaatgggcccctgcagaataaatctgccagtttttataaatgctaaaaaaaaaaaannacaaaanaanaaaaananaacaacaaaaaaaaacaaaacaaaaaaaaaaaaaaaaaaaaaaaaaagggggggggaaacaaaaaacaataccccagggaagaccacacatacgagaacaagaagaattttagtgaaaaaagggagggccacacaaaagagaagggaataacg

SEQ ID NO: 313032 - DNA, 3077 bp, Homo sapiens
tatactcctaacatcaacaatacgtcagtcagagaccagggattaaatcgagcacgaggcctcaccttcccggggcgggcggggtggggtgagaggggttgggccctactcccccgacttccactcccgtgcgggtgggggtctcgcccccttagtaacctctccgaaattgacagaagagaaacgctggggaggggcggtgttccgaagatgggatttcagggagaaaatctgagaccacttgcttaacttgagggtcctcctcgacccccaaaattgagcggagtacgagatggagaagtcgatggggaaagaaatcgcgccccttccgagaccctcctcagaattcccacagtgggagcgaactaggaagcaagggaggtccccttccccttcaccaacttgcccctcaggtgggggtgattcccagggtgcacccctgggctacaacattggggagaggagcgagatcgcggaagccgagggtgcagagttgcccttttaagcgccctccaccccctcgcctggaggcgcacgcggcccctttaaggcgcggggcattgtgggtgcggggagtggaattttggaacgaaatgtaacgaagagaagtacagtagtaagagtaacactgtagccgccaccggcaaggggtgcgcgctggggagcggacgctgcatcccctttctgctgcaggaacctctcatcagaccgcctgagggaagcggcgcccggagacccgccccggcccggtccacattctccccaggaagccggactctatggggcgggaccctgggggagcctgagccgagcccggagccagccccgaacccctgaacctccagccaggggcgccccgggagcagccagcccgtgggcgagccgcccgcccgccgagcagccatgagcgagacggtcatctgttccagccgggccactgtgatgctttatgatgatggcaacaagcgatggctccctgctggcacgggtccccaggccttcagccgcgtccagatctaccacaaccccacggccaattcctttcgcgtcgtgggccggaagatgcagcccgaccagcaggtggtcatcaactgtgccatcgtccggggtgtcaagtataaccaggccacccccaacttccatcagtggcgcgacgctcgccaggtctggggcctcaacttcggcagcaaggaggatgcggcccagtttgccgccggcatggccagtgccctagaggcgttggaaggaggtgggccccctccacccccagcacttcccacctggtcggtcccgaacggcccctccccggaggaggtggagcagcagaaaaggcagcagcccggcccgtcggagcacatagagcgccgggtctccaatgcaggaggcccacctgctccccccgctgggggtccacccccaccaccaggacctccccctcctccaggtccccccccacccccaggtttgcccccttcgggggtcccagctgcagcgcacggagcagggggaggaccaccccctgcaccccctctcccggcagcacagggccctggtggtgggggagctggggccccaggcctggccgcagctattgctggagccaaactcaggaaagtcagcaagcaggaggaggcctcaggggggcccacagcccccaaagctgagagtggtcgaagcggaggtgggggactcatggaagagatgaacgccatgctggcccggagaaggaaagccacgcaagttggggagaaaacccccaaggatgaatctgccaatcaggaggagccagaggccagagtcccggcccagagtggtgagtagagtgcccagtccagccacaggaactacaaatcccagaatactctgttctcacatgttaagcacccttataggagagtcagggcgaatggtgctggggattgtagtctcctgagatggggctttgatcaggggctgatgaggttgggggagtaagattgattggggggcagtcttttgtccctgatctttctgatttcttgcctatccccagaatctgtgcggagaccctgggagaagaacagcacaaccttgccaaggatgaagtcgtcttcttcggtgaccacttccgagacccaaccctgcacgcccagctccagtgattactcggacctacagagggtgaaacaggagcttctggaagaggtgaagaaggaattgcagaaagtgaaagaggaaatcattgaagccttcgtccaggagctgaggaagcggggttctccctgaccacagggacccagaagacccgcttctcctttccgcacacccggcctgtcaccctgctttccctgcctctacttgacttggaattggctgaagactacacaggaatgcatcgttcccactccccatcccacttggaaaactccaagggggtgtggcttccctgctcacacccacactggctgctgattggctggggaggcccccgcccttttctccctttggtccttcccctctgccatccccttggggccggtccctctgctggggatgcaccaatgaaccccacaggaagggggaaggaaggagggaatttcacattcccttgttctagattcactttaacgcttaatgccttcaaagttttggtttttttaagaaaaaaaaatatatatatatttgggttttgggggaaaagggaaatttttttttctctttggttttgataaaatgggatgtgggagtttttaaatgctatagccctgggcttgccccatttggggcagctatttaaggggaggggatgtctcaccgggctgggggtgagacatccccccaccccagggactccccttccctctggctccttccccttttctatgaggaaataagatgctgtaactttttggaacctcagttttttgattttttatttgggtaggttttggggtccaggccattttttttaccccttggaggaaataagatgagggagaaaggaaaaggggaggaaacttctcccctcccaccttcacctttagcttcttgaaaatgggcccctgcagaataaatctgccagtttttataaatgctaa

SEQ ID NO: 313033 - DNA, 2257 bp, Homo sapiens
ccgctgccagagttccatatgttctggaacccttgactcctagagttcagaacccagccaacttgcagttttcagaatgttcaagaaacttctgacactcagagttgcagaacctcctggtccctgcagattcctggaaatcagaatatggtggttgaaagaatcttgtggctgggcgtggtggctcacgcctgtaatcccagcactctgggaggccgaggcgggcagatcgcctgaggtcaggagtttgagaccagcctggccaacatggcgaaatcccgtctctactgaagataacaaaaattagccggtcatggtggcgcccgtgcctgtaatcccagctcggcaggccgaggcaggagaatcgcttgaacccgggaggcagaggttgcagtgagccaagatcgagccactgcactccagcctgggtgacagagtctcaaaaaaaaaaaagaaaagaaagaatcttgggcattttgtaattcggtgttcctgacagtttagtgactgggatctcgcatcctgatctctccctgtcgctgccctgccctccattccccctactctcacccagcccccttcttggttccctaggggaggaaggcttgggtgagtattaggagccagccaccctggagacctctgagagagaggacggaggtcgctggccccttcgctggccatccttagggccctgattgacggcagctctctcgcctccccccacagggcagcagcccggcccgtcggagcacatagagcgccgggtctccaatgcaggaggcccacctgctccccccgctgggggtccacccccaccaccaggacctccccctcctccaggtccccccccacccccaggtttgcccccttcgggggtcccagctgcagcgcacggagcagggggaggaccaccccctgcaccccctctcccggcagcacagggccctggtggtgggggagctggggccccaggcctggccgcagctattgctggagccaaactcaggaaagtcagcaagcaggaggaggcctcaggggggcccacagcccccaaagctgagagtggtcgaagcggaggtgggggactcatggaagagatgaacgccatgctggcccggagaaggaaagccacgcaagttggggagaaaacccccaaggatgaatctgccaatcaggaggagccagaggccagagtcccggcccagagtgaatctgtgcggagaccctgggagaagaacagcacaaccttgccaaggatgaagtcgtcttcttcggtgaccacttccgagacccaaccctgcacgcccagctccagtgattactcggacctacagagggtgaaacaggagcttctggaagaggtgaagaaggaattgcagaaagtgaaagaggaaatcattgaagccttcgtccaggagctgaggaagcggggttctccctgaccacagggacccagaagacccgcttctcctttccgcacacccggcctgtcaccctgctttccctgcctctacttgacttggaattggctgaagactacacaggaatgcatcgttcccactccccatcccacttggaaaactccaagggggtgtggcttccctgctcacacccacactggctgctgattggctggggaggcccccgcccttttctccctttggtccttcccctctgccatccccttggggccggtccctctgctggggatgcaccaatgaaccccacaggaagggggaaggaaggagggaatttcacattcccttgttctagattcactttaacgcttaatgccttcaaagttttggtttttttaagaaaaaaaaatatatatatatttgggttttgggggaaaagggaaatttttttttctctttggttttgataaaatgggatgtgggagtttttaaatgctatagccctgggcttgccccatttggggcagctatttaaggggaggggatgtctcaccgggctgggggtgagacatccccccaccccagggactccccttccctctggctccttccccttttctatgaggaaataagatgctgtaactttttggaacctcagttttttgattttttatttgggtaggttttggggtccaggccattttttttaccccttggaggaaataagatgagggagaaaggaaaaggggaggaaacttctcccctcccaccttcacctttagcttcttgaaaatgggcccctgcagaataaatctgccagtttttataaatgctaa

SEQ ID NO: 313034 - DNA, 2435 bp, Homo sapiens
tatactcctaacatcaacaatacgtcagtcagagaccagggattaaatcgagcacgaggcctcaccttcccggggcgggcggggtggggtgagaggggttgggccctactcccccgacttccactcccgtgcgggtgggggtctcgcccccttagtaacctctccgaaattgacagaagagaaacgctggggaggggcggtgttccgaagatgggatttcagggagaaaatctgagaccacttgcttaacttgagggtcctcctcgacccccaaaattgagcggagtacgagatggagaagtcgatggggaaagaaatcgcgccccttccgagaccctcctcagaattcccacagtgggagcgaactaggaagcaagggaggtccccttccccttcaccaacttgcccctcaggtgggggtgattcccagggtgcacccctgggctacaacattggggagaggagcgagatcgcggaagccgagggtgcagagttgcccttttaagcgccctccaccccctcgcctggaggcgcacgcggcccctttaaggcgcggggcattgtgggtgcggggagtggaattttggaacgaaatgtaacgaagagaagtacagtagtaagagtaacactgtagccgccaccggcaaggggtgcgcgctggggagcggacgctgcatcccctttctgctgcaggaacctctcatcagaccgcctgagggaagcggcgcccggagacccgccccggcccggtccacattctccccaggaagccggactctatggggcgggaccctgggggagcctgagccgagcccggagccagccccgaacccctgaacctccagccaggggcgccccgggagcagccagcccgtgggcgagccgcccgcccgccgagcagccatgaggcagcagcccggcccgtcggagcacatagagcgccgggtctccaatgcaggaggcccacctgctccccccgctgggggtccacccccaccaccaggacctccccctcctccaggtccccccccacccccaggtttgcccccttcgggggtcccagctgcagcgcacggagcagggggaggaccaccccctgcaccccctctcccggcagcacagggccctggtggtgggggagctggggccccaggcctggccgcagctattgctggagccaaactcaggaaagtcagcaagcaggaggaggcctcaggggggcccacagcccccaaagctgagagtggtcgaagcggaggtgggggactcatggaagagatgaacgccatgctggcccggagaaggaaagccacgcaagttggggagaaaacccccaaggatgaatctgccaatcaggaggagccagaggccagagtcccggcccagagtgaatctgtgcggagaccctgggagaagaacagcacaaccttgccaaggatgaagtcgtcttcttcggtgaccacttccgagacccaaccctgcacgcccagctccagtgattactcggacctacagagggtgaaacaggagcttctggaagaggtgaagaaggaattgcagaaagtgaaagaggaaatcattgaagccttcgtccaggagctgaggaagcggggttctccctgaccacagggacccagaagacccgcttctcctttccgcacacccggcctgtcaccctgctttccctgcctctacttgacttggaattggctgaagactacacaggaatgcatcgttcccactccccatcccacttggaaaactccaagggggtgtggcttccctgctcacacccacactggctgctgattggctggggaggcccccgcccttttctccctttggtccttcccctctgccatccccttggggccggtccctctgctggggatgcaccaatgaaccccacaggaagggggaaggaaggagggaatttcacattcccttgttctagattcactttaacgcttaatgccttcaaagttttggtttttttaagaaaaaaaaatatatatatatttgggttttgggggaaaagggaaatttttttttctctttggttttgataaaatgggatgtgggagtttttaaatgctatagccctgggcttgccccatttggggcagctatttaaggggaggggatgtctcaccgggctgggggtgagacatccccccaccccagggactccccttccctctggctccttccccttttctatgaggaaataagatgctgtaactttttggaacctcagttttttgattttttatttgggtaggttttggggtccaggccattttttttaccccttggaggaaataagatgagggagaaaggaaaaggggaggaaacttctcccctcccaccttcacctttagcttcttgaaaatgggcccctgcagaataaatctgccagtttttataaatgctaa

SEQ ID NO: 313035 - DNA, 2601 bp, Homo sapiens
tatactcctaacatcaacaatacgtcagtcagagaccagggattaaatcgagcacgaggcctcaccttcccggggcgggcggggtggggtgagaggggttgggccctactcccccgacttccactcccgtgcgggtgggggtctcgcccccttagtaacctctccgaaattgacagaagagaaacgctggggaggggcggtgttccgaagatgggatttcagggagaaaatctgagaccacttgcttaacttgagggtcctcctcgacccccaaaattgagcggagtacgagatggagaagtcgatggggaaagaaatcgcgccccttccgagaccctcctcagaattcccacagtgggagcgaactaggaagcaagggaggtccccttccccttcaccaacttgcccctcaggtgggggtgattcccagggtgcacccctgggctacaacattggggagaggagcgagatcgcggaagccgagggtgcagagttgcccttttaagcgccctccaccccctcgcctggaggcgcacgcggcccctttaaggcgcggggcattgtgggtgcggggagtggaattttggaacgaaatgtaacgaagagaagtacagtagtaagagtaacactgtagccgccaccggcaaggggtgcgcgctggggagcggacgctgcatcccctttctgctgcaggaacctctcatcagaccgcctgagggaagcggcgcccggagacccgccccggcccggtccacattctccccaggaagccggactctatggggcgggaccctgggggagcctgagccgagcccggagccagccccgaacccctgaacctccagccaggggcgccccgggagcagccagcccgtgggcgagccgcccgcccgccgagcagccatgagcgagacggtcatctgttccagccgggccactgtgatgctttatgatgatggcaacaagcgatggctccctgctggcacgggtccccaggccttcagccgcgtccagatctaccacaaccccacggccaattcctttcgcgtcgtgggccggaagatgcagcccgaccagcaggtggtcatcaactgtgccatcgtccggggtgtcaagtataaccaggccacccccaacttccatcagtggcgcgacgctcgccaggtctggggcctcaacttcggcagcaaggaggatgcggcccagtttgccgccggcatggccagtgccctagaggcgttggaaggaggtgggccccctccacccccagcacttcccacctggtcggtcccgaacggcccctccccggaggaggtggagcagcagaaaaggcagcagcccggcccgtcggagcacatagagcgccgggtctccaatgcaggaggcccacctgctccccccgctgggggtccacccccaccaccaggacctccccctcctccaggtccccccccacccccaggtttgcccccttcgggggtcccagctgcagcgcacggagcagggggaggaccaccccctgcaccccctctcccggcagcacagggccctggtggtgggggagctggggccccaggcctggccgcagctattgctggagccaaactcaggaaagtcagcaagcaggaggaggcctcaggggggcccacagcccccaaagctgagagtggtcgaagcggaggtgggggactcatggaagagatgaacgccatgctggcccggagaaggaaagccacgcaagttggggagaaaacccccaaggatgaatctgccaatcaggaggagccagaggccagagtcccggcccagagtgaatctgtgcggagaccctgggagaagaacagcacaaccttgccaaggatgaagtcgtcttcttcggtgaccacttccgagacccaaccctgcacgcccagctccagtgattactcggacctacagagggtgaaacaggagcttctggaagaggtgaagaaggaattgcagaaagtgaaagaggaaatcattgaagccttcgtccaggagctgaggaagcggggttctccctgaccacagggacccagaagacccgcttctcctttccgcacacccggcctgtcaccctgctttccctgcctctacttgacttggaattggctgaagactacacaggaatgcatcgttcccactccccatcccacttggaaaactccaagggggtgtggcttccctgctcacacccacactggctgctgattggctggggaggcccccgcccttttctccctttggtccttcccctctgccatccccttggggccggtccctctgctggggatgcaccaatgaaccccacaggaagggggaaggaaggagggaatttcacattcccttgttctagattcactttaacgcttaatgccttcaaagttttggtttttttaagaaaaaaaaatatatatatatttgggttttgggggaaaagggaaatttttttttctctttggttttgataaaatgggatgtgggagttttttttaaatagcttttaagcccctggggctttgcccccaattttgggggcgatgcttatttaaagggggggtggtcattttatcttcacat

SEQ ID NO: 313036 - DNA, 1609 bp, Homo sapiens
tatactcctaacatcaacaatacgtcagtcagagaccagggattaaatcgagcacgaggcctcaccttcccggggcgggcggggtggggtgagaggggttgggccctactcccccgacttccactcccgtgcgggtgggggtctcgcccccttagtaacctctccgaaattgacagaagagaaacgctggggaggggcggtgttccgaagatgggatttcagggagaaaatctgagaccacttgcttaacttgagggtcctcctcgacccccaaaattgagcggagtacgagatggagaagtcgatggggaaagaaatcgcgccccttccgagaccctcctcagaattcccacagtgggagcgaactaggaagcaagggaggtccccttccccttcaccaacttgcccctcaggtgggggtgattcccagggtgcacccctgggctacaacattggggagaggagcgagatcgcggaagccgagggtgcagagttgcccttttaagcgccctccaccccctcgcctggaggcgcacgcggcccctttaaggcgcggggcattgtgggtgcggggagtggaattttggaacgaaatgtaacgaagagaagtgatgaagtcgtcttcttcggtgaccacttccgagacccaaccctgcacgcccagctccagtgattactcggacctacagagggtgaaacaggagcttctggaagaggtgaagaaggaattgcagaaagtgaaagaggaaatcattgaagccttcgtccaggagctgaggaagcggggttctccctgaccacagggacccagaagacccgcttctcctttccgcacacccggcctgtcaccctgctttccctgcctctacttgacttggaattggctgaagactacacaggaatgcatcgttcccactccccatcccacttggaaaactccaagggggtgtggcttccctgctcacacccacactggctgctgattggctggggaggcccccgcccttttctccctttggtccttcccctctgccatccccttggggccggtccctctgctggggatgcaccaatgaaccccacaggaagggggaaggaaggagggaatttcacattcccttgttctagattcactttaacgcttaatgccttcaaagttttggtttttttaagaaaaaaaaatatatatatatttgggttttgggggaaaagggaaatttttttttctctttggttttgataaaatgggatgtgggagtttttaaatgctatagccctgggcttgccccatttggggcagctatttaaggggaggggatgtctcaccgggctgggggtgagacatccccccaccccagggactccccttccctctggctccttccccttttctatgaggaaataagatgctgtaactttttggaacctcagttttttgattttttatttgggtaggttttggggtccaggccattttttttaccccttggaggaaataagatgagggagaaaggaaaaggggaggaaacttctcccctcccaccttcacctttagcttcttgaaaatgggcccctgcagaataaatctgccagtttttataaatgctaa

SEQ ID NO: 313037 - DNA, 1539 bp, Homo sapiens
tatactcctaacatcaacaatacgtcagtcagagaccagggattaaatcgagcacgaggcctcaccttcccggggcgggcggggtggggtgagaggggttgggccctactcccccgacttccactcccgtgcgggtgggggtctcgcccccttagtaacctctccgaaattgacagaagagaaacgctggggaggggcggtgttccgaagatgggatttcagggagaaaatctgagaccacttgcttaacttgagggtcctcctcgacccccaaaattgagcggagtacgagatggagaagtcgatggggaaagaaatcgcgccccttccgagaccctcctcagaattcccacagtgggagcgaactaggaagcaagggaggtccccttccccttcaccaacttgcccctcaggtgggggtgattcccagggtgcacccctgggctacaacattggggagaggagcgagatcgcggaagccgagggtgcagagttgcccttttaagcgccctccaccccctcgcctggaggcgcacgcggcccctttaaggcgcggggcattgtgggtgcggggagtggaattttggaacgaaatgtaacgaagagaagtacagtagtaagagtaacactgtagccgccaccggcaaggggtgcgcgctggggagcggacgctgcatcccctttctgctgcaggaacctctcatcagaccgcctgagggaagcggcgcccggagacccgccccggcccggtccacattctccccaggaagccggactctatggggcgggaccctgggggagcctgagccgagcccggagccagccccgaacccctgaacctccagccaggggcgccccgggagcagccagcccgtgggcgagccgcccgcccgccgagcagccatgagcgagacggtcatctgttccagccgggccactgtgatgctttatgatgatggcaacaagcgatggctccctgctggcacgggtccccaggccttcagccgcgtccagatctaccacaaccccacggccaattcctttcgcgtcgtgggccggaagatgcagcccgaccagcaggtggtcatcaactgtgccatcgtccggggtgtcaagtataaccaggccacccccaacttccatcagtggcgcgacgctcgccaggtctggggcctcaacttcggcagcaaggaggatgcggcccagtttgccgccggcatggccagtgccctagaggcgttggaaggaggtgggccccctccacccccagcacttcccacctggtcggtcccgaacggcccctccccggaggaggtggagcagcagaaaaggcagcagcccggcccgtcggagcacatagagcgccgggtctccaatgcaggaggcccacctgatgcgagcaggtgggaggtccacggaaaggaaagcacgagagagcaaggagctagacgaggaagaacagagcaacagaaaaagaaaaaaaagaaagagagacagggaaaacaaaagaagaaaaaagaacagaaaagaaaaaacaaa

SEQ ID NO: 313038 - DNA, 1844 bp, Homo sapiens
tatactcctaacatcaacaatacgtcagtcagagaccagggattaaatcgagcacgaggcctcaccttcccggggcgggcggggtggggtgagaggggttgggccctactcccccgacttccactcccgtgcgggtgggggtctcgcccccttagtaacctctccgaaattgacagaagagaaacgctggggaggggcggtgttccgaagatgggatttcagggagaaaatctgagaccacttgcttaacttgagggtcctcctcgacccccaaaattgagcggagtacgagatggagaagtcgatggggaaagaaatcgcgccccttccgagaccctcctcagaattcccacagtgggagcgaactaggaagcaagggaggtccccttccccttcaccaacttgcccctcaggtgggggtgattcccagggtgcacccctgggctacaacattggggagaggagcgagatcgcggaagccgagggtgcagagttgcccttttaagcgccctccaccccctcgcctggaggcgcacgcggcccctttaaggcgcggggcattgtgggtgcggggagtggaattttggaacgaaatgtaacgaagagaagtacagtagtaagagtaacactgtagccgccaccggcaaggggtgcgcgctggggagcggacgctgcatcccctttctgctgcaggaacctctcatcagaccgcctgagggaagcggcgcccggagacccgccccggcccggtccacattctccccaggaagccggactctatggggcgggaccctgggggagcctgagccgagcccggagccagccccgaacccctgaacctccagccaggggcgccccgggagcagccagcccgtgggcgagccgcccgcccgccgagcagccatgagcgagacggtcatctgttccagccgggccactgtgatgctttatgatgatggcaacaagcgatggctccctgctggcacgggtccccaggccttcagccgcgtccagatctaccacaaccccacggccaattcctttcgcgtcgtgggccggaagatgcagcccgaccagcaggtggtcatcaactgtgccatcgtccggggtgtcaagtataaccaggccacccccaacttccatcagtggcgcgacgctcgccaggtctggggcctcaacttcggcagcaaggaggatgcggcccagtttgccgccggcatggccagtgccctagaggcgttggaaggaggtgggccccctccacccccagcacttcccacctggtcgcctctgctggggatgcaccaatgaaccccacaggaagggggaaggaaggagggaatttcacattcccttgttctagattcactttaacgcttaatgccttcaaagttttggtttttttaagaaaaaaaaatatatatatatttgggttttgggggaaaagggaaatttttttttctctttggttttgataaaatgggatgtgggagtttttaaatgctatagccctgggcttgccccatttggggcagctatttaaggggaggggatgtctcaccgggctgggggtgagacatccccccaccccagggactccccttccctctggctccttccccttttctatgaggaaataagatgctgtaactttttggaacctcagttttttgattttttatttgggtaggttttggggtccaggccattttttttaccccttggaggaaataagatgagggagaaaggaaaaggggaggaaacttctcccctcccaccttcacctttagcttcttgaaaatgggcccctgcagaataaatctgccagtttttataaatgctaa

SEQ ID NO: 313039 - DNA, 2349 bp, Homo sapiens
tatactcctaacatcaacaatacgtcagtcagagaccagggattaaatcgagcacgaggcctcaccttcccggggcgggcggggtggggtgagaggggttgggccctactcccccgacttccactcccgtgcgggtgggggtctcgcccccttagtaacctctccgaaattgacagaagagaaacgctggggaggggcggtgttccgaagatgggatttcagggagaaaatctgagaccacttgcttaacttgagggtcctcctcgacccccaaaattgagcggagtacgagatggagaagtcgatggggaaagaaatcgcgccccttccgagaccctcctcagaattcccacagtgggagcgaactaggaagcaagggaggtccccttccccttcaccaacttgcccctcaggtgggggtgattcccagggtgcacccctgggctacaacattggggagaggagcgagatcgcggaagccgagggtgcagagttgcccttttaagcgccctccaccccctcgcctggaggcgcacgcggcccctttaaggcgcggggcattgtgggtgcggggagtggaattttggaacgaaatgtaacgaagagaagtacagtagtaagagtaacactgtagccgccaccggcaaggggtgcgcgctggggagcggacgctgcatcccctttctgctgcaggaacctctcatcagaccgcctgagggaagcggcgcccggagacccgccccggcccggtccacattctccccaggaagccggactctatggggcgggaccctgggggagcctgagccgagcccggagccagccccgaacccctgaacctccagccaggggcgccccgggagcagccagcccgtgggcgagccgcccgcccgccgagcagccatgagcgagacggtcatctgttccagccgggccactgtgatgctttatgatgatggcaacaagcgatggctccctgctggcacgggtccccaggccttcagccgcgtccagatctaccacaaccccacggccaattcctttcgcgtcgtgggccggaagatgcagcccgaccagcaggtggtcatcaactgtgccatcgtccggggtgtcaagtataaccaggccacccccaacttccatcagtggcgcgacgctcgccaggtctggggcctcaacttcggcagcaaggaggatgcggcccagtttgccgccggcatggccagtgccctagaggcgttggaaggaggtgggccccctccacccccagcacttcccacctggtcggtcccgaacggcccctccccggaggaggtggagcagcagaaaaggcagcagcccggcccgtcggagcacatagagcgccgggtctccaatgcaggaggcccacctgctccccccgctgggggtccacccccaccaccaggacctccccctcctccaggtccccccccacccccaggtttgcccccttcgggggtcccagctgcagcgcacggagcagggggaggaccaccccctgcaccccctctcccggcagcacagggccctggtggtgggggagctggggccccaggcctggccgcagctattgctggagccaaactcaggaaagtcagcaagcaggaggaggcctcaggggggcccacagcccccaaagctgagagtggtcgaagcggaggtgggggactcatggaagagatgaacgccatgctggcccggagaaggaaagccacgcaagttggggagaaaacccccaaggatgaatctgccaatcaggaggagccagaggccagagtcccggcccagagtggtgagtagagtgcccagtccagccacaggaactacaaatcccagaatactctgttctcacatgttaagcacccttataggagagtcagggcgaatggtgctggggattgtagtctcctgagatggggctttgatcaggggctgatgaggttgggggagtaagattgattggggggcagtcttttgtccctgatctttctgatttcttgcctatccccagaatctgtgcggagaccctgggagaagaacagcacaaccttgccaaggtaggccatcggtcctggggcccttggggaggtaaaggcgggcagatcgcttgagcccaggaggtcaagaccagcctgggcaacatggcgacaccccatctctacaaaaattagccaggcgtggtagcacttacctgtggtcccagctactcaggaggctgaggtgggaggattacttgagcccaggaagttgaggcctcagcgagccatcatcatgcctgcactccagcctgagaaatagaatgtgactgtctcaaaacaaaacacaaca

SEQ ID NO: 313040 - DNA, 2711 bp, Homo sapiens
tatactcctaacatcaacaatacgtcagtcagagaccagggattaaatcgagcacgaggcctcaccttcccggggcgggcggggtggggtgagaggggttgggccctactcccccgacttccactcccgtgcgggtgggggtctcgcccccttagtaacctctccgaaattgacagaagagaaacgctggggaggggcggtgttccgaagatgggatttcagggagaaaatctgagaccacttgcttaacttgagggtcctcctcgacccccaaaattgagcggagtacgagatggagaagtcgatggggaaagaaatcgcgccccttccgagaccctcctcagaattcccacagtgggagcgaactaggaagcaagggaggtccccttccccttcaccaacttgcccctcaggtgggggtgattcccagggtgcacccctgggctacaacattggggagaggagcgagatcgcggaagccgagggtgcagagttgcccttttaagcgccctccaccccctcgcctggaggcgcacgcggcccctttaaggcgcggggcattgtgggtgcggggagtggaattttggaacgaaatgtaacgaagagaagtacagtagtaagagtaacactgtagccgccaccggcaaggggtgcgcgctggggagcggacgctgcatcccctttctgctgcaggaacctctcatcagaccgcctgagggaagcggcgcccggagacccgccccggcccggtccacattctccccaggaagccggactctatggggcgggaccctgggggagcctgagccgagcccggagccagccccgaacccctgaacctccagccaggggcgccccgggagcagccagcccgtgggcgagccgcccgcccgccgagcagccatgagcgagacggtcatctgttccagccgggccactgtgatgctttatgatgatggcaacaagcgatggctccctgctggcacgggtccccaggccttcagccgcgtccagatctaccacaaccccacggccaattcctttcgcgtcgtgggccggaagatgcagcccgaccagcaggtggtcatcaactgtgccatcgtccggggtgtcaagtataaccaggccacccccaacttccatcagtggcgcgacgctcgccaggtctggggcctcaacttcggcagcaaggaggatgcggcccagtttgccgccggcatggccagtgccctagaggcgttggaaggaggtgggccccctccacccccagcacttcccacctggtcggtcccgaacggcccctccccggaggaggtggagcagcagaaaaggcagcagcccggcccgtcggagcacatagagcgccgggtctccaatgcaggaggcccacctgctccccccgctgggggtccacccccaccaccaggacctccccctcctccaggtccccccccacccccaggtttgcccccttcgggggtcccagctgcagcgcacggagcagggggaggaccaccccctgcaccccctctcccggcagcacagggccctggtggtgggggagctggggccccaggcctggccgcagctattgctggagccaaactcaggaaagtcagcaagcaggaggaggcctcaggggggcccacagcccccaaagctgagagtggtcgaagcggaggtgggggactcatggaagagatgaacgccatgctggcccggagaaggaaagccacgcaagttggggagaaaacccccaaggatgaatctgccaatcaggaggagccagaggccagagtcccggcccagagtggtgagtagagtgcccagtccagccacaggaactacaaatcccagaatactctgttctcacatgttaagcacccttataggagagtcagggcgaatggtgctggggattgtagtctcctgagatggggctttgatcaggggctgatgaggttgggggagtaagattgattggggggcagtcttttgtccctgatctttctgatttcttgcctatccccagaatctgtgcggagaccctgggagaagaacagcacaaccttgccaaggatgaagtcgtcttcttcggtgaccacttccgagacccaaccctgcacgcccagctccagtgattactcggacctacagagggtgaaacaggtaacttgggggggaagttggggaccacagcaagagagatctaggtctggcccctgccactggcatgccgtatgatcctagataacatctcagaaaccgagactccacacccccttttctggcacctgtgacagacattattaatctatcaccgcgctcattccagatgagtgccttgaattctttccgcacattgacccagctgtccatcaccaattggagttggcaggaggctggaatgcgcttgccaaccttggtactggatgttctccagtacttttccggctccaaggatccagaattctcccctagaatcctccagtcactctgcgaccttgacagcgatgtcatggtgtcgatgtaggggtaggtctcaaacctactacccctggcttttccatcaacaagaaagaggggactctggcagggcacggtggctcatgtgtgtaatttcagcacattgcgaggctgaggtgggagcattgcttgaggccaggagtttgagaccagcctggggcaacatcgggagacccccatctcta

SEQ ID NO: 313041 - DNA, 1060 bp, Homo sapiens
gggaagttgaggctgcaatgagctgtgatcatgccattgcaccctagcctgggcaacagagcaaggttccttctcaaaaaataaaagaagggggattcattcctgcaagtcccggtaccccctcctgattagttttaccccattaattttaggagcttctggaagaggtgaagaaggaattgcagaaagtgaaagaggaaatcattgaagccttcgtccaggagctgaggaagcggggttctccctgaccacagggacccagaagacccgcttctcctttccgcacacccggcctgtcaccctgctttccctgcctctacttgacttggaattggctgaagactacacaggaatgcatcgttcccactccccatcccacttggaaaactccaagggggtgtggcttccctgctcacacccacactggctgctgattggctggggaggcccccgcccttttctccctttggtccttcccctctgccatccccttggggccggtccctctgctggggatgcaccaatgaaccccacaggaagggggaaggaaggagggaatttcacattcccttgttctagattcactttaacgcttaatgccttcaaagttttggtttttttaagaaaaaaaaatatatatatatttgggttttgggggaaaagggaaatttttttttctctttggttttgataaaatgggatgtgggagtttttaaatgctatagccctgggcttgccccatttggggcagctatttaaggggaggggatgtctcaccgggctgggggtgagacatccccccaccccagggactccccttccctctggctccttccccttttctatgaggaaataagatgctgtaactttttggaacctcagttttttgattttttatttgggtaggttttggggtccaggccattttttttaccccttggaggaaataagatgagggagaaaggaaaaggggaggaaacttctcccctcccaccttcacctttagcttcttgaaaatgggcccctgcagaataaatctgccagtttttataaatgctaa

SEQ ID NO: 313042 - DNA, 1578 bp, Homo sapiens
tatactcctaacatcaacaatacgtcagtcagagaccagggattaaatcgagcacgaggcctcaccttcccggggcgggcggggtggggtgagaggggttgggccctactcccccgacttccactcccgtgcgggtgggggtctcgcccccttagtaacctctccgaaattgacagaagagaaacgctggggaggggcggtgttccgaagatgggatttcagggagaaaatctgagaccacttgcttaacttgagggtcctcctcgacccccaaaattgagcggagtacgagatggagaagtcgatggggaaagaaatcgcgccccttccgagaccctcctcagaattcccacagtgggagcgaactaggaagcaagggaggtccccttccccttcaccaacttgcccctcaggtgggggtgattcccagggtgcacccctgggctacaacattggggagaggagcgagatcgcggaagccgagggtgcagagttgcccttttaagcgccctccaccccctcgcctggaggcgcacgcggcccctttaaggcgcggggcattgtgggtgcggggagtggaattttggaacgaaatgtaacgaagagaagtacagtagtaagagtaacactgtagccgccaccggcaaggggtgcgcgctggggagcggacgctgcatcccctttctgctgcaggaacctctcatcagaccgcctgagggaagcggcgcccggagacccgccccggcccggtccacattctccctgaccacagggacccagaagacccgcttctcctttccgcacacccggcctgtcaccctgctttccctgcctctacttgacttggaattggctgaagactacacaggaatgcatcgttcccactccccatcccacttggaaaactccaagggggtgtggcttccctgctcacacccacactggctgctgattggctggggaggcccccgcccttttctccctttggtccttcccctctgccatccccttggggccggtccctctgctggggatgcaccaatgaaccccacaggaagggggaaggaaggagggaatttcacattcccttgttctagattcactttaacgcttaatgccttcaaagttttggtttttttaagaaaaaaaaatatatatatatttgggttttgggggaaaagggaaatttttttttctctttggttttgataaaatgggatgtgggagtttttaaatgctatagccctgggcttgccccatttggggcagctatttaaggggaggggatgtctcaccgggctgggggtgagacatccccccaccccagggactccccttccctctggctccttccccttttctatgaggaaataagatgctgtaactttttggaacctcagttttttgattttttatttgggtaggttttggggtccaggccattttttttaccccttggaggaaataagatgagggagaaaggaaaaggggaggaaacttctcccctcccaccttcacctttagcttcttgaaaatgggcccctgcagaataaatctgccagtttttataaatgctaa

SEQ ID NO: 313043 - DNA, 769 bp, Homo sapiens
tcctttttccccacccctcccccatctgttcatctgtctgtctgccttcagtctgtctctcctctttgtcaacccgactctccctttcccacctctctctgcgtctgtctcttgcatctcgtttgtgtgtttgcctgtctctcctgatctgattttctctcctgatctgtctcccccgtctccttctgtccacgtggctcctgcctccctctcctctgctggggatgcaccaatgaaccccacaggaagggggaaggaaggagggaatttcacattcccttgttctagattcactttaacgcttaatgccttcaaagttttggtttttttaagaaaaaaaaatatatatatatttgggttttgggggaaaagggaaatttttttttctctttggttttgataaaatgggatgtgggagtttttaaatgctatagccctgggcttgccccatttggggcagctatttaaggggaggggatgtctcaccgggctgggggtgagacatccccccaccccagggactccccttccctctggctccttccccttttctatgaggaaataagatgctgtaactttttggaacctcagttttttgattttttatttgggtaggttttggggtccaggccattttttttaccccttggaggaaataagatgagggagaaaggaaaaggggaggaaacttctcccctcccaccttcacctttagcttcttgaaaatgggcccctgcagaataaatctgccagtttttataaatgctaa

SEQ ID NO: 313044 - DNA, 1294 bp, Homo sapiens
tatactcctaacatcaacaatacgtcagtcagagaccagggattaaatcgagcacgaggcctcaccttcccggggcgggcggggtggggtgagaggggttgggccctactcccccgacttccactcccgtgcgggtgggggtctcgcccccttagtaacctctccgaaattgacagaagagaaacgctggggaggggcggtgttccgaagatgggatttcagggagaaaatctgagaccacttgcttaacttgagggtcctcctcgacccccaaaattgagcggagtacgagatggagaagtcgatggggaaagaaatcgcgccccttccgagaccctcctcagaattcccacagtgggagcgaactaggaagcaagggaggtccccttccccttcaccaacttgcccctcaggtgggggtgattcccagggtgcacccctgggctacaacattggggagaggagcgagatcgcggaagccgagggtgcagagttgcccttttaagcgccctccaccccctcgcctggaggcgcacgcggcccctttaaggcgcggggcattgtgggtgcggggagtggaattttggaacgaaatgtaacgaagagaagtgatgaagtcgtcttcttcggtgaccacttccgagacccaaccctgcacgcccagctccagtgattactcggacctacagagggtgaaacaggtaacttgggggggaagttggggaccacagcaagagagatctaggtctggcccctgccactggcatgccgtatgatcctagataacatctcagaaacctcaggtttccaatctgacaaatggagaaactggattgggtcaaggatgaccgagactccacacccccttttctggcacctgtgacagacattattaatctatcaccgcgctcattccagatgagtgccttgaattctttccgcacattgacccagctgtccatcaccaattggagttggcaggaggctggaatgcgcttgccaaccttggtactggatgttctccagtacttttccggctccaaggatccagaattctcccctagaatcctccagtcactctgcgaccttgacagcgatgtcatggtgtcgatgtaggggtaggtctcaaacctactacccctggcttttccatcaacaagaaagaggggactctggcagggcacggtggctcatgtgtgtaatttcagcacattgcgaggctgaggtgggagcattgcttgaggccaggagtttgagaccagcctggggcaacatcgggagacccccatctcta

SEQ ID NO: 313045 - DNA, 1038 bp, Homo sapiens
acatgacaaataggttttacatcacagcctaactccaatcgattggtagtggctgcctgagcactccgatgagaagaatcctgaagaaatgaatgggatatccattgatggggaatgattaataaacttgggcagatcccacattgtatgatataacgtatctattaaaaacatgccctaatctgccaaggtttggtggctcactcctataattctagcactttgggagactgagttgggaggattacttgcccaatttataaggcagagctcaatgtgatccctggaataggaggcggggaagcaggtcctctctctaatctcattgctgtcccaaaccacaccaactcccccgatgaagtcgtcttcttcggtgaccacttccgagacccaaccctgcacgcccagctccagtgattactcggacctacagagggtgaaacaggtaacttgggggggaagttggggaccacagcaagagagatctaggtctggcccctgccactggcatgccgtatgatcctagataacatctcagaaacctcaggtttccaatctgacaaatggagaaactggattgggtcaaggatgaccgagactccacacccccttttctggcacctgtgacagacattattaatctatcaccgcgctcattccagatgagtgccttgaattctttccgcacattgacccagctgtccatcaccaattggagttggcaggaggctggaatgcgcttgccaaccttggtactggatgttctccagtacttttccggctccaaggatccagaattctcccctagaatcctccagtcactctgcgaccttgacagcgatgtcatggtgtcgatgtaggggtaggtctcaaacctactacccctggcttttccatcaacaagaaagaggggactctggcagggcacggtggctcatgtgtgtaatttcagcacattgcgaggctgaggtgggagcattgcttgaggccaggagtttgagaccagcctggggcaacatcgggagacccccatctcta

SEQ ID NO: 313046 - DNA, 2858 bp, Homo sapiens
tatactcctaacatcaacaatacgtcagtcagagaccagggattaaatcgagcacgaggcctcaccttcccggggcgggcggggtggggtgagaggggttgggccctactcccccgacttccactcccgtgcgggtgggggtctcgcccccttagtaacctctccgaaattgacagaagagaaacgctggggaggggcggtgttccgaagatgggatttcagggagaaaatctgagaccacttgcttaacttgagggtcctcctcgacccccaaaattgagcggagtacgagatggagaagtcgatggggaaagaaatcgcgccccttccgagaccctcctcagaattcccacagtgggagcgaactaggaagcaagggaggtccccttccccttcaccaacttgcccctcaggtgggggtgattcccagggtgcacccctgggctacaacattggggagaggagcgagatcgcggaagccgagggtgcagagttgcccttttaagcgccctccaccccctcgcctggaggcgcacgcggcccctttaaggcgcggggcattgtgggtgcggggagtggaattttggaacgaaatgtaacgaagagaagtacagtagtaagagtaacactgtagccgccaccggcaaggggtgcgcgctggggagcggacgctgcatcccctttctgctgcaggaacctctcatcagaccgcctgagggaagcggcgcccggagacccgccccggcccggtccacattctccccaggaagccggactctatggggcgggaccctgggggagcctgagccgagcccggagccagccccgaacccctgaacctccagccaggggcgccccgggagcagccagcccgtgggcgagccgcccgcccgccgagcagccatgagcgagacggtcatctgttccagccgggccactgtgatgctttatgatgatggcaacaagcgatggctccctgctggcacgggtccccaggccttcagccgcgtccagatctaccacaaccccacggccaattcctttcgcgtcgtgggccggaagatgcagcccgaccagcaggtggtcatcaactgtgccatcgtccggggtgtcaagtataaccaggccacccccaacttccatcagtggcgcgacgctcgccaggtctggggcctcaacttcggcagcaaggaggatgcggcccagtttgccgccggcatggccagtgccctagaggcgttggaaggaggtgggccccctccacccccagcacttcccacctggtcggtcccgaacggcccctccccggaggaggtggagcagcagaaaaggcagcagcccggcccgtcggagcacatagagcgccgggtctccaatgcaggaggcccacctgctccccccgctgggggtccacccccaccaccaggacctccccctcctccaggtccccccccacccccaggtttgcccccttcgggggtcccagctgcagcgcacggagcagggggaggaccaccccctgcaccccctctcccggcagcacagggccctggtggtgggggagctggggccccaggcctggccgcagctattgctggagccaaactcaggaaagtcagcaagcaggaggaggcctcaggggggcccacagcccccaaagctgagagtggtcgaagcggaggtgggggactcatggaagagatgaacgccatgctggcccggagaaggaaagccacgcaagttggggagaaaacccccaaggatgaatctgccaatcaggaggagccagaggccagagtcccggcccagagtgaatctgtgcggagaccctgggagaagaacagcacaaccttgccaaggatgaagtcgtcttcttcggtgaccacttccgagacccaaccctgcacgcccagctccagtgattactcggacctacagagggtgaaacaggagcttctggaagaggtgaagaaggaattgcagaaagtgaaagaggaaatcattgaagccttcgtccaggagctgaggaagcggggttctccctgaccacagggacccagaagacccgcttctcctttccgcacacccggcctgtcaccctgctttccctgcctctacttgacttggaattggctgaagactacacaggaatgcatcgttcccactccccatcccacttggaaaactccaagggggtgtggcttccctgctcacacccacactggctgctgattggctggggaggcccccgcccttttctccctttggtccttcccctctgccatccccttggggccggtccctctgctggggatgcaccaatgaaccccacaggaagggggaaggaaggagggaatttcacattcccttgttctagattcactttaacgcttaatgccttcaaagttttggtttttttaagaaaaaaaaatatatatatatttgggttttgggggaaaagggaaatttttttttctctttggttttgataaaatgggatgtgggagtttttaaatgctatagccctgggcttgccccatttggggcagctatttaaggggaggggatgtctcaccgggctgggggtgagacatccccccaccccagggactccccttccctctggctccttccccttttctatgaggaaataagatgctgtaactttttggaacctcagttttttgattttttatttgggtaggttttggggtccaggccattttttttaccccttggaggaaataagatgagggagaaaggaaaaggggaggaaacttctcccctcccaccttcacctttagcttcttgaaaatgggcccctgcagaataaatctgccagtttttataaatgctaa

SEQ ID NO: 313047 - DNA, 2773 bp, Homo sapiens
tatactcctaacatcaacaatacgtcagtcagagaccagggattaaatcgagcacgaggcctcaccttcccggggcgggcggggtggggtgagaggggttgggccctactcccccgacttccactcccgtgcgggtgggggtctcgcccccttagtaacctctccgaaattgacagaagagaaacgctggggaggggcggtgttccgaagatgggatttcagggagaaaatctgagaccacttgcttaacttgagggtcctcctcgacccccaaaattgagcggagtacgagatggagaagtcgatggggaaagaaatcgcgccccttccgagaccctcctcagaattcccacagtgggagcgaactaggaagcaagggaggtccccttccccttcaccaacttgcccctcaggtgggggtgattcccagggtgcacccctgggctacaacattggggagaggagcgagatcgcggaagccgagggtgcagagttgcccttttaagcgccctccaccccctcgcctggaggcgcacgcggcccctttaaggcgcggggcattgtgggtgcggggagtggaattttggaacgaaatgtaacgaagagaagtacagtagtaagagtaacactgtagccgccaccggcaaggggtgcgcgctggggagcggacgctgcatcccctttctgctgcaggaacctctcatcagaccgcctgagggaagcggcgcccggagacccgccccggcccggtccacattctccccaggaagccggactctatggggcgggaccctgggggagcctgagccgagcccggagccagccccgaacccctgaacctccagccaggggcgccccgggagcagccagcccgtgggcgagccgcccgcccgccgagcagccatgagcgagacggtcatctgttccagccgggccactgtgatgctttatgatgatggcaacaagcgatggctccctgctggcacgggtccccaggccttcagccgcgtccagatctaccacaaccccacggccaattcctttcgcgtcgtgggccggaagatgcagcccgaccagcaggtggtcatcaactgtgccatcgtccggggtgtcaagtataaccaggccacccccaacttccatcagtggcgcgacgctcgccaggtctggggcctcaacttcggcagcaaggaggatgcggcccagtttgccgccggcatggccagtgccctagaggcgttggaaggcagcagcccggcccgtcggagcacatagagcgccgggtctccaatgcaggaggcccacctgctccccccgctgggggtccacccccaccaccaggacctccccctcctccaggtccccccccacccccaggtttgcccccttcgggggtcccagctgcagcgcacggagcagggggaggaccaccccctgcaccccctctcccggcagcacagggccctggtggtgggggagctggggccccaggcctggccgcagctattgctggagccaaactcaggaaagtcagcaagcaggaggaggcctcaggggggcccacagcccccaaagctgagagtggtcgaagcggaggtgggggactcatggaagagatgaacgccatgctggcccggagaaggaaagccacgcaagttggggagaaaacccccaaggatgaatctgccaatcaggaggagccagaggccagagtcccggcccagagtgaatctgtgcggagaccctgggagaagaacagcacaaccttgccaaggatgaagtcgtcttcttcggtgaccacttccgagacccaaccctgcacgcccagctccagtgattactcggacctacagagggtgaaacaggagcttctggaagaggtgaagaaggaattgcagaaagtgaaagaggaaatcattgaagccttcgtccaggagctgaggaagcggggttctccctgaccacagggacccagaagacccgcttctcctttccgcacacccggcctgtcaccctgctttccctgcctctacttgacttggaattggctgaagactacacaggaatgcatcgttcccactccccatcccacttggaaaactccaagggggtgtggcttccctgctcacacccacactggctgctgattggctggggaggcccccgcccttttctccctttggtccttcccctctgccatccccttggggccggtccctctgctggggatgcaccaatgaaccccacaggaagggggaaggaaggagggaatttcacattcccttgttctagattcactttaacgcttaatgccttcaaagttttggtttttttaagaaaaaaaaatatatatatatttgggttttgggggaaaagggaaatttttttttctctttggttttgataaaatgggatgtgggagtttttaaatgctatagccctgggcttgccccatttggggcagctatttaaggggaggggatgtctcaccgggctgggggtgagacatccccccaccccagggactccccttccctctggctccttccccttttctatgaggaaataagatgctgtaactttttggaacctcagttttttgattttttatttgggtaggttttggggtccaggccattttttttaccccttggaggaaataagatgagggagaaaggaaaaggggaggaaacttctcccctcccaccttcacctttagcttcttgaaaatgggcccctgcagaataaatctgccagtttttataaatgctaa

SEQ ID NO: 313048 - DNA, 2545 bp, Homo sapiens
tatactcctaacatcaacaatacgtcagtcagagaccagggattaaatcgagcacgaggcctcaccttcccggggcgggcggggtggggtgagaggggttgggccctactcccccgacttccactcccgtgcgggtgggggtctcgcccccttagtaacctctccgaaattgacagaagagaaacgctggggaggggcggtgttccgaagatgggatttcagggagaaaatctgagaccacttgcttaacttgagggtcctcctcgacccccaaaattgagcggagtacgagatggagaagtcgatggggaaagaaatcgcgccccttccgagaccctcctcagaattcccacagtgggagcgaactaggaagcaagggaggtccccttccccttcaccaacttgcccctcaggtgggggtgattcccagggtgcacccctgggctacaacattggggagaggagcgagatcgcggaagccgagggtgcagagttgcccttttaagcgccctccaccccctcgcctggaggcgcacgcggcccctttaaggcgcggggcattgtgggtgcggggagtggaattttggaacgaaatgtaacgaagagaagtacagtagtaagagtaacactgtagccgccaccggcaaggggtgcgcgctggggagcggacgctgcatcccctttctgctgcaggaacctctcatcagaccgcctgagggaagcggcgcccggagacccgccccggcccggtccacattctccccaggaagccggactctatggggcgggaccctgggggagcctgagccgagcccggagccagccccgaacccctgaacctccagccaggggcgccccgggagcagccagcccgtgggcgagccgcccgcccgccgagcagccatgagcgagacggtcatctgttccagccgggccactgtgatgctttatgatgatggcaacaagcgatggctccctgctggcacgggtccccaggccttcagccgcgtccagatctaccacaaccccacggccaattcctttcgcgtcgtgggccggaagatgcagcccgaccagcaggtggtcatcaactgtgccatcgtccggggtgtcaagtataaccagctccaggtccccccccacccccaggtttgcccccttcgggggtcccagctgcagcgcacggagcagggggaggaccaccccctgcaccccctctcccggcagcacagggccctggtggtgggggagctggggccccaggcctggccgcagctattgctggagccaaactcaggaaagtcagcaagcaggaggaggcctcaggggggcccacagcccccaaagctgagagtggtcgaagcggaggtgggggactcatggaagagatgaacgccatgctggcccggagaaggaaagccacgcaagttggggagaaaacccccaaggatgaatctgccaatcaggaggagccagaggccagagtcccggcccagagtgaatctgtgcggagaccctgggagaagaacagcacaaccttgccaaggatgaagtcgtcttcttcggtgaccacttccgagacccaaccctgcacgcccagctccagtgattactcggacctacagagggtgaaacaggagcttctggaagaggtgaagaaggaattgcagaaagtgaaagaggaaatcattgaagccttcgtccaggagctgaggaagcggggttctccctgaccacagggacccagaagacccgcttctcctttccgcacacccggcctgtcaccctgctttccctgcctctacttgacttggaattggctgaagactacacaggaatgcatcgttcccactccccatcccacttggaaaactccaagggggtgtggcttccctgctcacacccacactggctgctgattggctggggaggcccccgcccttttctccctttggtccttcccctctgccatccccttggggccggtccctctgctggggatgcaccaatgaaccccacaggaagggggaaggaaggagggaatttcacattcccttgttctagattcactttaacgcttaatgccttcaaagttttggtttttttaagaaaaaaaaatatatatatatttgggttttgggggaaaagggaaatttttttttctctttggttttgataaaatgggatgtgggagtttttaaatgctatagccctgggcttgccccatttggggcagctatttaaggggaggggatgtctcaccgggctgggggtgagacatccccccaccccagggactccccttccctctggctccttccccttttctatgaggaaataagatgctgtaactttttggaacctcagttttttgattttttatttgggtaggttttggggtccaggccattttttttaccccttggaggaaataagatgagggagaaaggaaaaggggaggaaacttctcccctcccaccttcacctttagcttcttgaaaatgggcccctgcagaataaatctgccagtttttataaatgctaa

SEQ ID NO: 313049 - DNA, 1584 bp, Homo sapiens
ggctcagcccggagccggcgtgtgggggcgggggctcccgggagggtctcctcacctgcagcagcccggcccgtcggagcacatagagcgccgggtctccaatgcaggaggcccacctgctccccccgctgggggtccacccccaccaccaggacctccccctcctccaggtccccccccacccccaggtttgcccccttcgggggtcccagctgcagcgcacggagcagggggaggaccaccccctgcaccccctctcccggcagcacagggccctggtggtgggggagctggggccccaggcctggccgcagctattgctggagccaaactcaggaaagtcagcaagcaggaggaggcctcaggggggcccacagcccccaaagctgagagtggtcgaagcggaggtgggggactcatggaagagatgaacgccatgctggcccggagaaggaaagccacgcaagttggggagaaaacccccaaggatgaatctgccaatcaggaggagccagaggccagagtcccggcccagagtgaatctgtgcggagaccctgggagaagaacagcacaaccttgccaaggatgaagtcgtcttcttcggtgaccacttccgagacccaaccctgcacgcccagctccagtgattactcggacctacagagggtgaaacaggagcttctggaagaggtgaagaaggaattgcagaaagtgaaagaggaaatcattgaagccttcgtccaggagctgaggaagcggggttctccctgaccacagggacccagaagacccgcttctcctttccgcacacccggcctgtcaccctgctttccctgcctctacttgacttggaattggctgaagactacacaggaatgcatcgttcccactccccatcccacttggaaaactccaagggggtgtggcttccctgctcacacccacactggctgctgattggctggggaggcccccgcccttttctccctttggtccttcccctctgccatccccttggggccggtccctctgctggggatgcaccaatgaaccccacaggaagggggaaggaaggagggaatttcacattcccttgttctagattcactttaacgcttaatgccttcaaagttttggtttttttaagaaaaaaaaatatatatatatttgggttttgggggaaaagggaaatttttttttctctttggttttgataaaatgggatgtgggagtttttaaatgctatagccctgggcttgccccatttggggcagctatttaaggggaggggatgtctcaccgggctgggggtgagacatccccccaccccagggactccccttccctctggctccttccccttttctatgaggaaataagatgctgtaactttttggaacctcagttttttgattttttatttgggtaggttttggggtccaggccattttttttaccccttggaggaaataagatgagggagaaaggaaaaggggaggaaacttctcccctcccaccttcacctttagcttcttgaaaatgggcccctgcagaataaatctgccagtttttataaatgctaa

SEQ ID NO: 313050 - DNA, 2407 bp, Homo sapiens
tatactcctaacatcaacaatacgtcagtcagagaccagggattaaatcgagcacgaggcctcaccttcccggggcgggcggggtggggtgagaggggttgggccctactcccccgacttccactcccgtgcgggtgggggtctcgcccccttagtaacctctccgaaattgacagaagagaaacgctggggaggggcggtgttccgaagatgggatttcagggagaaaatctgagaccacttgcttaacttgagggtcctcctcgacccccaaaattgagcggagtacgagatggagaagtcgatggggaaagaaatcgcgccccttccgagaccctcctcagaattcccacagtgggagcgaactaggaagcaagggaggtccccttccccttcaccaacttgcccctcaggtgggggtgattcccagggtgcacccctgggctacaacattggggagaggagcgagatcgcggaagccgagggtgcagagttgcccttttaagcgccctccaccccctcgcctggaggcgcacgcggcccctttaaggcgcggggcattgtgggtgcggggagtggaattttggaacgaaatgtaacgaagagaagtacagtagtaagagtaacactgtagccgccaccggcaaggggtgcgcgctggggagcggacgctgcatcccctttctgctgcaggaacctctcatcagaccgcctgagggaagcggcgcccggagacccgccccggcccggtccacattctccccaggaagccggactctatggggcgggaccctgggggagcctgagccgagcccggagccagccccgaacccctgaacctccagccaggggcgccccgggagcagccagcccgtgggcgagccgcccgcccgccgagcagccatgagcgagacggtcatctgttccagccgggccactgtgatgctttatgatgatggcaacaagcgatggctccctgctggcacgggtccccaggccttcagccgcgtccagatctaccacaaccccacggccaattcctttcgcgtcgtgggccggaagatgcagcccgaccagcaggtggtcatcaactgtgccatcgtccggggtgtcaagtataaccaggcctggccgcagctattgctggagccaaactcaggaaagtcagcaagcaggaggaggcctcaggggggcccacagcccccaaagctgagagtggtcgaagcggaggtgggggactcatggaagagatgaacgccatgctggcccggagaaggaaagccacgcaagttggggagaaaacccccaaggatgaatctgccaatcaggaggagccagaggccagagtcccggcccagagtgaatctgtgcggagaccctgggagaagaacagcacaaccttgccaaggatgaagtcgtcttcttcggtgaccacttccgagacccaaccctgcacgcccagctccagtgattactcggacctacagagggtgaaacaggagcttctggaagaggtgaagaaggaattgcagaaagtgaaagaggaaatcattgaagccttcgtccaggagctgaggaagcggggttctccctgaccacagggacccagaagacccgcttctcctttccgcacacccggcctgtcaccctgctttccctgcctctacttgacttggaattggctgaagactacacaggaatgcatcgttcccactccccatcccacttggaaaactccaagggggtgtggcttccctgctcacacccacactggctgctgattggctggggaggcccccgcccttttctccctttggtccttcccctctgccatccccttggggccggtccctctgctggggatgcaccaatgaaccccacaggaagggggaaggaaggagggaatttcacattcccttgttctagattcactttaacgcttaatgccttcaaagttttggtttttttaagaaaaaaaaatatatatatatttgggttttgggggaaaagggaaatttttttttctctttggttttgataaaatgggatgtgggagtttttaaatgctatagccctgggcttgccccatttggggcagctatttaaggggaggggatgtctcaccgggctgggggtgagacatccccccaccccagggactccccttccctctggctccttccccttttctatgaggaaataagatgctgtaactttttggaacctcagttttttgattttttatttgggtaggttttggggtccaggccattttttttaccccttggaggaaataagatgagggagaaaggaaaaggggaggaaacttctcccctcccaccttcacctttagcttcttgaaaatgggcccctgcagaataaatctgccagtttttataaatgctaa

SEQ ID NO: 313051 - DNA, 2300 bp, Homo sapiens
tatactcctaacatcaacaatacgtcagtcagagaccagggattaaatcgagcacgaggcctcaccttcccggggcgggcggggtggggtgagaggggttgggccctactcccccgacttccactcccgtgcgggtgggggtctcgcccccttagtaacctctccgaaattgacagaagagaaacgctggggaggggcggtgttccgaagatgggatttcagggagaaaatctgagaccacttgcttaacttgagggtcctcctcgacccccaaaattgagcggagtacgagatggagaagtcgatggggaaagaaatcgcgccccttccgagaccctcctcagaattcccacagtgggagcgaactaggaagcaagggaggtccccttccccttcaccaacttgcccctcaggtgggggtgattcccagggtgcacccctgggctacaacattggggagaggagcgagatcgcggaagccgagggtgcagagttgcccttttaagcgccctccaccccctcgcctggaggcgcacgcggcccctttaaggcgcggggcattgtgggtgcggggagtggaattttggaacgaaatgtaacgaagagaagtacagtagtaagagtaacactgtagccgccaccggcaaggggtgcgcgctggggagcggacgctgcatcccctttctgctgcaggaacctctcatcagaccgcctgagggaagcggcgcccggagacccgccccggcccggtccacattctccccaggaagccggactctatggggcgggaccctgggggagcctgagccgagcccggagccagccccgaacccctgaacctccagccaggggcgccccgggagcagccagcccgtgggcgagccgcccgcccgccgagcagccatgagcgagacggtcatctgttccagccgggccactgtgatgctttatgatgatggcaacaagcgatggctccctgctggcacgggtccccaggccttcagccgcgtccagatctaccacaaccccacggccaattcctttcgcgtcgtgggccggaagatgcagcccgaccagcaggtggtcatcaactgtgccatcgtccggggtgtcaagtataaccaggccacccccaacttccatcagtggcgcgacgctcgccaggtctggggcctcaacttcggcagcaaggaggatgcggcccagtttgccgccggcatggccagtgccctagaggcgttggaaggaggtgggccccctccacccccagcacttcccacctggtcggtcccgaacggcccctccccggaggaggtggagcagcagaaaaggcagcagcccggcccgtcggagcacatagagcgccgggtctccaatgcaggaggcccacctgctccccccgctgggggtccacccccaccaccaggacctccccctcctccaggtccccccccacccccaggtttgcccccttcgggggtcccagctgcagcgcacggagcagggggaggaccaccccctgcaccccctctcccggcagcacagggccctggtggtgggggagctggggccccaggcctggccgcagctattgctggagccaaactcaggaaagtcagcaagcaggaggaggcctcaggggggcccacagcccccaaagctgagagtggtcgaagcggaggtgggggactcatggaagagatgaacgccatgctggcccggagaaggaaagccacgcaagttggggagaaaacccccaaggatgaatctgccaatcaggaggagccagaggccagagtcccggcccagagtgaatctgtgcggagaccctgggagaagaacagcacaaccttgccaaggatgaagtcgtcttcttcggtgaccacttccgagacccaaccctgcacgcccagctccagtgattactcggacctacagagggtgaaacaggagcttctggaagaggtgaagaaggaattgcagaaagtgaaagaggaaatcattgaagccttcgtccaggagctgaggaagcggggttctccctgaccacagggacccagaagacccgcttctcctttccgcacacccggcctgtcaccctgctttccctgcctctacttgacttggaattggctgaagactacacaggaatgcatcgttcccactccccatcccacttggaggaaataagatgagggagaaaggaaaaggggaggaaacttctcccctcccaccttcacctttagcttcttgaaaatgggcccctgcagaataaatctgccagtttttataaatgctaa

SEQ ID NO: 313052 - DNA, 1440 bp, Homo sapiens
tatactcctaacatcaacaatacgtcagtcagagaccagggattaaatcgagcacgaggcctcaccttcccggggcgggcggggtggggtgagaggggttgggccctactcccccgacttccactcccgtgcgggtgggggtctcgcccccttagtaacctctccgaaattgacagaagagaaacgctggggaggggcggtgttccgaagatgggatttcagggagaaaatctgagaccacttgcttaacttgagggtcctcctcgacccccaaaattgagcggagtacgagatggagaagtcgatggggaaagaaatcgcgccccttccgagaccctcctcagaattcccacagtgggagcgaactaggaagcaagggaggtccccttccccttcaccaacttgcccctcaggtgggggtgattcccagggtgcacccctgggctacaacattggggagaggagcgagatcgcggaagccgagggtgcagagttgcccttttaagcgccctccaccccctcgcctggaggcgcacgcggcccctttaaggcgcggggcattgtgggtgcggggagtggaattttggaacgaaatgtaacgaagagaagtacagtagtaagagtaacactgtagccgccaccggcaaggggtgcgcgctggggagcggacgctgcatcccctttctgctgcaggaacctctcatcagaccgcctgagggaagcggcgcccggagacccgccccggcccggtccacattctccccaggaagccggactctatggggcgggaccctgggggagcctgagccgagcccggagccagccccgaacccctgaacctccagccaggggcgccccgggagcagccagcccgtgggcgagccgcccgcccgccgagcagccatgagcgagacggtcatctgttccagccgggccactgtgatgctttatgatgatggcaacaagcgatggctccctgctggcacgggtccccaggccttcagccgcgtccagatctaccacaaccccacggccaattcctttcgcgtcgtgggccggaagatgcagcccgaccagcaggtggtcatcaactgtgccatcgtccggggtgtcaagtataaccaggccacccccaacttccatcagtggcgcgacgctcgccaggtctggggcctcaacttcggcagcaaggaggatgcggcccagtttgccgccggcatggccagtgccctagaggcgttggaaggaggtgggccccctccacccccagcacttcccacctggtcggtcccgaacggcccctccccggaggaggtggagcagcagaaaaggcagcagcccggcccgtcggagcacatagagcgccgggtctccaatgcaggaggcccacctgctccccccgatgggggtccaggcgggggagcggggggggtggagggg

SEQ ID NO: 313053 - DNA, 2762 bp, Homo sapiens
tatactcctaacatcaacaatacgtcagtcagagaccagggattaaatcgagcacgaggcctcaccttcccggggcgggcggggtggggtgagaggggttgggccctactcccccgacttccactcccgtgcgggtgggggtctcgcccccttagtaacctctccgaaattgacagaagagaaacgctggggaggggcggtgttccgaagatgggatttcagggagaaaatctgagaccacttgcttaacttgagggtcctcctcgacccccaaaattgagcggagtacgagatggagaagtcgatggggaaagaaatcgcgccccttccgagaccctcctcagaattcccacagtgggagcgaactaggaagcaagggaggtccccttccccttcaccaacttgcccctcaggtgggggtgattcccagggtgcacccctgggctacaacattggggagaggagcgagatcgcggaagccgagggtgcagagttgcccttttaagcgccctccaccccctcgcctggaggcgcacgcggcccctttaaggcgcggggcattgtgggtgcggggagtggaattttggaacgaaatgtaacgaagagaagtacagtagtaagagtaacactgtagccgccaccggcaaggggtgcgcgctggggagcggacgctgcatcccctttctgctgcaggaacctctcatcagaccgcctgagggaagcggcgcccggagacccgccccggcccggtccacattctccccaggaagccggactctatggggcgggaccctgggggagcctgagccgagcccggagccagccccgaacccctgaacctccagccaggggcgccccgggagcagccagcccgtgggcgagccgcccgcccgccgagcagccatgagcgagacggtcatctgttccagccgggccactgtgatgctttatgatgatggcaacaagcgatggctccctgctggcacgggtccccaggccttcagccgcgtccagatctaccacaaccccacggccaattcctttcgcgtcgtgggccggaagatgcagcccgaccagcaggtggtcatcaactgtgccatcgtccggggtgtcaagtataaccaggccacccccaacttccatcagtggcgcgacgctcgccaggtctggggcctcaacttcggcagcaaggaggatgcggcccagtttgccgccggcatggccagtgccctagaggcgttggaaggaggtgggccccctccacccccagcacttcccacctggtcggtcccgaacggcccctccccggaggaggtggagcagcagaaaaggcagcagcccggcccgtcggagcacatagagcgccgggtctccaatgcaggaggcccacctgctccccccgctgggggtccacccccaccaccaggacctccccctcctccaggtccccccccacccccaggtttgcccccttcgggggtcccagctgcagcgcacggagcagggggaggaccaccccctgcaccccctctcccggcagcacagggccctggtggtgggggagctggggccccaggcctggccgcagctattgctggagccaaactcaggaaagtcagcaagcaggaggaggcctcaggggggcccacagcccccaaagctgagagtggtcgaagcggaggtgggggactcatggaagagatgaacgccatgctggcccggagaaggaaagccacgcaagttggggagaaaacccccaaggatgaatctgccaatcaggaggagccagaggccagagtcccggcccagagtggtgagtagagtgcccagtccagccacaggaactacaaatcccagaatactctgttctcacatgttaagcacccttataggagagtcagggcgaatggtgctggggattgtagtctcctgagatggggctttgatcaggggctgatgaggttgggggagtaagattgattggggggcagtcttttgtccctgatctttctgatttcttgcctatccccagaatctgtgcggagaccctgggagaagaacagcacaaccttgccaaggatgaagtcgtcttcttcggtgaccacttccgagacccaaccctgcacgcccagctccagtgattactcggacctacagagggtgaaacaggtaacttgggggggaagttggggaccacagcaagagagatctaggtctggcccctgccactggcatgccgtatgatcctagataacatctcagaaacctcaggtttccaatctgacaaatggagaaactggattgggtcaaggatgaccgagactccacacccccttttctggcacctgtgacagacattattaatctatcaccgcgctcattccagatgagtgccttgaattctttccgcacattgacccagctgtccatcaccaattggagttggcaggaggctggaatgcgcttgccaaccttggtactggatgttctccagtacttttccggctccaaggatccagaattctcccctagaatcctccagtcactctgcgaccttgacagcgatgtcatggtgtcgatgtaggggtaggtctcaaacctactacccctggcttttccatcaacaagaaagaggggactctggcagggcacggtggctcatgtgtgtaatttcagcacattgcgaggctgaggtgggagcattgcttgaggccaggagtttgagaccagcctggggcaacatcgggagacccccatctcta

SEQ ID NO: 313054 - DNA, 1484 bp, Homo sapiens
  misc_feature (1340)..(1340): n is a, c, g, or t
tatactcctaacatcaacaatacgtcagtcagagaccagggattaaatcgagcacgaggcctcaccttcccggggcgggcggggtggggtgagaggggttgggccctactcccccgacttccactcccgtgcgggtgggggtctcgcccccttagtaacctctccgaaattgacagaagagaaacgctggggaggggcggtgttccgaagatgggatttcagggagaaaatctgagaccacttgcttaacttgagggtcctcctcgacccccaaaattgagcggagtacgagatggagaagtcgatggggaaagaaatcgcgccccttccgagaccctcctcagaattcccacagtgggagcgaactaggaagcaagggaggtccccttccccttcaccaacttgcccctcaggtgggggtgattcccagggtgcacccctgggctacaacattggggagaggagcgagatcgcggaagccgagggtgcagagttgcccttttaagcgccctccaccccctcgcctggaggcgcacgcggcccctttaaggcgcggggcattgtgggtgcggggagtggaattttggaacgaaatgtaacgaagagaagtacagtagtaagagtaacactgtagccgccaccggcaaggggtgcgcgctggggagcggacgctgcatcccctttctgctgcaggaacctctcatcagaccgcctgagggaagcggcgcccggagacccgccccggcccggtccacattctccccaggaagccggactctatggggcgggaccctgggggagcctgagccgagcccggagccagccccgaacccctgaacctccagccaggggcgccccgggagcagccagcccgtgggcgagccgcccgcccgccgagcagccatgagcgagacggtcatctgttccagccgggccactgtgatgctttatgatgatggcaacaagcgatggctccctgctggcacgggtccccaggccttcagccgcgtccagatctaccacaaccccacggccaattcctttcgcgtcgtgggccggaagatgcagcccgaccagcaggtggtcatcaactgtgccatcgtccggggtgtcaagtataaccaggccacccccaacttccatcagtggcgcgacgctcgccaggtctggggcctcaacttcggcagcaaggaggatgcggcccagtttgccgccggcatggccagtgccctagaggcgttggaaggaggtgggccccctccacccccagcacttcccacctggtcggtcccgaacggcccctccccggaggaggtggagcagcagaaaagcagagccgnccgtgaacactagagcgcggtcttcatggacggaggccaacttgtcacgcgaggacagaccacaaaccacgtcaaccgacacagaacacgcaagaacatcaaccaacaaccgcgcacgacaacaacacaagcacacacttaaca

SEQ ID NO: 313055 - DNA, 2567 bp, Homo sapiens
atagcggctcgccgaggcgctggtgcacgggggcagcgcgcagcaggccggcgggcaggcgggcgggctggctggcaggcaggactgggatcgaggcccagaaaacggagcagcgggcaccagggaggcctggaacggggcgagcgccatgagcaacaaatgcgacgtggtcgtggtggggggcggcatctcaggtatggcagcagccaaacttctgcatgactctggactgaatgtggttgttctggaagcccgggaccgtgtgggaggcaggacttacactcttaggaaccaaaaggttaaatatgtggaccttggaggatcctatgttggaccaacccagaatcgtatcttgagattagccaaggagctaggattggagacctacaaagtgaatgaggttgagcgtctgatccaccatgtaaagggcaaatcataccccttcagggggccattcccacctgtatggaatccaattacctacttagatcataacaacttttggaggacaatggatgacatggggcgagagattccgagtgatgccccatggaaggctccccttgcagaagagtgggacaacatgacaatgaaggagctactggacaagctctgctggactgaatctgcaaagcagcttgccactctctttgtgaacctgtgtgtcactgcagagacccatgaggtctctgctctctggttcctgtggtatgtgaagcagtgtggaggcacaacaagaatcatctcgacaacaaatggaggacaggagaggaaatttgtgggcggatctggtcaagtgagtgagcggataatggacctccttggagaccgagtgaagctggagaggcctgtgatctacattgaccagacaagagaaaatgtccttgtggagaccctaaaccatgagatgtatgaggctaaatatgtgattagtgctattcctcctactctgggcatgaagattcacttcaatccccctctgccaatgatgagaaaccagatgatcactcgtgtgcctttgggttcagtcatcaagtgtatagtttattataaagagcctttctggaggaaaaaggattactgtggaaccatgattattgatggagaagaagctccagttgcctacacgttggatgataccaaacctgaaggcaactatgctgccataatgggatttatcctggcccacaaagccagaaaactggcacgtcttaccaaagaggaaaggttgaagaaactttgtgaactctatgccaaggttctgggttccctagaagctctggagccagtgcattatgaagaaaagaactggtgtgaggagcagtactctgggggctgctacacaacttatttcccccctgggatcctgactcaatatggaagggttctacgccagccagtggacaggatttactttgcaggcaccgagactgccacacactggagcggctacatggagggggctgtagaggccggggagagagcagcccgagagatcctgcatgccatggggaagattccagaggatgaaatctggcagtcagaaccagagtctgtggatgtccctgcacagcccatcaccaccacctttttggagagacatttgccctccgtgccaggcctgctcaggctgattggattgaccaccatcttttcagcaacggctcttggcttcctggcccacaaaagggggctacttgtgagagtctaaagagagagggtgtctgtaatcacactctcttcttactgtatttgggatatgagtttggggaaagagttgcagtaaagttccatgaagacaaatagtgtggagtgaggcggggagcatgaagataaatccaactctgactgtaaaatacatggtatctctttctccgttgtggcccctgcttagtgtcccttacctggcttagcgttctgtttcaccagtttccaagtttattgccctcaaaatctttagaatagttaaattggcttgtttaaggttcttgctgccccacaacacaccttgcccatgcacaaggaatgaattttttcctaccattatggctttgtgcttgttcttcctcttacctgtaatagcctcaccttccctagttctttgcattcgtccttagaatactgtattgttacagctgaaagacagtaaagaccatttagtcctcaccttctgttttagagttgagcaaactgaagcccacagaggtggaacttaattacctaagagccacaataagccactggtatctgggggactagaacacaaatccaacgcttttcccacctctttggatgttttccccaattatcctccttcactccctgtcatagttaccgatggtgtcccgttgtgtgggtttactctgtgctaagttgtcttacacttctcaaatgctactcagtatatagccttaagtcttactgttttgtgcggtgtgtctccagctgattttaacttttttgatggtagaaattttatctcttcttccttttgtatcctccattgtatcttcatacaaaggacagtacacacttgggtaattaaaaataaaagttgattgaccata

SEQ ID NO: 313056 - DNA, 652 bp, Homo sapiens
agtgtccctacctgggtaacggtcggcacaagttccaaagttattggctcaaaatcttagaataggttaaattgctgaaggtccttctgccccccaaacaccttgggcatgccaaaagaataattccccccacaaaggggtgtgggggttgtccctcctacccggaaaaaccccccctttcaatgttttgcaattggcccttaatactgtattgttacagctgaaagacagtaaagaccatttagtcctcaccttctgttttagagttgagcaaactgaagcccacagaggtggaacttaattacctaagagccacaataagccactggtatctgggggactagaacacaaatccaacgcttttcccacctctttggatgttttccccaattatcctccttcactccctgtcatagttaccgatggtgtcccgttgtgtgggtttactctgtgctaagttgtcttacacttctcaaatgctactcagtatatagccttaagtcttactgttttgtgcggtgtgtctccagctgattttaacttttttgatggtagaaattttatctcttcttccttttgtatcctccattgtatcttcatacaaaggacagtacacacttgggtaattaaaaataaaagttgattgaccata

SEQ ID NO: 313057 - DNA, 469 bp, Homo sapiens
atagcggctcgccgaggcgctggtgcacgggggcagcgcgcagcaggccggcgggcaggcgggcgggctggctggcaggcaggactgggatcgaggcccagaaaacggagcagcgggcaccagggaggcctggaacggggcgagcgccatgagcaacaaatgcgacgtggtcgtggtggggggcggcatctcagggccccagccgattggattggatggtgcccactacattgagagccggttttcctctcccagtctgccaactcccatgccagtttcttctggaaacaccctcacagggacacccagaaacaatgcttcacctgccatctagaaacatcagactctgggcctctattgacaaaccgtatccacttgtaagttgaatgtaacaataggcggtgcacgtgagccagcatggacttttctcattggctgttagcatgaggagcttgtctggcatccttgt

SEQ ID NO: 313058 - DNA, 3162 bp, Homo sapiens
atagcggctcgccgaggcgctggtgcacgggggcagcgcgcagcaggccggcgggcaggcgggcgggctggctggcaggcaggactgggatcgaggcccagaaaacggagcagcgggcaccagggaggcctggaacggggcgagcgccatgagcaacaaatgcgacgtggtcgtggtggggggcggcatctcaggtatggcagcagccaaacttctgcatgactctggactgaatgtggttgttctggaagcccgggaccgtgtgggaggcaggacttacactcttaggaaccaaaaggttaaatatgtggaccttggaggatcctatgttggaccaacccagaatcgtatcttgagattagccaaggagctaggattggagacctacaaagtgaatgaggttgagcgtctgatccaccatgtaaagggcaaatcataccccttcagggggccattcccacctgtatggaatccaattacctacttagatcataacaacttttggaggacaatggatgacatggggcgagagattccgagtgatgccccatggaaggctccccttgcagaagagtgggacaacatgacaatgaaggagctactggacaagctctgctggactgaatctgcaaagcagcttgccactctctttgtgaacctgtgtgtcactgcagagacccatgaggtctctgctctctggttcctgtggtatgtgaagcagtgtggaggcacaacaagaatcatctcgacaacaaatggaggacaggagaggaaatttgtgggcggatctggtcaagtgagtgagcggataatggacctccttggagaccgagtgaagctggagaggcctgtgatctacattgaccagacaagagaaaatgtccttgtggagaccctaaaccatgagatgtatgaggctaaatatgtgattagtgctattcctcctactctgggcatgaagattcacttcaatccccctctgccaatgatgagaaaccagatgatcactcgtgtgcctttgggttcagtcatcaagtgtatagtttattataaagagcctttctggaggaaaaaggattactgtggaaccatgattattgatggagaagaagctccagttgcctacacgttggatgataccaaacctgaaggcaactatgctgccataatgggatttatcctggcccacaaagccagaaaactggcacgtcttaccaaagaggaaaggttgaagaaactttgtgaactctatgccaaggttctgggttccctagaagctctggagccagtgcattatgaagaaaagaactggtgtgaggagcagtactctgggggctgctacacaacttatttcccccctgggatcctgactcaatatggaagggttctacgccagccagtggacaggatttactttgcaggcaccgagactgccacacactggagcggctacatggagggggctgtagaggccggggagagagcagcccgagagatcctgcatgccatggggaagattccagaggatgaaatctggcagtcagaaccagagtctgtggatgtccctgcacagcccatcaccaccacctttttggagagacatttgccctccgtgccaggcctgctcaggctgattggattgaccaccatcttttcagcaacggctcttggcttcctggcccacaaaagggggctacttgtgagagtctaaagagagagggtgtctgtaatcacactctcttcttactgtatttgggatatgagtttggggaaagagttgcagtaaagttccatgaagacaaatagtgtggagtgaggcggggagcatgaagataaatccaactctgactgtaaaatacatggtatctctttctccgttgtggcccctgcttagtgtcccttacctggcttagcgttctgtttcaccagtttccaagtttattgccctcaaaatctttagaatagttaaattggcttgtttaaggttcttgctgccccacaacacaccttgcccatgcacaaggaatgaattttttcctaccattatggctttgtgcttgttcttcctcttacctgtaatagcctcaccttccctagttctttgcattcgtccttagaatactgtattgttacagctgaaagacagtaaagaccatttagtcctcaccttctgttttagagttgagcaaactgaagcccacagaggtggaacttaattacctaagagccacaataagccactggtatctgggggactagaacacaaatccaacgcttttcccacctctttggatgttttccccaattatcctccttcactccctgtcatagttaccgatggtgtcccgttgtgtgggtttactctgtgctaagttgtcttacacttctcaaatgctactcagtatatagccttaagtcttactgttttgtgcggtgtgtctccagctgattttaacttttttgatggtagaaattttatctcttcttccttttgtatcctccattgtatcttcatacaaaggacagtacacacttgggtaattaaaaataaaagttgattgaccataaaaaaaaaaaaaaaaaaaaaaaaaaaaaaaaaaaaaaaaaaaaaaaaaaaaaaaaaaaaaaaaaaaaagggggggggcggcgagacgacaaagacctcccacgaggggagggggagcaccagaagataggaagccgccacaccgtcgttattagataccacaaggagggcgacgacaaaagaaggaggagagatacatataacaagagcaagcgcgagcagggcggcgaagagaaaacaaaaagccatcagagagagaaaacaacacgtgacaccaaaaggagaaataaagcgaaggagggacgaaacaacaacacaggggagggaggagaaagcacacacaaaatacaggagggagaaacacacaacagcagacaaaaaagaagcataaaataccgcacccacacgaggggggaacaaaaactaacaacacaaagagcagaagaagagtgaacaactgggagacgacaacaaacacacacacgacgagacgtcaatcgaaagaaggacggacgagaaagaaagagaaaagtacatagctgccgaaagcgaagaaagaaatcagtacacaaaagaaaaaaacttataccaaccgg

SEQ ID NO: 313059 - DNA, 2757 bp, Homo sapiens
atagcggctcgccgaggcgctggtgcacgggggcagcgcgcagcaggccggcgggcaggcgggcgggctggctggcaggcaggactgggatcgaggcccagaaaacggagcagcgggcaccagggaggcctggaacggggcgagcgccatgagcaacaaatgcgacgtggtcgtggtggggggcggcatctcagggccccagccgattggattggatggtgcccactacattgagagccggttttcctctcccagtctgccaactcccatgccagtttcttctggaaacaccctcacagggacacccagaaacaatgcttcacctgccatctaggtatcccaccatccagtcaagttgacacctaaaattaaccatcacaatgggtatggcagcagccaaacttctgcatgactctggactgaatgtggttgttctggaagcccgggaccgtgtgggaggcaggacttacactcttaggaaccaaaaggttaaatatgtggaccttggaggatcctatgttggaccaacccagaatcgtatcttgagattagccaaggagctaggattggagacctacaaagtgaatgaggttgagcgtctgatccaccatgtaaagggcaaatcataccccttcagggggccattcccacctgtatggaatccaattacctacttagatcataacaacttttggaggacaatggatgacatggggcgagagattccgagtgatgccccatggaaggctccccttgcagaagagtgggacaacatgacaatgaaggagctactggacaagctctgctggactgaatctgcaaagcagcttgccactctctttgtgaacctgtgtgtcactgcagagacccatgaggtctctgctctctggttcctgtggtatgtgaagcagtgtggaggcacaacaagaatcatctcgacaacaaatggaggacaggagaggaaatttgtgggcggatctggtcaagtgagtgagcggataatggacctccttggagaccgagtgaagctggagaggcctgtgatctacattgaccagacaagagaaaatgtccttgtggagaccctaaaccatgagatgtatgaggctaaatatgtgattagtgctattcctcctactctgggcatgaagattcacttcaatccccctctgccaatgatgagaaaccagatgatcactcgtgtgcctttgggttcagtcatcaagtgtatagtttattataaagagcctttctggaggaaaaaggattactgtggaaccatgattattgatggagaagaagctccagttgcctacacgttggatgataccaaacctgaaggcaactatgctgccataatgggatttatcctggcccacaaagccagaaaactggcacgtcttaccaaagaggaaaggttgaagaaactttgtgaactctatgccaaggttctgggttccctagaagctctggagccagtgcattatgaagaaaagaactggtgtgaggagcagtactctgggggctgctacacaacttatttcccccctgggatcctgactcaatatggaagggttctacgccagccagtggacaggatttactttgcaggcaccgagactgccacacactggagcggctacatggagggggctgtagaggccggggagagagcagcccgagagatcctgcatgccatggggaagattccagaggatgaaatctggcagtcagaaccagagtctgtggatgtccctgcacagcccatcaccaccacctttttggagagacatttgccctccgtgccaggcctgctcaggctgattggattgaccaccatcttttcagcaacggctcttggcttcctggcccacaaaagggggctacttgtgagagtctaaagagagagggtgtctgtaatcacactctcttcttactgtatttgggatatgagtttggggaaagagttgcagtaaagttccatgaagacaaatagtgtggagtgaggcggggagcatgaagataaatccaactctgactgtaaaatacatggtatctctttctccgttgtggcccctgcttagtgtcccttacctggcttagcgttctgtttcaccagtttccaagtttattgccctcaaaatctttagaatagttaaattggcttgtttaaggttcttgctgccccacaacacaccttgcccatgcacaaggaatgaattttttcctaccattatggctttgtgcttgttcttcctcttacctgtaatagcctcaccttccctagttctttgcattcgtccttagaatactgtattgttacagctgaaagacagtaaagaccatttagtcctcaccttctgttttagagttgagcaaactgaagcccacagaggtggaacttaattacctaagagccacaataagccactggtatctgggggactagaacacaaatccaacgcttttcccacctctttggatgttttccccaattatcctccttcactccctgtcatagttaccgatggtgtcccgttgtgtgggtttactctgtgctaagttgtcttacacttctcaaatgctactcagtatatagccttaagtcttactgttttgtgcggtgtgtctccagctgattttaacttttttgatggtagaaattttatctcttcttccttttgtatcctccattgtatcttcatacaaaggacagtacacacttgggtaattaaaaataaaagttgattgaccata

SEQ ID NO: 313060 - DNA, 2096 bp, Homo sapiens
atagcggctcgccgaggcgctggtgcacgggggcagcgcgcagcaggccggcgggcaggcgggcgggctggctggcaggcaggactgggatcgaggcccagaaaacggagcagcgggcaccagggaggcctggaacggggcgagcgccatgagcaacaaatgcgacgtggtcgtggtggggggcggcatctcaggtatggcagcagccaaacttctgcatgactctggactgaatgtggttgttctggaagcccgggaccgtgtgggaggcaggacttacactcttaggaaccaaaaggttaaatatgtggaccttggaggatcctatgttggaccaacccagaatcgtatcttgagattagccaaggagctaggattggagacctacaaagtgaatgaggttgagcgtctgatccaccatgtaaagggcaaatcataccccttcagggggccattcccacctgtatggaatccaattacctacttagatcataacaacttttggaggacaatggatgacatggggcgagagattccgagtgatgccccatggaaggctccccttgcagaagagtgggacaacatgacaatgaaggagctactggacaagctctgctggactgaatctgcaaagcagcttgccactctctttgtgaacctgtgtgtcactgcagagacccatgaggtctctgctctctggttcctgtggtatgtgaagcagtgtggaggcacaacaagaatcatctcgacaacaaatggaggacaggagaggaaatttgtgggcggatctggtcaagtgagtgagcggataatggacctccttggagaccgagtgaagctggagaggcctgtgatctacattgaccagacaagagaaaatgtccttgtggagaccctaaaccatgagatgtatgaggctaaatatgtgattagtgctattcctcctactctgggcatgaagattcacttcaatccccctctgccaatgatgagaaaccagatgatcactcgtgtgcctttgggttcagtcatcaagtgtatagtttattataaagagcctttctggaggaaaaaggattactgtggaaccatgattattgatggagaagaagctccagttgcctacacgttggatgataccaaacctgaaggcaactatgctgccataatgggatttatcctggcccacaaagccagaaaactggcacgtcttaccaaagaggaaaggttgaagaaactttgtgaactctatgccaaggttctgggttccctagaagctctggagccagtgcattatgaagaaaagaactggtgtgaggagcagtactctgggggctgctacacaacttatttcccccctgggatcctgactcaatatggaagggttctacgccagccagtggacaggatttactttgcaggcaccgagactgccacacactggagcggctacatggagggggctgtagaggccggggagagagcagcccgagagatcctgcatgccatggggaagattccagaggatgaaatctggcagtcagaaccagagtctgtggatgtccctgcacagcccatcaccaccacctttttggagagacatttgccctccgtgccaggcctgctcaggctgattggattgaccaccatcttttcagcaacggctcttggcttcctggcccacaaaagggggctacttgtgagagtctaaagagagagggtgtctgtaatcacactctcttcttactgtatttgggatatgagtttggggaaagagttgcagtaaagttccatgaagacaaatagtgtggagtgaggcggggagcatgaagataaatccaactctgactgtaaaatacatggtatctctttctccgttgtgtgggtttactctgtgctaagttgtcttacacttctcaaatgctactcagtatatagccttaagtcttactgttttgtgcggtgtgtctccagctgattttaacttttttgatggtagaaattttatctcttcttccttttgtatcctccattgtatcttcatacaaaggacagtacacacttgggtaattaaaaataaaagttgattgaccata

SEQ ID NO: 313061 - DNA, 1001 bp, Homo sapiens
atagcggctcgccgaggcgctggtgcacgggggcagcgcgcagcaggccggcgggcaggcgggcgggctggctggcaggcaggactgggatcgaggcccagaaaacggagcagcgggcaccagggaggcctggaacggggcgagcgccatgagcaacaaatgcgacgtggtcgtggtggggggcggcatctcaggtatggcagcagccaaacttctgcatgactctggactgaatgtggttgttctggaagcccgggaccgtgtgggaggcaggacttacactcttaggaaccaaaaggttaaatatgtggaccttggaggatcctatgttggaccaacccagaatcgtatcttgagattagccaaggagctaggattggagacctacaaagtgaatgaggttgagcgtctgatccaccatgtaaagggcaaatcataccccttcagggggccattcccacctgtatggaatccaattacctacttagatcataacaacttttggaggacaatggatgacatggggcgagagattccgagtgatgccccatggaaggctccccttgcagaagagtgggacaacatgacaatgaaggagctactggacaagctctgctggactgaatctgcaaagcagcttgccactctctttgtgaacctgtgtgtcactgcagagacccatgaggtctctgctctctggttcctgtggtatgtgaagcagtgtggaggcacaacaagaatcatctccttcactccctgtcatagttaccgatggtgtcccgttgtgtgggtttactctgtgctaagttgtcttacacttctcaaatgctactcagtatatagccttaagtcttactgttttgtgcggtgtgtctccagctgattttaacttttttgatggtagaaattttatctcttcttccttttgtatcctccattgtatcttcatacaaaggacagtacacacttgggtaattaaaaataaaagttgattgaccata

SEQ ID NO: 313062 - DNA, 2513 bp, Homo sapiens
atagcggctcgccgaggcgctggtgcacgggggcagcgcgcagcaggccggcgggcaggcgggcgggctggctggcaggcaggactgggatcgaggcccagaaaacggagcagcgggcaccagggaggcctggaacggggcgagcgccatgagcaacaaatgcgacgtggtcgtggtggggggcggcatctcaggtatggcagcagccaaacttctgcatgactctggactgaatgtggttgttctggaagcccgggaccgtgtgggaggcaggacttacactcttaggaaccaaaaggttaaatatgtggaccttggaggatcctatgttggaccaacccagaatcgtatcttgagattagccaaggagctaggattggagacctacaaagtgaatgaggttgagcgtctgatccaccatgtaaagggcaaatcataccccttcagggggccattcccacctgtatggaatccaattacctacttagatcataacaacttttggaggacaatggatgacatggggcgagagattccgagtgatgccccatggaaggctccccttgcagaagagtgggacaacatgacaatgaaggagctactggacaagctctgctggactgaatctgcaaagcagcttgccactctctttgtgaacctgtgtgtcactgcagagacccatgaggtctctgctctctggttcctgtggtatgtgaagcagtgtggaggcacaacaagaatcatctcgacaacaaatggaggacaggagaggaaatttgtgggcggatctggtcaagtgagtgagcggataatggacctccttggagaccgagtgaagctggagaggcctgtgatctacattgaccagacaagagaaaatgtccttgtggagaccctaaaccatgagatgtatgaggctaaatatgtgattagtgctattcctcctactctgggcatgaagattcacttcaatccccctctgccaatgatgagaaaccagatgatcactcgtgtgcctttgggttcagtcatcaagtgtatagtttattataaagagcctttctggaggaaaaaggattactgtggaaccatgattattgatggagaagaagctccagttgcctacacgttggatgataccaaacctgaaggcaactatgctgccataatgggatttatcctggcccacaaagccagaaaactggcacgtcttaccaaagaggaaaggttgaagaaactttgtgaactctatgccaaggttctgggttccctagaagctctggagccagtgcattatgaagcccctgggatcctgactcaatatggaagggttctacgccagccagtggacaggatttactttgcaggcaccgagactgccacacactggagcggctacatggagggggctgtagaggccggggagagagcagcccgagagatcctgcatgccatggggaagattccagaggatgaaatctggcagtcagaaccagagtctgtggatgtccctgcacagcccatcaccaccacctttttggagagacatttgccctccgtgccaggcctgctcaggctgattggattgaccaccatcttttcagcaacggctcttggcttcctggcccacaaaagggggctacttgtgagagtctaaagagagagggtgtctgtaatcacactctcttcttactgtatttgggatatgagtttggggaaagagttgcagtaaagttccatgaagacaaatagtgtggagtgaggcggggagcatgaagataaatccaactctgactgtaaaatacatggtatctctttctccgttgtggcccctgcttagtgtcccttacctggcttagcgttctgtttcaccagtttccaagtttattgccctcaaaatctttagaatagttaaattggcttgtttaaggttcttgctgccccacaacacaccttgcccatgcacaaggaatgaattttttcctaccattatggctttgtgcttgttcttcctcttacctgtaatagcctcaccttccctagttctttgcattcgtccttagaatactgtattgttacagctgaaagacagtaaagaccatttagtcctcaccttctgttttagagttgagcaaactgaagcccacagaggtggaacttaattacctaagagccacaataagccactggtatctgggggactagaacacaaatccaacgcttttcccacctctttggatgttttccccaattatcctccttcactccctgtcatagttaccgatggtgtcccgttgtgtgggtttactctgtgctaagttgtcttacacttctcaaatgctactcagtatatagccttaagtcttactgttttgtgcggtgtgtctccagctgattttaacttttttgatggtagaaattttatctcttcttccttttgtatcctccattgtatcttcatacaaaggacagtacacacttgggtaattaaaaataaaagttgattgaccata

SEQ ID NO: 313063 - DNA, 2429 bp, Homo sapiens
atagcggctcgccgaggcgctggtgcacgggggcagcgcgcagcaggccggcgggcaggcgggcgggctggctggcaggcaggactgggatcgaggcccagaaaacggagcagcgggcaccagggaggcctggaacggggcgagcgccatgagcaacaaatgcgacgtggtcgtggtggggggcggcatctcaggtatggcagcagccaaacttctgcatgactctggactgaatgtggttgttctggaagcccgggaccgtgtgggaggcaggacttacactcttaggggcaaatcataccccttcagggggccattcccacctgtatggaatccaattacctacttagatcataacaacttttggaggacaatggatgacatggggcgagagattccgagtgatgccccatggaaggctccccttgcagaagagtgggacaacatgacaatgaaggagctactggacaagctctgctggactgaatctgcaaagcagcttgccactctctttgtgaacctgtgtgtcactgcagagacccatgaggtctctgctctctggttcctgtggtatgtgaagcagtgtggaggcacaacaagaatcatctcgacaacaaatggaggacaggagaggaaatttgtgggcggatctggtcaagtgagtgagcggataatggacctccttggagaccgagtgaagctggagaggcctgtgatctacattgaccagacaagagaaaatgtccttgtggagaccctaaaccatgagatgtatgaggctaaatatgtgattagtgctattcctcctactctgggcatgaagattcacttcaatccccctctgccaatgatgagaaaccagatgatcactcgtgtgcctttgggttcagtcatcaagtgtatagtttattataaagagcctttctggaggaaaaaggattactgtggaaccatgattattgatggagaagaagctccagttgcctacacgttggatgataccaaacctgaaggcaactatgctgccataatgggatttatcctggcccacaaagccagaaaactggcacgtcttaccaaagaggaaaggttgaagaaactttgtgaactctatgccaaggttctgggttccctagaagctctggagccagtgcattatgaagaaaagaactggtgtgaggagcagtactctgggggctgctacacaacttatttcccccctgggatcctgactcaatatggaagggttctacgccagccagtggacaggatttactttgcaggcaccgagactgccacacactggagcggctacatggagggggctgtagaggccggggagagagcagcccgagagatcctgcatgccatggggaagattccagaggatgaaatctggcagtcagaaccagagtctgtggatgtccctgcacagcccatcaccaccacctttttggagagacatttgccctccgtgccaggcctgctcaggctgattggattgaccaccatcttttcagcaacggctcttggcttcctggcccacaaaagggggctacttgtgagagtctaaagagagagggtgtctgtaatcacactctcttcttactgtatttgggatatgagtttggggaaagagttgcagtaaagttccatgaagacaaatagtgtggagtgaggcggggagcatgaagataaatccaactctgactgtaaaatacatggtatctctttctccgttgtggcccctgcttagtgtcccttacctggcttagcgttctgtttcaccagtttccaagtttattgccctcaaaatctttagaatagttaaattggcttgtttaaggttcttgctgccccacaacacaccttgcccatgcacaaggaatgaattttttcctaccattatggctttgtgcttgttcttcctcttacctgtaatagcctcaccttccctagttctttgcattcgtccttagaatactgtattgttacagctgaaagacagtaaagaccatttagtcctcaccttctgttttagagttgagcaaactgaagcccacagaggtggaacttaattacctaagagccacaataagccactggtatctgggggactagaacacaaatccaacgcttttcccacctctttggatgttttccccaattatcctccttcactccctgtcatagttaccgatggtgtcccgttgtgtgggtttactctgtgctaagttgtcttacacttctcaaatgctactcagtatatagccttaagtcttactgttttgtgcggtgtgtctccagctgattttaacttttttgatggtagaaattttatctcttcttccttttgtatcctccattgtatcttcatacaaaggacagtacacacttgggtaattaaaaataaaagttgattgaccata

SEQ ID NO: 313064 - DNA, 2037 bp, Homo sapiens
atagcggctcgccgaggcgctggtgcacgggggcagcgcgcagcaggccggcgggcaggcgggcgggctggctggcaggcaggactgggatcgaggcccagaaaacggagcagcgggcaccagggaggcctggaacggggcgagcgccatgagcaacaaatgcgacgtggtcgtggtggggggcggcatctcaggtatggcagcagccaaacttctgcatgactctggactgaatgtggttgttctggaagcccgggaccgtgtgggaggcaggacttacactcttaggaaccaaaaggttaaatatgtggaccttggaggatcctatgttggaccaacccagaatcgtatcttgagattagccaaggagctaggattggagacctacaaagtgaatgaggttgagcgtctgatccaccatgtaaagggcaaatcataccccttcagggggccattcccacctgtatggaatccaattacctacttagatcataacaacttttggaggacaatggatgacatggggcgagagattccgagtgatgccccatggaaggctccccttgcagaagagtgggacaacatgacaatgaaggagctactggacaagctctgctggactgaatctgcaaagcagcttgccactctctttgtgaacctgtgtgtcactgcagagacccatgaggtctctgctctctggttcctgtggtatgtgaagcagtgtggaggcacaacaagaatcatctcgacaacaaatggaggacaggagaggaaatttgtgggcggatctggtcaagtgagtgagcggataatggacctccttggagaccgagtgaagctggagaggcctgtgatctacattgaccagacaagagaaaatgtccttgtggagaccctaaaccatgagatgtatgaggctaaatatgtgattagtgctattcctcctactctgggcatgaagattcacttcaatccccctctgccaatgatgagaaaccagatgatcactcgtgtgcctttgggttcagtcatcaagtgtatagtttattataaagagcctttctggaggaaaaaggattactgtggaaccatgattattgatggagaagaagctccagttgcctacacgttggatgataccaaacctgaaggcaactatgctgccataatgggatttatcctggcccacaaagccagaaaactggcacgtcttaccaaagaggaaaggttgaagaaactttgtgaactctatgccaaggttctgggttccctagaagctctggagccagtgcattatgaagaaaagaactggtgtgaggagcagtactctgggggctgctacacaacttatttcccccctgggatcctgactcaatatggaagggttctacgccagccagtggacaggatttactttgcaggcaccgagactgccacacactggagcggctacatggagggggctgtagaggccggggagagagcagcccgagagatcctgcatgccatggggaagattccagaggatgaaatctggcagtcagaaccagagtctgtggatgtccctgcacagcccatcaccaccacctttttggagagacatttgccctccgtgccaggcctgctcaggctgattggattgaccaccatcttttcagcaacggctcttggcttcctggcccacaaaagggggctacttgtgagagtctccgtcgaactagttcgacggagactctccccagggggcctagctctggatcttgtatagaccaattaaccatcaaaatggactatggggaagaactaaggagccctattacaagcctgacccctggggagagcaaaaccacctctccatcatctccagaggaggatgtcatgctaggatccctcaccttctcagtggactataacttcccgaaaaaagccctggtggtgacaatccaggaggcccacgggctgtcagtgatggatgccagacccaggtatctgaccctaaatcaaatgacatccttctgacaacggatcgggtgagac

SEQ ID NO: 313065 - DNA, 3252 bp, Homo sapiens
cggtggtagcggcggcggctgctgaggaggaggagggggagcggagggaggtgtttctgtcagttccggctgtttgttcgggaagtggatccgccgctgccggagcagcccgaagggagctgcggatcgcgaggccagtaccgaccccgcccgcccgcgcgcaccgcccccgcccgccatggcccgggactacgaccacctcttcaagctgctcatcatcggcgacagcggtgtgggcaagagcagtttactgttgcgttttgcagacaacactttctcaggcagctacatcaccacgatcggagtggatttcaagatccggaccgtggagatcaacggggagaaggtgaagctgcagatctgggacacagcggggcaggagcgcttccgcaccatcacctccacgtattatcgggggacccacggggtcattgtggtttacgacgtcaccagtgccgagtcctttgtcaacgtcaagcggtggcttcacgaaatcaaccagaactgtgatgatgtgtgccgaatattagtgggtaataagaatgacgaccctgagcggaaggtggtggagacggaagatgcctacaaattcgccgggcagatgggcatccagttgttcgagaccagcgccaaggagaatgtcaacgtggaagagatgttcaactgcatcacggagctggtcctccgagcaaagaaagacaacctggcaaaacagcagcagcaacaacagaacgatgtggtgaagctcacgaagaacagtaaacgaaagaaacgctgctgctaatggcacccagtccactgcagagactgcactgcggtccctcccccagcccgaggcccacggaggttcctcgggggacagtctcagtttcgtgccgttatttaaagaattctctccatgtttttgtatcgggaggtgccatcggcacttcctcccccgccctcctcgagtgccaagaaggtgttggaccagcccgcccttccctactggtgccccctcctccccggccaaggcgcctggacctggcgaggacgctgcccgccgagcggactgattcgcagagtctgtacatagtgtatattgctctacccggccgcacaccacgtcctgctctggcttttgccttcttgatgccagcctgctgcaacagaccctccccgcgcccctccccagcccatcttactgcaagcagcgtcctgaggagacagcggcacgttctagctgcgtctgcggccagcccgtgccagtggagtgggctccgcgttgctcattctctccgacaggttgtcagcctctgtccccgctgcacagggtcttgccccttctccggggcctgtgccagctcccttccctccccgttgtcctgtccccacagccattctgggagctggggaacctggtctcaaggcaggccctgcagttccacagaggtggcaggtcttgccctttggccaacagatttcttgtcctgccttctagatgcctctgagctccaaacccagggcagccatggcttctcatttacaccaacaggtttcagttccaacagaaaggtcggggtaggttcgtgcagagatggggctggcaggggggctatgggaggattattttaacagatcaagaaaatgaagccaaatcaagtgaattaaattcctcacaattattttctttccctgaggtttgattggcacagcagcaaaagttgaggccaccccacttgtgtccactgtttttagaaaaaaatgaatggcttcctgccattgtggggctggactcttgggctttcttggtgggagcggagaaggggcctcccacccttgtccgagttgcctcccactggaggtcaggagtctacactgcagcctcgggcactgtggggagtgcatgcctggggcctctgggtggggaccatggacaggccctggtcactgtcctaacctttgtcaggacaaaggtagcaagaggatttcctggcgggtgggaaggaatggctggggcggccagttttgacacgccccagtgccctggagaacaaccagggtcatctgcacttgatgactgctccccgacccccagcccggacacctcattcccctcccactacagggatcaagtgacctgggaagaaccgagtttaacaccaggatgtgtttccttagatttcctttcctaggcgatttccagggagagccctgattggacaatcacatcacagatcacactgcagtttccatgttagcactgtggatgggtttttaatcaataaaaactgggggtttcttctcaccgactctccacttgcccaaactgccaaaagctggtgattctgggacaggccttcactttggagccacgggatggggtgggggagccccatgggcctgggaaggagggtgctgtggagggggctgcagggctgaccagcaggcagcctcatctggtcgggggcgggggcggcaggagcagaagcggggtctccgtccttgggactgtcctggttggccacgggccctgaggatgcacggtgcctggggctcctgtgccggtgggcggggggcatgctggcctctgagcgatcaggcgaggccagcgagggtgtgcttgcaaattcaagcaataagaggggggttcctgggggcttccagcccaggctagaagcccccatggcttctggcagctggacatcagccccaggtattggggtgattttggtcatgacagtgtgcctgtcccactgttacacgcatgaatgggggttatggggtgggggtggggactcagggctggaccgacgtcctagtggacctgatgtgaaattcctgtcaaacaaacaccacttttcaatggtttgctaggagtatttctgtattgaaagtttctaattatgctttttaaaaaaatactaaaaataaaggttcaagctgccaaaaaaagatagaatgaagaaaaaaaagaaagggggggggcgcggctagagagatacacacagcagagggcgccaaaaaatcgacgcgcacagaaggttttgggacaagggggggcccccaaaagggaggacggacaatatacacagtaggacgggcgccgggcgttaaaagacggtcggagcggggaacaccggcagcgggcgactgtgggagagacccttactctgtgggtggcacacattgtggacacacccacgagaattcagccagggacaaagactacggtgatggcaacccgcaatctgtgcagaatggagggcatag

SEQ ID NO: 313066 - DNA, 2725 bp, Homo sapiens
cggtggtagcggcggcggctgctgaggaggaggagggggagcggagggaggtgtttctgtcagttccggctgtttgttcgggaagtggatccgccgctgccggagcagcccgaagggagctgcggatcgcgaggccagtaccgaccccgcccgcccgcgcgcaccgcccccgcccgccatggcccgggactacgaccacctcttcaagctgctcatcatcggcgacagcggtgtgggcaagagcagtttactgttgcgttttgcagacaacactttctcaggcagctacatcaccacgatcggagtggatttcaagatccggaccgtggagatcaacggggagaaggtgaagctgcagatctgggacacagcggggcaggagcgcttccgcaccatcacctccacgtattatcgggggacccacggggtcattgtggtttacgacgtcaccagtgccgagtcctttgtcaacgtcaagcggtggcttcacgaaatcaaccagaactgtgatgatgtgtgccgaatattagtgggtaataagaatgacgaccctgagcggaaggtggtggagacggaagatgcctacaaattcgccgggcagatgggcatccagttgttcgagaccagcgccaaggagaatgtcaacgtggaagagatgttcaactgcatcacggagctggtcctccgagcaaagaaagacaacctggcaaaacagcagcagcaacaacagaacgatgtggtgaagctcacgaagaacagtaaacgaaagaaacgctgctgctaatggcacccagtccactgcagagactgcactgcggtccctcccccagcccgaggcccacggaggttcctcgggggacagtctcagtttcgtgccgttatttaaagaattctctccatgtttttgtatcgggaggtgccatcggcacttcctcccccgccctcctcgagtgccaagaaggtgttggaccagcccgcccttccctactggtgccccctcctccccggccaaggcgcctggacctggcgaggacgctgcccgccgagcggactgattcgcagagtctgtacatagtgtatattgctctacccggccgcacaccacgtcctgctctggcttttgccttcttgatgccagcctgctgcaacagaccctccccgcgcccctccccagcccatcttactgcaagcagcgtcctgaggagacagcggcacgttctagctgcgtctgcggccagcccgtgccagtggagtgggctccgcgttgctcattctatgcctctgagctccaaacccagggcagccatggcttctcatttacaccaacaggtttcagttccaacagaaaggtcggggtaggttcgtgcagagatggggctggcaggggggctatgggaggattattttaacagatcaagaaaatgaagccaaatcaagtgaattaaattcctcacaattattttctttccctgaggtttgattggcacagcagcaaaagttgaggccaccccacttgtgtccactgtttttagaaaaaaatgaatggcttcctgccattgtggggctggactcttgggctttcttggtgggagcggagaaggggcctcccacccttgtccgagttgcctcccactggaggtcaggagtctacactgcagcctcgggcactgtggggagtgcatgcctggggcctctgggtggggaccatggacaggccctggtcactgtcctaacctttgtcaggacaaaggtagcaagaggatttcctggcgggtgggaaggaatggctggggcggccagttttgacacgccccagtgccctggagaacaaccagggtcatctgcacttgatgactgctccccgacccccagcccggacacctcattcccctcccactacagggatcaagtgacctgggaagaaccgagtttaacaccaggatgtgtttccttagatttcctttcctaggcgatttccagggagagccctgattggacaatcacatcacagatcacactgcagtttccatgttagcactgtggatgggtttttaatcaataaaaactgggggtttcttctcaccgactctccacttgcccaaactgccaaaagctggtgattctgggacaggccttcactttggagccacgggatggggtgggggagccccatgggcctgggaaggagggtgctgtggagggggctgcagggctgaccagcaggcagcctcatctggtcgggggcgggggcggcaggagcagaagcggggtctccgtccttgggactgtcctggttggccacgggccctgaggatgcacggtgcctggggctcctgtgccggtgggcggggggcatgctggcctctgagcgatcaggcgaggccagcgagggtgtgcttgcaaattcaagcaataagaggggggttcctgggggcttccagcccaggctagaagcccccatggcttctggcagctggacatcagccccaggtattggggtgattttggtcatgacagtgtgcctgtcccactgttacacgcatgaatgggggttatggggtgggggtggggactcagggctggaccgacgtcctagtggacctgatgtgaaattcctgtcaaacaaacaccacttttcaatggtttgctaggagtatttctgtattgaaagtttctaattatgctttttaaaaaaatactaaaaataaaggttcaagctgccaaa

SEQ ID NO: 313067 - DNA, 2785 bp, Homo sapiens
  misc_feature (2718)..(2718): n is a, c, g, or t
cggtggtagcggcggcggctgctgaggaggaggagggggagcggagggaggtgtttctgtcagttccggctgtttgttcgggaagtggatccgccgctgccggagcagcccgaagggagctgcggatcgcgaggccagtaccgaccccgcccgcccgcgcgcaccgcccccgcccgccatggcccgggactacgaccacctcttcaagctgctcatcatcggcgacagcggtgtgggcaagagcagtttactgttgcgttttgcagacaacactttctcaggcagctacatcaccacgatcggagtggatttcaagatccggaccgtggagatcaacggggagaaggtgaagctgcagatctgggacacagcggggcaggagcgcttccgcaccatcacctccacgtattatcgggggacccacggggtcattgtggtttacgacgtcaccagtgccgagtcctttgtcaacgtcaagcggtggcttcacgaaatcaaccagaactgtgatgatgtgtgccgaatattagtgggtaataagaatgacgaccctgagcggaaggtggtggagacggaagatgcctacaaattcgccgggcagatgggcatccagttgttcgagaccagcgccaaggagaatgtcaacgtggaagagatgttcaactgcatcacggagctggtcctccgagcaaagaaagacaacctggcaaaacagcagcagcaacaacagaacgatgtggtgaagctcacgaagaacagtaaacgaaagaaacgctgctgctaatggcacccagtccactgcagagactgcactgcggtccctcccccagcccgaggcccacggaggttcctcgggggacagtctcagtttcgtgccgttatttaaagaattctctccatgtttttgtatcgggaggtgccatcggcacttcctcccccgccctcctcgagtgccaagaaggtgttggaccagcccgcccttccctactggtgccccctcctccccggccaaggcgcctggacctggcgaggacgctgcccgccgagcggactgattcgcagagtctgtacatagtgtatattgctctacccggccgcacaccacgtcctgctctggcttttgccttcttgatgccagcctgctgcaacagaccctccccgcgcccctccccagcccatcttactgcaagcagcgtcctgaggagacagcggcacgttctagctgcgtctgcggccagcccgtgccagtggagtgggctccgcgttgctcattctctccgacaggttgtcagcctctgtccccgctgcacagggtcttgccccttctccggggcctgtgccagctcccttccctccccgttgtcctgtccccacagccattctgggagctggggaacctggtctcaaggcaggccctgcagttccacagaggtggcaggtcttgccctttggccaacagatttcttgtcctgccttctagatgcctctgagctccaaacccagggcagccatggcttctcatttacaccaacaggtttcagttccaacagaaaggtcggggtaggttcgtgcagagatggggctggcaggggggctatgggaggattattttaacagatcaagaaaatgaagccaaatcaagtgaattaaattcctcacaattattttctttccctgaggtttgattggcacagcagcaaaagttgaggccaccccacttgtgtccactgtttttagaaaaaaatgaatggcttcctgccattgtggggctggactcttgggctttcttggtgggagcggagaaggggcctcccacccttgtccgagttgcctcccactggaggtcaggagtctacactgcagcctcgggcactgtggggagtgcatgcctggggcctctgggtggggaccatggacaggccctggtcactgtcctaacctttgtcaggacaaaggtagcaagaggatttcctggcgggtgggaaggaatggctggggcggccagttttgacacgccccagtgccctggagaacaaccagggtcatctgcacttgatgactgctccccgacccccagcccggacacctcattcccctcccactacagggatcaagtgacctgggaagaaccgagtttaacaccaggatgtgtttccttagatttcctttcctaggcgatttccagggagagccctgattggacaatcacatcacagatcacactgcagtttccatgttagcactgtggatgggtttttaatcaataaaaactgggggtttcttctcaccgactctccacttgcccaaactgccaaaagctggtgattctgggacaggccttcactttggagccacgggatggggtgggggagccccatgggcctgggaaggagggtgctgtggagggggctgcagggctgaccagcaggcagcctcatctggtcgggggcgggggcggcaggagcagaagcggggtctccgtccttgggactgtcctggttggccacgggccctgaggatgcacggtgcctggggctcctgtgccggtgggcggggggcatgctggcctctgagcgatcaggcgaggccagcgagggtgtgcttgcaaattcaagcaataagaggggggttcctggcttctcctccccctattcttcccccattctcttccctcccctctcgtcccactcctccctttcctccctctcttcttccctncccttcctcattctcctcaccctcctccccgccctttctttttctgccccctcctccccctcccccc

SEQ ID NO: 313068 - DNA, 2578 bp, Homo sapiens
cggtggtagcggcggcggctgctgaggaggaggagggggagcggagggaggtgtttctgtcagttccggctgtttgttcgggaagtggatccgccgctgccggagcagcccgaagggagctgcggatcgcgaggccagtaccgaccccgcccgcccgcgcgcaccgcccccgcccgccatggcccgggactacgaccacctcttcaagctgctcatcatcggcgacagcggtgtgggcaagagcagtttactgttgcgttttgcagacaacactttctcaggcagctacatcaccacgatcggagtggatttcaagatccggaccgtggagatcaacggggagaaggtgaagctgcagatctgggacacagcggggcaggagcgcttccgcaccatcacctccacgtattatcgggggacccacggggtcattgtggtttacgacgtcaccagtgccgagtcctttgtcaacgtcaagcggtggcttcacgaaatcaaccagaactgtgatgatgtgtgccgaatattagtgggtaataagaatgacgaccctgagcggaaggtggtggagacggaagatgcctacaaattcgccgggcagatgggcatccagttgttcgagaccagcgccaaggagaatgtcaacgtggaagagatgttcaactgcatcacggagctggtcctccgagcaaagaaagacaacctggcaaaacagcagcagcaacaacagaacgatgtggtgaagctcacgaagaacagtaaacgaaagaaacgctgctgctaatggcacccagtccactgcagagactgcactgcggtccctcccccagcccgaggcccacggaggttcctcgggggacagtctcagtttcgtgccgttatttaaagaattctctccatgtttttgtatcgggaggtgccatcggcacttcctcccccgccctcctcgagtgccaagaaggtgttggaccagcccgcccttccctactggtgccccctcctccccggccaaggcgcctggacctggcgaggacgctgcccgccgagcggactgattcgcagagtctgtacatagtgtatattgctctacccggccgcacaccacgtcctgctctggcttttgccttcttgatgccagcctgctgcaacagaccctccccgcgcccctccccagcccatcttactgcaagcagcgtcctgaggagacagcggcacgttctagctgcgtctgcggccagcccgtgccagtggagtgggctccgcgttgctcattctctccgacaggttgtcagcctctgtccccgctgcacagggtcttgccccttctccggggcctgtgccagctcccttccctccccgttgtcctgtccccacagccattctgggagctggggaacctggtctcaaggcaggccctgcagttccacagaggtggcaggtcttgccctttggccaacagatttcttgtcctgccttctagatgcctctgagctccaaacccagggcagccatggcttctcatttacaccaacaggtttcagttccaacagaaaggtcggggtaggttcgtgcagagatggggctggcaggggggctatgggaggattattttaacagatcaagaaaatgaagccaaatcaagtgaattaaattcctcacaattattttctttccctgaggtttgattggcacagcagcaaaagttgaggccaccccacttgtgtccactgtttttagaaaaaaatgaatggcttcctgccattgtggggctggactcttgggctttcttggtgggagcggagaaggggcctcccacccttgtccgagttgcctcccactggaggtcaggagtctacactgcagcctcgggcactgtggggagtgcatgcctggggcctctgggtggggaccatggacaggccctggtcactgtcctaacctttgtcaggacaaaggtagcaagaggatttcctggcgggtgggaaggaatggctggggcggccagttttgacacgccccagtgccctggagaacaaccagggtcatctgcacttgatgactgctccccgacccccagcccggacacctcattcccctcccactacagggatcaagtgacctgggaagaaccgagtttaacaccaggatgtgtttccttagatttcctttcctaggcgatttccagggagagccctgattggacaatcacatcacagatcacactgcagtttccatgttagcactgtggatgggtttttaatcaataaaaactgggggtttcttctcaccgactctccacttgcccaaactgccaaaagctggtgatttggacatcagccccaggtattggggtgattttggtcatgacagtgtgcctgtcccactgttacacgcatgaatgggggttatggggtgggggtggggactcagggctggaccgacgtcctagtggacctgatgtgaaattcctgtcaaacaaacaccacttttcaatggtttgctaggagtatttctgtattgaaagtttctaattatgctttttaaaaaaatactaaaaataaaggttcaagctgccaaa

SEQ ID NO: 313069 - DNA, 2314 bp, Homo sapiens
  misc_feature (7)..(7): n is a, c, g, or t
  misc_feature (36)..(37): n is a, c, g, or t
cggagcntaagacgcacaaggaggttcaacgtggannagatgttcaactgcatcacggagctggtcctccgagcaaagaaagacaacctggcaaaacagcagcagcaacaacagaacgatgtggtgaagctcacgaagaacagtaaacgaaagaaacgctgctgctaatggcacccagtccactgcagagactgcactgcggtccctcccccagcccgaggcccacggaggttcctcgggggacagtctcagtttcgtgccgttatttaaagaattctctccatgtttttgtatcgggaggtgccatcggcacttcctcccccgccctcctcgagtgccaagaaggtgttggaccagcccgcccttccctactggtgccccctcctccccggccaaggcgcctggacctggcgaggacgctgcccgccgagcggactgattcgcagagtctgtacatagtgtatattgctctacccggccgcacaccacgtcctgctctggcttttgccttcttgatgccagcctgctgcaacagaccctccccgcgcccctccccagcccatcttactgcaagcagcgtcctgaggagacagcggcacgttctagctgcgtctgcggccagcccgtgccagtggagtgggctccgcgttgctcattctctccgacaggttgtcagcctctgtccccgctgcacagggtcttgccccttctccggggcctgtgccagctcccttccctccccgttgtcctgtccccacagccattctgggagctggggaacctggtctcaaggcaggccctgcagttccacagaggtggcaggtcttgccctttggccaacagatttcttgtcctgccttctagatgcctctgagctccaaacccagggcagccatggcttctcatttacaccaacaggtttcagttccaacagaaaggtcggggtaggttcgtgcagagatggggctggcaggggggctatgggaggattattttaacagatcaagaaaatgaagccaaatcaagtgaattaaattcctcacaattattttctttccctgaggtttgattggcacagcagcaaaagttgaggccaccccacttgtgtccactgtttttagaaaaaaatgaatggcttcctgccattgtggggctggactcttgggctttcttggtgggagcggagaaggggcctcccacccttgtccgagttgcctcccactggaggtcaggagtctacactgcagcctcgggcactgtggggagtgcatgcctggggcctctgggtggggaccatggacaggccctggtcactgtcctaacctttgtcaggacaaaggtagcaagaggatttcctggcgggtgggaaggaatggctggggcggccagttttgacacgccccagtgccctggagaacaaccagggtcatctgcacttgatgactgctccccgacccccagcccggacacctcattcccctcccactacagggatcaagtgacctgggaagaaccgagtttaacaccaggatgtgtttccttagatttcctttcctaggcgatttccagggagagccctgattggacaatcacatcacagatcacactgcagtttccatgttagcactgtggatgggtttttaatcaataaaaactgggggtttcttctcaccgactctccacttgcccaaactgccaaaagctggtgattctgggacaggccttcactttggagccacgggatggggtgggggagccccatgggcctgggaaggagggtgctgtggagggggctgcagggctgaccagcaggcagcctcatctggtcgggggcgggggcggcaggagcagaagcggggtctccgtccttgggactgtcctggttggccacgggccctgaggatgcacggtgcctggggctcctgtgccggtgggcggggggcatgctggcctctgagcgatcaggcgaggccagcgagggtgtgcttgcaaattcaagcaataagaggggggttcctgggggcttccagcccaggctagaagcccccatggcttctggcagctggacatcagccccaggtattggggtgattttggtcatgacagtgtgcctgtcccactgttacacgcatgaatgggggttatggggtgggggtggggactcagggctggaccgacgtcctagtggacctgatgtgaaattcctgtcaaacaaacaccacttttcaatggtttgctaggagtatttctgtattgaaagtttctaattatgctttttaaaaaaatactaaaaataaaggttcaagctgccaaa

SEQ ID NO: 313070 - DNA, 2675 bp, Homo sapiens
cggtggtagcggcggcggctgctgaggaggaggagggggagcggagggaggtgtttctgtcagttccggctgtttgttcgggaagtggatccgccgctgccggagcagcccgaagggagctgcggatcgcgaggccagtaccgaccccgcccgcccgcgcgcaccgcccccgcccgccatggcccgggactacgaccacctcttcaagctgctcatcatcggcgacagcggtgtgggcaagagcagtttactgttgcgttttgcagacaacactttctcaggcagctacatcaccacgatcggagtggatttcaagatccggaccgtggagatcaacggggagaaggtgaagctgcagatctgggacacagcggggcaggagcgcttccgcaccatcacctccacgtattatcgggggacccacggggtcattgtggtttacgacgtcaccagtgccgagtcctttgtcaacgtcaagcggtggcttcacgaaatcaaccagaactgtgatgatgtgtgccgaatattagtgggtaataagaatgacgaccctgagcggaaggtggtggagacggaagatgcctacaaattcgccgggcagatgggcatccagttgttcgagaccagcgccaaggagaatgtcaacgtggaagagatgttcaactgcatcacggagctggtcctccgagcaaagaaagacaacctggcaaaacagcagcagcaacaacagaacgatgtggtgaagctcacgaagaacagtaaacgaaagaaacgctgctgctaatggcacccagtccactgcagagactgcactgcggtccctcccccagcccgaggcccacggaggttcctcgggggacagtctcagtttcgtgccgttatttaaagaattctctccatgtttttgtatcgggaggtgccatcggcacttcctcccccgccctcctcgagtgccaagaaggtgttggaccagcccgcccttccctactggtgccccctcctccccggccaaggcgcctggacctggcgaggacgctgcccgccgagcggactgattcgcagagtctgtacatagtgtatattgctctacccggccgcacaccacgtcctgctctggcttttgccttcttgatgccagcctgctgcaacagaccctccccgcgcccctccccagcccatcttactgcaagcagcgtcctgaggagacagcggcacgttctagctgcgtctgcggccagcccgtgccagtggagtgggctccgcgttgctcattctctccgacaggttgtcagcctctgtccccgctgcacagggtcttgccccttctccggggcctgtgccagctcccttccctccccgttgtcctgtccccacagccattctgggagctggggaacctggtctcaaggcaggccctgcagttccacagaggtggcaggtcttgccctttggccaacagatttcttgtcctgccttctagatgcctctgagctccaaacccagggcagccatggcttctcatttacaccaacaggtttcagttccaacagaaaggtcggggtaggttcgtgcagagatggggctggcaggggggctatgggaggattattttaacagatcaagaaaatgaagccaaatcaagtgaattaaattcctcacaattattttctttccctgaggtttgattggcacagcagcaaaagttgaggccaccccacttgtgtccactgtttttagaaaaaaatgaatggcttcctgccattgtggggctggactcttgggctttcttggtgggagcggagaaggggcctcccacccttgtccgagttgcctcccactggaggtcaggagtctacactgcagcctcgggcactgtggggagtgcatgcctggggcctctgggtggggaccatggacaggccctggtcactgtcctaacctttgtcaggacaaaggtagcaagaggatttcctggcgggtgggaaggaatggctggggcggccagttttgacacgccccagtgccctggagaacaaccagggtcatctgcacttgatgactgctccccgacccccagcccggacacctcattcccctcccactacagggatcaagtgacctgggaagaaccgagtttaacaccaggatgtgtttccttagatttcctttcctaggcgatttccagggagagccctgattggacaatcacatcacagatcacactgcagtttccatgttagcactgtggatgggtttttaatcaataaaaactgggggtttctaaaaaaaaaaaaaacaaaaaaaaaaaaaaaaaaaaaaaaaacaaaaaaaagggggggggcggaaaaaaaaacccccggggggcccccattttgctacccccgtttttttggtaacgaaggtggtccccacaagagaggggaggagttataaaaaacagagggcgcaggaggggggtgtttaaacaaagagtgttgtgagtgtgggaacaagcggtgtagtggggactcatgtgggggaggaggacgcattcacttgtgggggggtgggaacatttgtggacacactaactgagcagatatgaaggctcgagggaaaattacaatttggaggtttatgagtgtaacaccagtgaatgtgtgcgcgcgaaattgttacgggtaattggaaattgc

SEQ ID NO: 313071 - DNA, 1550 bp, Homo sapiens
cggtggtagcggcggcggctgctgaggaggaggagggggagcggagggaggtgtttctgtcagttccggctgtttgttcgggaagtggatccgccgctgccggagcagcccgaagggagctgcggatcgcgaggccagtaccgaccccgcccgcccgcgcgcaccgcccccgcccgccatggcccgggactacgaccacctcttcaagctgctcatcatcggcgacagcggtgtgggcaagagcagtttactgttgcgttttgcagacaacactttctcaggcagctacatcaccacgatcggagtggatttcaagatccggaccgtggagatcaacggggagaaggtgaagctgcagatctgggacacagcggggcaggagcgcttccgcaccatcacctccacgtattatcgggggacccacggggtcattgtggtttacgacgtcaccagtgccgagtcctttgtcaacgtcaagcggtggcttcacgaaatcaaccagaactgtgatgatgtgtgccgaatattagtgggtaataagaatgacgaccctgagcggaaggtggtggagacggaagatgcctacaaattcgccgggcagatgggcatccagttgttcgagaccagcgccaaggagaatgtcaacgtggaagagatgttcaactgcatcacggagctggtcctccgagcaaagaaagacaacctggcaaaacagcagcagcaacaacagaacgatgtggtgaagctcacgaagaacagtaaacgaaagaaacgctgctgctaatggcacccagtccactgcagagactgcactgcggtccctcccccagcccgaggcccacggaggttcctcgggggacagtctcagtttcgtgccgttatttaaagaattctctccatgtttttgtatcgggaggtgccatcggcacttcctcccccgccctcctcgagtgccaagaaggtgttggaccagcccgcccttccctactggtgccccctcctccccggccaaggcgcctggacctggcgaggacgctgcccgccgagcggactgattcgcagagtctgtacatagtgtatattgctctacccggccgcacaccacgtcctgctctggcttttgccttcttgatgccagcctgctgcaacagaccctccctgtgccggtgggcggggggcatgctggcctctgagcgatcaggcgaggccagcgagggtgtgcttgcaaattcaagcaataagaggggggttcctgggggcttccagcccaggctagaagcccccatggcttctggcagctggacatcagccccaggtattggggtgattttggtcatgacagtgtgcctgtcccactgttacacgcatgaatgggggttatggggtgggggtggggactcagggctggaccgacgtcctagtggacctgatgtgaaattcctgtcaaacaaacaccacttttcaatggtttgctaggagtatttctgtattgaaagtttctaattatgctttttaaaaaaatactaaaaataaaggttcaagctgccaaa

SEQ ID NO: 313072 - DNA, 1664 bp, Homo sapiens
cggtggtagcggcggcggctgctgaggaggaggagggggagcggagggaggtgtttctgtcagttccggctgtttgttcgggaagtggatccgccgctgccggagcagcccgaagggagctgcggatcgcgaggccagtaccgaccccgcccgcccgcgcgcaccgcccccgcccgccatggcccgggactacgaccacctcttcaagctgctcatcatcggcgacagcggtgtgggcaagagcagtttactgttgcgttttgcagacaacactttctcaggcagctacatcaccacgatcggagtggatttcaagatccggaccgtggagatcaacggggagaaggtgaagctgcagatctgggacacagcggggcaggagcgcttccgcaccatcacctccacgtattatcgggggacccacggggtcattgtggtttacgacgtcaccagtgccgagtcctttgtcaacgtcaagcggtggcttcacgaaatcaaccagaactgtgatgatgtgtgccgaatattagtgggtaataagaatgacgaccctgagcggaaggtggtggagacggaagatgcctacaaattcgccgggcagatgggcatccagttgttcgagaccagcgccaaggagaatgtcaacgtggaagagatgttcaactgcatcacggagctggtcctccgagcaaagaaagacaacctggcaaaacagcagcagcaacaacagaacgatgtggtgaagctcacgaagaacagtaaacgaaagaaacgctgctgctaatggcacccagtccactgcagagactgcactgcggtccctcccccagcccgaggcccacggaggttcctcgggggacagtctcagtttcgtgccgttatttaaagaattctctccatgtttttgtatcgggaggtgccatcggcacttcctcccccgccctcctcgagtgccaagaaggtgttggaccagcccgcccttccctactggtgccccctcctccccggccaaggcgcctggacctggcgaggacgctgcccgccgagcggactgattcgcagagtctgtacatagtgtatattgctctacccggccgcacaccacgtcctgctctggcttttgccttcttgatgccagcctgctgcaacagaccctccccgcgcccctccccagcccatcttactgcaagcagcgtcctgaggagacagcggcacgttctagctgcgtctgcggccagcccgtgccagtggagtgggctccgcgttgctcattctctccgacaggttgtcagcctctgtccccgctgcacagggtcttgccccttctccggggcctgtgccagctcccttccctccccgttgtcctgtccccacagccattctgggagctggggaacctggtctcaaggcaggccctgcagttccacagaggtggcaggtcttgccctttggccaacagatttcttgtcctgccttctagatgcctctgagctccaaacccagggcagccatggcttctcatttacaccaacaggtttcagttccaacagaaaggtcggggtaggttcgtgcagagatggggctggcaggggggctatgggaggattattttaacagatcaagaaaatgaagccaaatcaagtgaattaaattcctcacaatta

SEQ ID NO: 313073 - DNA, 2930 bp, Homo sapiens
cggtggtagcggcggcggctgctgaggaggaggagggggagcggagggaggtgtttctgtcagttccggctgtttgttcgggaagtggatccgccgctgccggagcagcccgaagggagctgcggatcgcgaggccagtaccgaccccgcccgcccgcgcgcaccgcccccgcccgccatggcccgggactacgaccacctcttcaagctgctcatcatcggcgacagcggtgtgggcaagagcagtttactgttgcgttttgcagacaacactttctcaggcagctacatcaccacgatcggagtggatttcaagatccggaccgtggagatcaacggggagaaggtgaagctgcagatctgggacacagcggggcaggagcgcttccgcaccatcacctccacgtattatcgggggacccacggggtcattgtggtttacgacgtcaccagtgccgagtcctttgtcaacgtcaagcggtggcttcacgaaatcaaccagaactgtgatgatgtgtgccgaatattagtgggtaataagaatgacgaccctgagcggaaggtggtggagacggaagatgcctacaaattcgccgggcagatgggcatccagttgttcgagaccagcgccaaggagaatgtcaacgtggaagagatgttcaactgcatcacggagctggtcctccgagcaaagaaagacaacctggcaaaacagcagcagcaacaacagaacgatgtggtgaagctcacgaagaacagtaaacgaaagaaacgctgctgctaatggcacccagtccactgcagagactgcactgcggtccctcccccagcccgaggcccacggaggttcctcgggggacagtctcagtttcgtgccgttatttaaagaattctctccatgtttttgtatcgggaggtgccatcggcacttcctcccccgccctcctcgagtgccaagaaggtgttggaccagcccgcccttccctactggtgccccctcctccccggccaaggcgcctggacctggcgaggacgctgcccgccgagcggactgattcgcagagtctgtacatagtgtatattgctctacccggccgcacaccacgtcctgctctggcttttgccttcttgatgccagcctgctgcaacagaccctccccgcgcccctccccagcccatcttactgcaagcagcgtcctgaggagacagcggcacgttctagctgcgtctgcggccagcccgtgccagtggagtgggctccgcgttgctcattctctccgacaggttgtcagcctctgtccccgctgcacagggtcttgccccttctccggggcctgtgccagctcccttccctccccgttgtcctgtccccacagccattctgggagctggggaacctggtctcaaggcaggccctgcagttccacagaggtggcaggtcttgccctttggccaacagatttcttgtcctgccttctagatgcctctgagctccaaacccagggcagccatggcttctcatttacaccaacaggtttcagttccaacagaaaggtcggggtaggttcgtgcagagatggggctggcaggggggctatgggaggattattttaacagatcaagaaaatgaagccaaatcaagtgaattaaattcctcacaattattttctttccctgaggtttgattggcacagcagcaaaagttgaggccaccccacttgtgtccactgtttttagaaaaaaatgaatggcttcctgccattgtggggctggactcttgggctttcttggtgggagcggagaaggggcctcccacccttgtccgagttgcctcccactggaggtcaggagtctacactgcagcctcgggcactgtggggagtgcatgcctggggcctctgggtggggaccatggacaggccctggtcactgtcctaacctttgtcaggacaaaggtagcaagaggatttcctggcgggtgggaaggaatggctggggcggccagttttgacacgccccagtgccctggagaacaaccagggtcatctgcacttgatgactgctccccgacccccagcccggacacctcattcccctcccactacagggatcaagtgacctgggaagaaccgagtttaacaccaggatgtgtttccttagatttcctttcctaggcgatttccagggagagccctgattggacaatcacatcacagatcacactgcagtttccatgttagcactgtggatgggtttttaatcaataaaaactgggggtttcttctcaccgactctccacttgcccaaactgccaaaagctggtgattctgggacaggccttcactttggagccacgggatggggtgggggagccccatgggcctgggaaggagggtgctgtggagggggctgcagggctgaccagcaggcagcctcatctggtcgggggcgggggcggcaggagcagaagcggggtctccgtccttgggactgtcctggttggccacgggccctgaggatgcacggtgcctggggctcctgtgccggtgggcggggggcatgctggcctctgagcgatcaggcgaggccagcgagggtgtgcttgcaaattcaagcaataagaggggggttcctgggggcttccagcccaggctagaagcccccatggcttctggcagctggacatcagccccaggtattggggtgattttggtcatgacagtgtgcctgtcccactgttacacgcatgaatgggggttatggggtgggggtggggactcagggctggaccgacgtcctagtggacctgatgtgaaattcctgtcaaacaaacaccacttttcaatggtttgctaggagtatttctgtattgaaagtttctaattatgctttttaaaaaaatactaaaaataaaggttcaagctgccaaa

SEQ ID NO: 313074 - DNA, 2536 bp, Homo sapiens
cggtggtagcggcggcggctgctgaggaggaggagggggagcggagggaggtgtttctgtcagttccggctgtttgttcgggaagtggatccgccgctgccggagcagcccgaagggagctgcggatcgcgaggccagtaccgaccccgcccgcccgcgcgcaccgcccccgcccgccatggcccgggactacgaccacctcttcaagctgctcatcatcggcgacagcggtgtgggcaagagcagtttactgttgcgttttgcagacaacactttctcaggcagctacatcaccacgatcggagtggatttcaagatccggaccgtggagatcaacggggagaaggtgaagctgcagatctgggacacagcggggcaggagcgcttccgcaccatcacctccactgcagagactgcactgcggtccctcccccagcccgaggcccacggaggttcctcgggggacagtctcagtttcgtgccgttatttaaagaattctctccatgtttttgtatcgggaggtgccatcggcacttcctcccccgccctcctcgagtgccaagaaggtgttggaccagcccgcccttccctactggtgccccctcctccccggccaaggcgcctggacctggcgaggacgctgcccgccgagcggactgattcgcagagtctgtacatagtgtatattgctctacccggccgcacaccacgtcctgctctggcttttgccttcttgatgccagcctgctgcaacagaccctccccgcgcccctccccagcccatcttactgcaagcagcgtcctgaggagacagcggcacgttctagctgcgtctgcggccagcccgtgccagtggagtgggctccgcgttgctcattctctccgacaggttgtcagcctctgtccccgctgcacagggtcttgccccttctccggggcctgtgccagctcccttccctccccgttgtcctgtccccacagccattctgggagctggggaacctggtctcaaggcaggccctgcagttccacagaggtggcaggtcttgccctttggccaacagatttcttgtcctgccttctagatgcctctgagctccaaacccagggcagccatggcttctcatttacaccaacaggtttcagttccaacagaaaggtcggggtaggttcgtgcagagatggggctggcaggggggctatgggaggattattttaacagatcaagaaaatgaagccaaatcaagtgaattaaattcctcacaattattttctttccctgaggtttgattggcacagcagcaaaagttgaggccaccccacttgtgtccactgtttttagaaaaaaatgaatggcttcctgccattgtggggctggactcttgggctttcttggtgggagcggagaaggggcctcccacccttgtccgagttgcctcccactggaggtcaggagtctacactgcagcctcgggcactgtggggagtgcatgcctggggcctctgggtggggaccatggacaggccctggtcactgtcctaacctttgtcaggacaaaggtagcaagaggatttcctggcgggtgggaaggaatggctggggcggccagttttgacacgccccagtgccctggagaacaaccagggtcatctgcacttgatgactgctccccgacccccagcccggacacctcattcccctcccactacagggatcaagtgacctgggaagaaccgagtttaacaccaggatgtgtttccttagatttcctttcctaggcgatttccagggagagccctgattggacaatcacatcacagatcacactgcagtttccatgttagcactgtggatgggtttttaatcaataaaaactgggggtttcttctcaccgactctccacttgcccaaactgccaaaagctggtgattctgggacaggccttcactttggagccacgggatggggtgggggagccccatgggcctgggaaggagggtgctgtggagggggctgcagggctgaccagcaggcagcctcatctggtcgggggcgggggcggcaggagcagaagcggggtctccgtccttgggactgtcctggttggccacgggccctgaggatgcacggtgcctggggctcctgtgccggtgggcggggggcatgctggcctctgagcgatcaggcgaggccagcgagggtgtgcttgcaaattcaagcaataagaggggggttcctgggggcttccagcccaggctagaagcccccatggcttctggcagctggacatcagccccaggtattggggtgattttggtcatgacagtgtgcctgtcccactgttacacgcatgaatgggggttatggggtgggggtggggactcagggctggaccgacgtcctagtggacctgatgtgaaattcctgtcaaacaaacaccacttttcaatggtttgctaggagtatttctgtattgaaagtttctaattatgctttttaaaaaaatactaaaaataaaggttcaagctgccaaa

SEQ ID NO: 313075 - DNA, 1866 bp, Homo sapiens
cggtggtagcggcggcggctgctgaggaggaggagggggagcggagggaggtgtttctgtcagttccggctgtttgttcgggaagtggatccgccgctgccggagcagcccgaagggagctgcggatcgcgaggccagtaccgaccccgcccgcccgcgcgcaccgcccccgcccgccatggcccgggactacgaccacctcttcaagctgctccgacaggttgtcagcctctgtccccgctgcacagggtcttgccccttctccggggcctgtgccagctcccttccctccccgttgtcctgtccccacagccattctgggagctggggaacctggtctcaaggcaggccctgcagttccacagaggtggcaggtcttgccctttggccaacagatttcttgtcctgccttctagatgcctctgagctccaaacccagggcagccatggcttctcatttacaccaacaggtttcagttccaacagaaaggtcggggtaggttcgtgcagagatggggctggcaggggggctatgggaggattattttaacagatcaagaaaatgaagccaaatcaagtgaattaaattcctcacaattattttctttccctgaggtttgattggcacagcagcaaaagttgaggccaccccacttgtgtccactgtttttagaaaaaaatgaatggcttcctgccattgtggggctggactcttgggctttcttggtgggagcggagaaggggcctcccacccttgtccgagttgcctcccactggaggtcaggagtctacactgcagcctcgggcactgtggggagtgcatgcctggggcctctgggtggggaccatggacaggccctggtcactgtcctaacctttgtcaggacaaaggtagcaagaggatttcctggcgggtgggaaggaatggctggggcggccagttttgacacgccccagtgccctggagaacaaccagggtcatctgcacttgatgactgctccccgacccccagcccggacacctcattcccctcccactacagggatcaagtgacctgggaagaaccgagtttaacaccaggatgtgtttccttagatttcctttcctaggcgatttccagggagagccctgattggacaatcacatcacagatcacactgcagtttccatgttagcactgtggatgggtttttaatcaataaaaactgggggtttcttctcaccgactctccacttgcccaaactgccaaaagctggtgattctgggacaggccttcactttggagccacgggatggggtgggggagccccatgggcctgggaaggagggtgctgtggagggggctgcagggctgaccagcaggcagcctcatctggtcgggggcgggggcggcaggagcagaagcggggtctccgtccttgggactgtcctggttggccacgggccctgaggatgcacggtgcctggggctcctgtgccggtgggcggggggcatgctggcctctgagcgatcaggcgaggccagcgagggtgtgcttgcaaattcaagcaataagaggggggttcctgggggcttccagcccaggctagaagcccccatggcttctggcagctggacatcagccccaggtattggggtgattttggtcatgacagtgtgcctgtcccactgttacacgcatgaatgggggttatggggtgggggtggggactcagggctggaccgacgtcctagtggacctgatgtgaaattcctgtcaaacaaacaccacttttcaatggtttgctaggagtatttctgtattgaaagtttctaattatgctttttaaaaaaatactaaaaataaaggttcaagctgccaaa

SEQ ID NO: 313076 - DNA, 787 bp, Homo sapiens
gataaggttttctgaagaccatttgtaaattgtccatttaaccatttttcagcttgctttgaaacaaaagtcacacctactatttttctatgaattagggaatgagggggagatcattcagttttacttttctttttgttgaaattttgtacccggattgcagttggcacttttcctaaaacagaattgtttcccacttaggtgtcagaatgtacctttgaacttccctaagaagcagcaggatctttttaactctctctggtctgtttagactttgaagtcccttctgtagaaaagtctcataactgagaaggctctgttttgggccgggtgggtctgctggcctccactcactgtgctgtttcctttgagtggcacacttgggaagctccggggcatgtgaaggagctgcaaacatgagaactaatgaaccaaggcggctgccaccaggaaggaacagaacgcaggcattcaaccatgacgtctgcacagtgttagtaacatgtcattgtggtttcgttctcactgtggtaaaatttatttctgagcacttaaactgtgttgcatacccctaattttttttttttctgtatcttccttgccctcaaataccctgaggtgataaactgttccagttgtagccaactaccactgctaggcctcaatgtaaattcagttgaaatttgcaattctatcagcaatttaatgtattgaattcagatcatcatttgtcattttaaccgacaaccacccaataaatttactctgcagttctgaactcagcatt

SEQ ID NO: 313077 - DNA, 2999 bp, Homo sapiens
gataaggttttctgaagaccatttgtaaattgtccatttaaccatttttcagcttgctttgaaacaaaagtcacacctactatttttctatgaattagggaatgagggggagatcattcagttttacttttctttttgttgaaattttgtacccggattgcagttggcacttttcctaaaacagaattgtttcccacttaggtgtcagaatgtacctttgaacttccctaagaagcagcaggatctttttaactctctctggtctgtttagactttgaagtcccttctgtagaaaagtctcataactgagaaggctctgttttgggccgggtgggtctgctggcctccactcactgtgctgtttcctttgagtggcacacttgggaagctccggggcatgtgaaggagctgcaaacatgagaactaatgaaccaaggcggctgccaccaggaaggaacagaacgcaggcattcaaccatgacgtctgcacagtgttagtaacatgtcattgtggtttcgttctcactgtggtaaaatttatttctgagcacttaaactgtgttgcatacccctaattttttttttttctgtatcttccttgccctcaaataccctgaggtgataaactgttccagttgtagccaactaccactgcgcccggccttaaataaaatattgtagtcattaatggtgtgtttgaattgaagagataccaggagatagaggtgaagtgcagtacttttattctttaagaatatagtctttagccaggtgcagtggtgtgtgcctgtagtctcagctatttgagaggctgaggtgagaggatcacttgagttcaggagttcaagaccagcctgggcaacatagcaagtccctggctcaaaaaaaaaaaagtttcccattcatattaactccatcttttaaaaatgtcatgattacaaagtgaaaagatttggctttcttagaggctcaatcacagaggtgaaagtgaccttggaaatcatatactctatccccatgttacacagattagaaaaactgaggttatggcactgacttaggcacccccagcaaggcaacccagggactacaactggcaatcccaactcctgggctagggctttttctacctttttttgcattggcctcttaaagaggcaatgaatactaattcctggcatcagaaaaaaaaaaaggcatgaggtgggaggattcttttttccctgatgggaaacagtgaataagaaaaatctcatcattcgatggaagaggtgacttaataattttattaatgaatttgatgtcccatgttttgtagttttgttatcattgaaccattggggctggaatctgcctaaataattttatcttggtagccagcaattatgttggtattttatgtgggccttcccagattttcatattaatgaaatgactaatagtcgtacttaagaggtaactctactaaagcagaatgagatctaatatgttgtggaaataaaagagtttgcagtggaatgatactctcactccgtgcttgtaaaattgagttctattcaagacggaactgctatgactggcctattcaaggcttcatatttttatacagactatttcacagaccatagatttattttaaaagggaaaatctcacacataattaagcagtggaaaatgtgctcaatgctatggtgcgtcaggccctctgtctaccaggtttctcccctttctgcagagctgtggaccctgtacgtaccaaacaggtgaacttggtccatctttccttcttcctttttttgcacatttgcatttatatcttcctgtactaaaagaaacaaattatttataattggggtgacaatataaaggaacaaaagatggggcaatagttgcttcctagctggagctgtaagtccatgttacagaaactcactatttaaaaagttttaaaagatttatgaaccttgtcctacaattcgctgaatacttatttgtcttttaaactcccctcggtgtatggatcatcttcgtcagaatgccgttgtttcattgtgaatcaggggaaaatgttaatcatttggagactgttttcttattaccaaatgtacaatccataagacaactgaaagcaacaactgctgggttcactgacaaagattataaaaatcatcacgttcaaagtagagtttttagccaaggtcaagaactaacctggggctgagtcagcgtctctacccacttaaataacagcgtaaagatctttcactaaattcgttatgtggtctgtctggatgtaaacctatatatttccttttgaaacagaatcatatcctgcagactcttggcactcctgcatagctttgaccgaatgttcactctcatcgtaatggaagatttctatctatgcagataatacatgtttttaaatactgttttctgtttagtcctcaatcttcctaactcaaattggggactgaggagagagaaaggtggttacccctgttaccgtgccatattcttcttgctgcttttcaaccccacgtgattgttgattgacggttctgctataatgtgcgtgcccttcaagtttcagaaaactttcccaatcatttcacttcaatcttaattgaacccaagagtcaaagttattattttctccgaacgtgtttgtgatcttctgttatattttggggcatgttacctttatggtatataagctgtagtgcatactctttgtattgcaaaaaactggtcagtaatttatgtacatgtattccacattttagtgtgcttgaagtgacaatccatagtttgtagtagtttgttatttgtcaactttaccctgtgttttaaggacatctaaacattccttgtcctatcaagatgacaaaagcagaatgtaatttttttttggaagcttcgtgattacctgtaacaagttctgtttttaaaacgaatacaaataaagttagtaactatttttaaatcaaaaacattga

SEQ ID NO: 313078 - DNA, 2187 bp, Homo sapiens
gataaggttttctgaagaccatttgtaaattgtccatttaaccatttttcagcttgctttgaaacaaaagtcacacctactatttttctatgaattagggaatgagggggagatcattcagttttacttttctttttgttgaaattttgtacccggattgcagttggcacttttcctaaaacagaattgtttcccacttaggtgtcagaatgtacctttgaacttccctaagaagcagcaggatctttttaactctctctggtctgtttagactttgaagtcccttctgtagaaaagtctcataactgagaaggctctgttttgggccgggtgggtctgctggcctccactcactgtgctgtttcctttgagtggcacacttgggaagctccggggcatgtgaaggagctgcaaacatgagaactaatgaaccaaggcggctgccaccaggaaggaacagaacgcaggcattcaaccatgacgtctgcacagtgttagtaacatgtcattgtggtttcgttctcactgtggtaaaatttatttctgagcacttaaactgtgttgcatacccctaattttttttttttctgtatcttccttgccctcaaataccctgaggtgataaactgttccagttgtagccaactaccactgcgcccggccttaaataaaatattgtagtcattaatggtgtgtttgaattgaagagataccaggagatagaggtgaagtgcagtacttttattctttaagaatatagtctttagccaggtgcagtggtgtgtgcctgtagtctcagctatttgagaggctgaggtgagaggatcacttgagttcaggagttcaagaccagcctgggcaacatagcaagtccctggctcaaaaaaaaaaaagtttcccattcatattaactccatcttttaaaaatgtcatgattacaaagtgaaaagatttggctttcttagaggctcaatcacagaggtgaaagtgaccttggaaatcatatactctatccccatgttacacagattagaaaaactgaggttatggcactgacttaggcacccccagcaaggcaacccagggactacaactggcaatcccaactcctgggctagggctttttctacctttttttgcattggcctcttaaagaggcaatgaatactaattcctggcatcagaaaaaaaaaaaggcatgaggtgggaggattcttttttccctgatgggaaacagtgaataagaaaaatctcatcattcgatggaagaggtgacttaataattttattaatgaatttgatgtcccatgttttgtagttttgttatcattgaaccattggggctggaatctgcctaaataattttatcttggtagccagcaattatgttggtattttatgtgggccttcccagattttcatattaatgaaatgactaatagtcgtacttaagaggtaactctactaaagcagaatgagatctaatatgttgtggaaataaaagagtttgcagtggaatgatactctcactccgtgcttgtaaaattgagttctattcaagacggaactgctatgactggcctattcaaggcttcatatttttatacagactatttcacagaccatagatttattttaaaagggaaaatctcacacataattaagcagtggaaaatgtgctcaatgctatggtgcgtcaggccctctgtctaccaggtttctcccctttctgcagagctgtggaccctgtacgtaccaaacaggtgaacttggtccatctttccttcttcctttttttgcacatttgcatttatatcttcctgtacgtggaactggatgaggcctcagagacaaggccgtccaacccgtcatttcacagatgagaaaacagaggcccggggagatcaggtggctcgcaaggagattagacccctgaccctgcccccgtcattctcttgtcttctcatcctccatcgccagatgctcctgggtgtgtttgtgaggccctttccctctctttaccccgcggaggagtccgacctggaagcctcctgctggacttctctactggactgagtgcccgggagtgccagagccagtcccaaaaaggacccaggagcggggacaccacggggaggcgccgccactccagtgtgcgggaccctggcacccccggcgcgttctccg

SEQ ID NO: 313079 - DNA, 1599 bp, Homo sapiens
  misc_feature (1529)..(1529): n is a, c, g, or t
  misc_feature (1533)..(1533): n is a, c, g, or t
  misc_feature (1542)..(1542): n is a, c, g, or t
  misc_feature (1579)..(1579): n is a, c, g, or t
  misc_feature (1586)..(1586): n is a, c, g, or t
gataaggttttctgaagaccatttgtaaattgtccatttaaccatttttcagcttgctttgaaacaaaagtcacacctactatttttctatgaattagggaatgagggggagatcattcagttttacttttctttttgttgaaattttgtacccggattgcagttggcacttttcctaaaacagaattgtttcccacttaggtgtcagaatgtacctttgaacttccctaagaagcagcaggatctttttaactctctctggtctgtttagactttgaagtcccttctgtagaaaagtctcataactgagaaggctctgttttgggccgggtgggtctgctggcctccactcactgtgctgtttcctttgagtggcacacttgggaagctccggggcatgtgaaggagctgcaaacatgagaactaatgaaccaaggcggctgccaccaggaaggaacagaacgcaggcattcaaccatgacgtctgcacagtgttagtaacatgtcattgtggtttcgttctcactgtggtaaaatttatttctgagcacttaaactgtgttgcatacccctaattttttttttttctgtatcttccttgccctcaaataccctgaggtgataaactgttccagttgtagccaactaccactgcgcccggccttaaataaaatattgtagtcattaatggtgtgtttgaattgaagagataccaggagatagaggtgaagtgcagtacttttattctttaagaatatagtctttagccaggtgcagtggtgtgtgcctgtagtctcagctatttgagaggctgaggtgagaggatcacttgagttcaggagttcaagaccagcctgggcaacatagcaagtccctggctcaaaaaaaaaaaagtttcccattcatattaactccatcttttaaaaatgtcatgattacaaagtgaaaagatttggctttcttagaggctcaatcacagaggtgaaagtgaccttggaaatcatatactctatccccatgttacacagattagaaaaactgaggttatggcactgacttaggcacccccagcaaggcaacccagggactacaactggcaatcccaactcctgggctagggctttttctacctttttttgcattggcctcttaaagaggcaatgaatactaattcctggcatcagaaaaaaaaaaaggcatgaggtgggaggattcttttttccctgatgggaaacagtgaataagaaaaatctcatcattcgatggaagaggtgacttaataattttattaatgaatttgatgtcccatgttttgtagttttgttatcattgaaccattggggctggaatctgcctaaataattttatcttggtagccagcaattatgttggtattttatgtgggccttcccagattttcatattaatgaaatgactaatagtcgtacttaagaggtaactctactaaagcagaatgagatctaatatgttgtggaaataaaagagtttgcagtggaatgatacccccnaacncccggggcnttgaaaaaattgggggcccaattccaaggccgggggnctgccantggcctgggccaa

SEQ ID NO: 313080 - DNA, 1694 bp, Homo sapiens
cgcagggctgtttggaggcgcttggggcgcacaatctggggcaggcggaaccttagtcctcagcctcgcgtttcccgcgactccgctctcaccgctacactaccacacaaacggcctccttcccccacccccgggggcccatcccggtggcgggctccggagctcgggactgctaatttcagcgaaacgattaaaagacgcccctacagctgacggcactttctctcctccggcagggaaggacgtccagcgtagcgtcgcccgcgcttccccgccggcgcagagcaggcctcacagaatcgcacgccgctggcacgcacgccgccccgcccccacggcccagcgccagccgcgccccgcgctcgcacgcatcccggcctcactgcccctcgactcctgttccgttggaggggcctgaggcgagcctgagcgcgctgttggccggagggaagccggaggagaccgggtcgactgggcagagcggcagagggtcgaggagcctgctctgcacgcccagggagtagaagtgggcagggagcagggtcacgtgagggagcgcgccgcgactgagcttgggtccgactggagctcaggctcgcgacccagactggtgggccaggcctccaagccggccttacacccaatccaaggaggacagaccggacacagagggacggagcgagcaaggagacatggcttcatcattcctgcccgcgggggccatcaccggcgacagcggtggagagctgagctcaggggacgactccggggaggtggagttcccccatagccctgagatcgaggagaccagttgcctggccgagctgtttgagaaggctgccgcgcacctgcaaggcctgattcaggtggccagcagggagcagctcttgtacctgtatgccaggtacaaacaggtcaaagttggaaattgtaatactcctaaaccaagcttctttgattttgaaggaaagcaaaaatgggaagcttggaaagcacttggtgattcaagccccagccaagcaatgcaggaatatatcgcagtagttaaaaaactagatccaggttggaatcctcagataccagagaagaaaggaaaagaagcaaatacaggttttggtgggccagttattagttctctatatcatgaagaaaccatcagggaagaagacaaaaatatatttgattactgcagggaaaacaacattgaccatataaccaaagccatcaaatcgaaaaatgtggatgtgaatgtgaaagatgaagagggtagggctctacttcactgggcctgtgatcgaggacataaggaactagtcacagtgttgctgcaacatagagctgacattaactgtcaggacaatgaaggccaaacagctctacattatgcctctgcctgtgagtttctggatattgtagagctgctgctccagtctggtgctgaccccactctccgagaccaggatggctgcctgccagaggaggtgacaggctgcaaaacagtttctttggtgctgcagcggcacacaactggcaaggcttaatcaaaagactggaaaactgcagtctgtaatagcataaggcttccattatgaaagaaaactacaaaaataatacttcttttccacccgtctttatgcacgatggctatatcgtcgtgcgggggggcgcggggggggggggggggggggggaggg

SEQ ID NO: 313081 - DNA, 1714 bp, Homo sapiens
cgcagggctgtttggaggcgcttggggcgcacaatctggggcaggcggaaccttagtcctcagcctcgcgtttcccgcgactccgctctcaccgctacactaccacacaaacggcctccttcccccacccccgggggcccatcccggtggcgggctccggagctcgggactgctaatttcagcgaaacgattaaaagacgcccctacagctgacggcactttctctcctccggcagggaaggacgtccagcgtagcgtcgcccgcgcttccccgccggcgcagagcaggcctcacagaatcgcacgccgctggcacgcacgccgccccgcccccacggcccagcgccagccgcgccccgcgctcgcacgcatcccggcctcactgcccctcgactcctgttccgttggaggggcctgaggcgagcctgagcgcgctgttggccggagggaagccggaggagaccgggtcgactgggcagagcggcagagggtcgaggagcctgctctgcacgcccagggagtagaagtgggcagggagcagggtcacgtgagggagcgcgccgcgactgagcttgggtccgactggagctcaggctcgcgacccagactggtgggccaggcctccaagccggccttacacccaatccaaggaggacagaccggacacagagggacggagcgagcaaggagacatggcttcatcattcctgcccgcgggggccatcaccggcgacagcggtggagagctgagctcaggggacgactccggggaggtggagttcccccatagccctgagatcgaggagaccagttgcctggccgagctgtttgagaaggctgccgcgcacctgcaaggcctgattcaggtggccagcagggagcagctcttgtacctgtatgccaggtacaaacaggtcaaagttggaaattgtaatactcctaaaccaagcttctttgattttgaaggaaagcaaaaatgggaagcttggaaagcacttggtgattcaagccccagccaagcaatgcaggaatatatcgcagtagttaaaaaactagatccaggttggaatcctcagataccagagaagaaaggaaaagaagcaaatacaggttttggtgggccagttattagttctctatatcatgaagaaaccatcagggaagaagacaaaaatatatttgattactgcagggaaaacaacattgaccatataaccaaagccatcaaatcgaaaaatgtggatgtgaatgtgaaagatgaagagggtagggctctacttcactgggcctgtgatcgaggacataaggaactagtcacagtgttgctgcaacatagagctgacattaactgtcaggacaatgaaggccaaacagctctacattatgcctctgcctgtgagtttctggatattgtagagctgctgctccagtctggtgctgaccccactctccgagaccaggatggctgcctgccagaggaggtgacaggctgcaaaacagtttctttggtgctgcagcggcacacaactggcaaggcttaatcaaaagactggaaaactgcagtctgtaatagcataaggcttccattatgaaagaaaactacaaaaataatacttcttttccacccgtctttctgagtagaatcctgggcccaaggggaaaggacaggaaagcaatggaacaccgactgcggagcttccatttgttctcctga

SEQ ID NO: 313082 - DNA, 2701 bp, Homo sapiens
cgcagggctgtttggaggcgcttggggcgcacaatctggggcaggcggaaccttagtcctcagcctcgcgtttcccgcgactccgctctcaccgctacactaccacacaaacggcctccttcccccacccccgggggcccatcccggtggcgggctccggagctcgggactgctaatttcagcgaaacgattaaaagacgcccctacagctgacggcactttctctcctccggcagggaaggacgtccagcgtagcgtcgcccgcgcttccccgccggcgcagagcaggcctcacagaatcgcacgccgctggcacgcacgccgccccgcccccacggcccagcgccagccgcgccccgcgctcgcacgcatcccggcctcactgcccctcgactcctgttccgttggaggggcctgaggcgagcctgagcgcgctgttggccggagggaagccggaggagaccgggtcgactgggcagagcggcagagggtcgaggagcctgctctgcacgcccagggagtagaagtgggcagggagcagggtcacgtgagggagcgcgccgcgactgagcttgggtccgactggagctcaggctcgcgacccagactggtgggccaggcctccaagccggccttacacccaatccaaggaggacagaccggacacagagggacggagcgagcaaggagacatggcttcatcattcctgcccgcgggggccatcaccggcgacagcggtggagagctgagctcaggggacgactccggggaggtggagttcccccatagccctgagatcgaggagaccagttgcctggccgagctgtttgagaaggctgccgcgcacctgcaaggcctgattcaggtggccagcagggagcagctcttgtacctgtatgccaggtacaaacaggtcaaagttggaaattgtaatactcctaaaccaagcttctttgattttgaaggaaagcaaaaatgggaagcttggaaagcacttggtgattcaagccccagccaagcaatgcaggaatatatcgcagtagttaaaaaactagatccaggttggaatcctcagataccagagaagaaaggaaaagaagcaaatacaggttttggtgggccagttattagttctctatatcatgaagaaaccatcagggaagaagacaaaaatatatttgattactgcagggaaaacaacattgaccatataaccaaagccatcaaatcgaaaaatgtggatgtgaatgtgaaagatgaagaggacaatgaaggccaaacagctctacattatgcctctgcctgtgagtttctggatattgtagagctgctgctccagtctggtgctgaccccactctccgagaccaggatggctgcctgccagaggaggtgacaggctgcaaaacagtttctttggtgctgcagcggcacacaactggcaaggcttaatcaaaagactggaaaactgcagtctgtaatagcataaggcttccattatgaaagaaaactacaaaaataatacttcttttccacccgtctttggtctcgctatgtcacccaggctgaagtgcagtggtatgatcatggttcactacagcctcaacctcctgggctcaaggaatcctcccacctcagcctcctgtgtagctgagatagctgggactacaggtgcgtgccaccacaccccactaatttttgtatcttttgtacagatagggtctctctgtgttcctcaggtggtctcaaactcctggcctcaagcagttttcaggcctcttaaagtgctgagattacaggtgtgagccactgtgcccagccaggtatgccactcttgaaactggctcccaacattttccctgtaagccccaaaagctccatctggggaattcactgacttttactattatataaggaaagtagatagttgacataggaagagaaatgaaataaaaaatgagttgagatgcaaagataaccacttaaaagataatttttctaacaggtgttactattaaaataatgagtaataaacttgcttagtatagtcctcaacggtgaagaagattttcattagcatgaactaacctgttctttggaataagcccctctataacagaaatgaggcatattagtgctgtttattttgtgatttttctatcttaacttcttattttctgagatataaaccaaaatcattcaccaagatgattcatttttgaaataatttaattaatctgtggaagtgatatgcatattagtacatactgaaatgctgtaattctagtagagcattctcttcactgtctgttctttcacaatccttgctacattgcaacctgctgtttagcttaagtctttcacattccacactaattgaatgtgttttaagaaacatacattagttatagtgaagtcaccaggatgatgccttcagtttttaattggtattactttgtgcattttttaagacattagcaaatcaaaaaccatttattcatttttaatttacagggtatttgagcaagaagctattaaggaactccttttttcatctctttagcagttcgaacttgatatttcttagacaagttttttattacctgttttgccgcatctaaaactgtatagattttaagcaaagaatataacttatcttttattttattttaaaggtttcaaatttatattcaaagctatca

SEQ ID NO: 313083 - DNA, 1041 bp, Homo sapiens
cgcagggctgtttggaggcgcttggggcgcacaatctggggcaggcggaaccttagtcctcagcctcgcgtttcccgcgactccgctctcaccgctacactaccacacaaacggcctccttcccccacccccgggggcccatcccggtggcgggctccggagctcgggactgctaatttcagcgaaacgattaaaagacgcccctacagctgacggcactttctctcctccggcagggaaggacgtccagcgtagcgtcgcccgcgcttccccgccggcgcagagcaggcctcacagaatcgcacgccgctggcacgcacgccgccccgcccccacggcccagcgccagccgcgccccgcgctcgcacgcatcccggcctcactgcccctcgactcctgttccgttggaggggcctgaggcgagcctgagcgcgctgttggccggagggaagccggaggagaccgggtcgactgggcagagcggcagagggtcgaggagcctgctctgcacgcccagggagtagaagtgggcagggagcagggtcacgtgagggagcgcgccgcgactgagcttgggtccgactggagctcaggctcgcgacccagactggtgggccaggcctccaagccggccttacacccaatccaaggaggacagaccggacacagagggacggagcgagcaaggagacatggcttcatcattcctgcccgcgggggccatcaccggcgacagcggtggagagctgagctcaggggacgactccggggaggtggagttcccccatagccctgagatcgaggagaccagttgcctggccgagctgtttgagaaggctgccgcgcacctgcaaggcctgattcaggtggccagcagggagcagctcttgtacctgtatgccaggtacaaacagtcaaattggaaattgtatactcctaaccaagcttcttgatttgaagaaacaaaatggaacttgaacactgtgatcaacccaccaactatcagatattccatagtaaactgatcagtggacctagatc

SEQ ID NO: 313084 - DNA, 1100 bp, Homo sapiens
cgcagggctgtttggaggcgcttggggcgcacaatctggggcaggcggaaccttagtcctcagcctcgcgtttcccgcgactccgctctcaccgctacactaccacacaaacggcctccttcccccacccccgggggcccatcccggtggcgggctccggagctcgggactgctaatttcagcgaaacgattaaaagacgcccctacagctgacggcactttctctcctccggcagggaaggacgtccagcgtagcgtcgcccgcgcttccccgccggcgcagagcaggcctcacagaatcgcacgccgctggcacgcacgccgccccgcccccacggcccagcgccagccgcgccccgcgctcgcacgcatcccggcctcactgcccctcgactcctgttccgttggaggggcctgaggcgagcctgagcgcgctgttggccggagggaagccggaggagaccgggtcgactgggcagagcggcagagggtcgaggagcctgctctgcacgcccagggagtagaagtgggcagggagcagggtcacgtgagggagcgcgccgcgactgagcttgggtccgactggagctcaggctcgcgacccagactggtgggccaggcctccaagccggccttacacccaatccaaggaggacagaccggacacagagggacggagcgagcaaggagacatggcttcatcattcctgcccgcgggggccatcaccggcgacagcggtggagagctgagctcaggggacgactccggggaggtggagttcccccatagccctgagatcgaggagaccagttgcctggccgagctgtttgagaaggctgccgcgcacctgcaaggcctgattcaggtggccagcagggagcagctcttgtacctgtatgccaggtacaaacagagggtctgggtttcaccacatttcccaggctggtcttgaactcctgagctcagacgatccacctgcccaaagtgctgggattacaggcatgagccactgcacctggctgacacttttttttttttttttttgagatggagttttgctcctgttgcccaggctggagtgcagtggctggatcttagc

SEQ ID NO: 313085 - DNA, 309 bp, Homo sapiens
ctagtcacagtgttgctgcaacatagagctgacattaactgtcaggtaagagtgataaagaagagcttttattttttaaattgaagtataattcgcataacataaaatttaccagattaactcttttgaaatgtgcaattcagtggcgtttagtacatttcacaatgttgtgtaatcattgctactatatagttccgtaatactgttgtcaccgcaaaagaaaaccctgttcccactaagcagtcactttttaacattttttttatttctccccttgccccagaccttggcaaccactaatctgctttc

SEQ ID NO: 313086 - DNA, 1180 bp, Homo sapiens
ggcacgagggatttttgtccttagaagcactgaaggaacctgcaataaggtgaggaggtagacgcgccgcgactgagcttgggtccgactggagctcaggctcgcgacccagactggtgggccaggcctccaagccggccttacacccaatccaaggaggacagaccggacacagagggacggagcgagcaaggagacatggcttcatcattcctgcccgcgggggccatcaccggcgacagcggtggagagctgagctcaggggacgactccggggaggtggagttcccccatagccctgagatcgaggagaccagttgcctggccgagctgtttgagaaggctgccgcgcacctgcaaggcctgattcaggtggccagcagggagcagctcttgtacctgtatgccaggtacaaacaggtcaaagttggaaattgtaatactcctaaaccaagcttctttgattttgaaggaaagcaaaaatgggaagcttggaaagcacttggtgattcaagccccagccaagcaatgcaggaatatatcgcagtagttaaaaaactagatccaggttggaatcctcagataccagagaagaaaggaaaagaagcaaatacaggttttggtgggccagttattagttctctatatcatgaagaaaccatcagggaagaagacaaaaatatatttgattactgcagggaaaacaacattgaccatataaccaaagccatcaaatcgaaaaatgtggatgtgaatgtgaaagatgaagagggtagggctctacttcactgggcctgtgatcgaggacataaggaactagtcacagtgttgctgcaacatagagctgacattaactgtcaggacaatgaaggccaaacagctctacattatgcctctgcctgtgagtttctggatattgtagagctgctgctccagtctggtgctgaccccactctccgagaccaggatggctgcctgccagaggaggtgacaggctgcaaaacagtttctttggtgctgcagcggcacacaactggcaaggcttaatcaaaagactggaaaactgcagtctgtaatagcataaggcttccattatgaaagaaaactacaaaaataatacttcttttccacccgtctttggtatgtattggctaataaaatcagttctgtggaactggga

SEQ ID NO: 313087 - DNA, 1674 bp, Homo sapiens
cgcagggctgtttggaggcgcttggggcgcacaatctggggcaggcggaaccttagtcctcagcctcgcgtttcccgcgactccgctctcaccgctacactaccacacaaacggcctccttcccccacccccgggggcccatcccggtggcgggctccggagctcgggactgctaatttcagcgaaacgattaaaagacgcccctacagctgacggcactttctctcctccggcagggaaggacgtccagcgtagcgtcgcccgcgcttccccgccggcgcagagcaggcctcacagaatcgcacgccgctggcacgcacgccgccccgcccccacggcccagcgccagccgcgccccgcgctcgcacgcatcccggcctcactgcccctcgactcctgttccgttggaggggcctgaggcgagcctgagcgcgctgttggccggagggaagccggaggagaccgggtcgactgggcagagcggcagagggtcgaggagcctgctctgcacgcccagggagtagaagtgggcagggagcagggtcacgtgagggagcgcgccgcgactgagcttgggtccgactggagctcaggctcgcgacccagactggtgggccaggcctccaagccggccttacacccaatccaaggaggacagaccggacacagagggacggagcgagcaaggagacatggcttcatcattcctgcccgcgggggccatcaccggcgacagcggtggagagctgagctcaggggacgactccggggaggtggagttcccccatagccctgagatcgaggagaccagttgcctggccgagctgtttgagaaggctgccgcgcacctgcaaggcctgattcaggtggccagcagggagcagctcttgtacctgtatgccaggtacaaacaggtcaaagttggaaattgtaatactcctaaaccaagcttctttgattttgaaggaaagcaaaaatgggaagcttggaaagcacttggtgattcaagccccagccaagcaatgcaggaatatatcgcagtagttaaaaaactagatccaggttggaatcctcagataccagagaagaaaggaaaagaagcaaatacaggttttggtgggccagttattagttctctatatcatgaagaaaccatcagggaagaagacaaaaatatatttgattactgcagggaaaacaacattgaccatataaccaaagccatcaaatcgaaaaatgtggatgtgaatgtgaaagatgaagagggtagggctctacttcactgggcctgtgatcgaggacataaggaactagtcacagtgttgctgcaacatagagctgacattaactgtcaggacaatgaaggccaaacagctctacattatgcctctgcctgtgagtttctggatattgtagagctgctgctccagtctggtgctgaccccactctccgagaccaggatggctgcctgccagaggaggtgacaggctgcaaaacagtttctttggtgctgcagcggcacacaactggcaaggcttaatcaaaagactggaaaactgcagtctgtaatagcataaggcttccattatgaaagaaaactacaaaaataatacttcttttccacccgtctttggtatgtattggctaataaaatcagttctgtggaactggga

SEQ ID NO: 313088 - DNA, 2083 bp, Homo sapiens
cgcagggctgtttggaggcgcttggggcgcacaatctggggcaggcggaaccttagtcctcagcctcgcgtttcccgcgactccgctctcaccgctacactaccacacaaacggcctccttcccccacccccgggggcccatcccggtggcgggctccggagctcgggactgctaatttcagcgaaacgattaaaagacgcccctacagctgacggcactttctctcctccggcagggaaggacgtccagcgtagcgtcgcccgcgcttccccgccggcgcagagcaggcctcacagaatcgcacgccgctggcacgcacgccgccccgcccccacggcccagcgccagccgcgccccgcgctcgcacgcatcccggcctcactgcccctcgactcctgttccgttggaggggcctgaggcgagcctgagcgcgctgttggccggagggaagccggaggagaccgggtcgactgggcagagcggcagagggtcgaggagcctgctctgcacgcccagggagtagaagtgggcagggagcagggtcacgtgagggagcgcgccgcgactgagcttgggtccgactggagctcaggctcgcgacccagactggtgggccaggcctccaagccggccttacacccaatccaaggaggacagaccggacacagagggacggagcgagcaaggagacatggcttcatcattcctgcccgcgggggccatcaccggcgacagcggtggagagctgagctcaggggacgactccggggaggtggagttcccccatagccctgagatcgaggagaccagttgcctggccgagctgtttgagaaggctgccgcgcacctgcaaggcctgattcaggtggccagcagggagcagctcttgtacctgtatgccaggtacaaacaggtcaaagttggaaattgtaatactcctaaaccaagcttctttgattttgaaggaaagcaaaaatgggaagcttggaaagcacttggtgattcaagccccagccaagcaatgcaggaatatatcgcagtagttaaaaaactagatccaggttggaatcctcagataccagagaagaaaggaaaagaagcaaatacaggttttggtgggccagttattagttctctatatcatgaagaaaccatcagggaagaagacaaaaatatatttgattactgcagggaaaacaacattgaccatataaccaaagccatcaaatcgaaaaatgtggatgtgaatgtgaaagatgaagagggtagggctctacttcactgggcctgtgatcgaggacataaggaactagtcacagtgttgctgcaacatagagctgacattaactgtcaggacaatgaaggccaaacagctctacattatgcctctgcctgtgagtttctggatattgtagagctgctgctccagtctggtgctgaccccactctccgagaccaggatggctgcctgccagaggaggtgacaggctgcaaaacagtttctttggtgctgcagcggcacacaactggcaaggcttaatcaaaagactggaaaactgcagtctgtaatagcataaggcttccattatgaaagaaaactacaaaaataatacttcttttccacccgtctttggtatgtattggctaataaaatcagttctgtggaactgggaaaaaaaaaaaaaaaaaaaaaaaaaaaaaaaaaaaaaaaaaaaagaaaaaaaaaaaaaaaaaaaaaaaaaaaaaaaaaaaaaaaaaaaaaaaaaaaaaaaaaaaaaaaaaaaaaaaaaaagaaaaaacaaggggggggccgcggatgaaaacgacgcgaggggaacgaacaaaccataagagcaacccacaactaaatagataaaagggagaggccgcaccacatgaagcaggaaaactaaaaaaacagataccgacagacatgccgacataaaaaacaacacagcgggaaggcgaaaacaaccaaatccaaaccggactgcggacagaggaaggaaacacaccacaacacgagatggggggagacacacagacgaacaacacacaaccaggaaacaaacaccagccaac

SEQ ID NO: 313089 - DNA, 2791 bp, Homo sapiens
cgcagggctgtttggaggcgcttggggcgcacaatctggggcaggcggaaccttagtcctcagcctcgcgtttcccgcgactccgctctcaccgctacactaccacacaaacggcctccttcccccacccccgggggcccatcccggtggcgggctccggagctcgggactgctaatttcagcgaaacgattaaaagacgcccctacagctgacggcactttctctcctccggcagggaaggacgtccagcgtagcgtcgcccgcgcttccccgccggcgcagagcaggcctcacagaatcgcacgccgctggcacgcacgccgccccgcccccacggcccagcgccagccgcgccccgcgctcgcacgcatcccggcctcactgcccctcgactcctgttccgttggaggggcctgaggcgagcctgagcgcgctgttggccggagggaagccggaggagaccgggtcgactgggcagagcggcagagggtcgaggagcctgctctgcacgcccagggagtagaagtgggcagggagcagggtcacgtgagggagcgcgccgcgactgagcttgggtccgactggagctcaggctcgcgacccagactggtgggccaggcctccaagccggccttacacccaatccaaggaggacagaccggacacagagggacggagcgagcaaggagacatggcttcatcattcctgcccgcgggggccatcaccggcgacagcggtggagagctgagctcaggggacgactccggggaggtggagttcccccatagccctgagatcgaggagaccagttgcctggccgagctgtttgagaaggctgccgcgcacctgcaaggcctgattcaggtggccagcagggagcagctcttgtacctgtatgccaggtacaaacaggtcaaagttggaaattgtaatactcctaaaccaagcttctttgattttgaaggaaagcaaaaatgggaagcttggaaagcacttggtgattcaagccccagccaagcaatgcaggaatatatcgcagtagttaaaaaactagatccaggttggaatcctcagataccagagaagaaaggaaaagaagcaaatacaggttttggtgggccagttattagttctctatatcatgaagaaaccatcagggaagaagacaaaaatatatttgattactgcagggaaaacaacattgaccatataaccaaagccatcaaatcgaaaaatgtggatgtgaatgtgaaagatgaagagggtagggctctacttcactgggcctgtgatcgaggacataaggaactagtcacagtgttgctgcaacatagagctgacattaactgtcaggacaatgaaggccaaacagctctacattatgcctctgcctgtgagtttctggatattgtagagctgctgctccagtctggtgctgaccccactctccgagaccaggatggctgcctgccagaggaggtgacaggctgcaaaacagtttctttggtgctgcagcggcacacaactggcaaggcttaatcaaaagactggaaaactgcagtctgtaatagcataaggcttccattatgaaagaaaactacaaaaataatacttcttttccacccgtctttggtctcgctatgtcacccaggctgaagtgcagtggtatgatcatggttcactacagcctcaacctcctgggctcaaggaatcctcccacctcagcctcctgtgtagctgagatagctgggactacaggtgcgtgccaccacaccccactaatttttgtatcttttgtacagatagggtctctctgtgttcctcaggtggtctcaaactcctggcctcaagcagttttcaggcctcttaaagtgctgagattacaggtgtgagccactgtgcccagccaggtatgccactcttgaaactggctcccaacattttccctgtaagccccaaaagctccatctggggaattcactgacttttactattatataaggaaagtagatagttgacataggaagagaaatgaaataaaaaatgagttgagatgcaaagataaccacttaaaagataatttttctaacaggtgttactattaaaataatgagtaataaacttgcttagtatagtcctcaacggtgaagaagattttcattagcatgaactaacctgttctttggaataagcccctctataacagaaatgaggcatattagtgctgtttattttgtgatttttctatcttaacttcttattttctgagatataaaccaaaatcattcaccaagatgattcatttttgaaataatttaattaatctgtggaagtgatatgcatattagtacatactgaaatgctgtaattctagtagagcattctcttcactgtctgttctttcacaatccttgctacattgcaacctgctgtttagcttaagtctttcacattccacactaattgaatgtgttttaagaaacatacattagttatagtgaagtcaccaggatgatgccttcagtttttaattggtattactttgtgcattttttaagacattagcaaatcaaaaaccatttattcatttttaatttacagggtatttgagcaagaagctattaaggaactccttttttcatctctttagcagttcgaacttgatatttcttagacaagttttttattacctgttttgccgcatctaaaactgtatagattttaagcaaagaatataacttatcttttattttattttaaaggtttcaaatttatattcaaagctatca

SEQ ID NO: 313090 - DNA, 2943 bp, Homo sapiens
cgcagggctgtttggaggcgcttggggcgcacaatctggggcaggcggaaccttagtcctcagcctcgcgtttcccgcgactccgctctcaccgctacactaccacacaaacggcctccttcccccacccccgggggcccatcccggtggcgggctccggagctcgggactgctaatttcagcgaaacgattaaaagacgcccctacagctgacggcactttctctcctccggcagggaaggacgtccagcgtagcgtcgcccgcgcttccccgccggcgcagagcaggcctcacagaatcgcacgccgctggcacgcacgccgccccgcccccacggcccagcgccagccgcgccccgcgctcgcacgcatcccggcctcactgcccctcgactcctgttccgttggaggggcctgaggcgagcctgagcgcgctgttggccggagggaagccggaggagaccgggtcgactgggcagagcggcagagggtcgaggagcctgctctgcacgcccagggagtagaagtgggcagggagcagggtcacgtgagggagcgcgccgcgactgagcttgggtccgactggagctcaggctcgcgacccagactggtgggccaggcctccaagccggccttacacccaatccaaggaggacagaccggacacagagggacggagcgagcaaggagacatggcttcatcattcctgcccgcgggggccatcaccggcgacagcggtggagagctgagctcaggggacgactccggggaggtggagttcccccatagccctgagatcgaggagaccagttgcctggccgagctgtttgagaaggctgccgcgcacctgcaaggcctgattcaggtggccagcagggagcagctcttgtacctgtatgccaggtacaaacaggtcaaagttggaaattgtaatactcctaaaccaagcttctttgattttgaaggaaagcaaaaatgggaagcttggaaagcacttggtgattcaagccccagccaagcaatgcaggaatatatcgcagtagttaaaaaactagatccaggttggaatcctcagataccagagaagaaaggaaaagaagcaaatacaggttttggtgggccagttattagttctctatatcatgaagaaaccatcagggaagaagacaaaaatatatttgattactgcagggaaaacaacattgaccatataaccaaagccatcaaatcgaaaaatgtggatgtgaatgtgaaagatgaagagggtagggctctacttcactgggcctgtgatcgaggacataaggaactagtcacagtgttgctgcaacatagagctgacattaactgtcaggtaccagctcagccacaatgggctagaacgccaagcgggctgttggggtgcctgattccatgcctaggctcttggacagctttggaccagacaagccttggatagccttctggacttgtcgtgggccagaggggagcccactgccctgaagggacaatgaaggccaaacagctctacattatgcctctgcctgtgagtttctggatattgtagagctgctgctccagtctggtgctgaccccactctccgagaccaggatggctgcctgccagaggaggtgacaggctgcaaaacagtttctttggtgctgcagcggcacacaactggcaaggcttaatcaaaagactggaaaactgcagtctgtaatagcataaggcttccattatgaaagaaaactacaaaaataatacttcttttccacccgtctttggtctcgctatgtcacccaggctgaagtgcagtggtatgatcatggttcactacagcctcaacctcctgggctcaaggaatcctcccacctcagcctcctgtgtagctgagatagctgggactacaggtgcgtgccaccacaccccactaatttttgtatcttttgtacagatagggtctctctgtgttcctcaggtggtctcaaactcctggcctcaagcagttttcaggcctcttaaagtgctgagattacaggtgtgagccactgtgcccagccaggtatgccactcttgaaactggctcccaacattttccctgtaagccccaaaagctccatctggggaattcactgacttttactattatataaggaaagtagatagttgacataggaagagaaatgaaataaaaaatgagttgagatgcaaagataaccacttaaaagataatttttctaacaggtgttactattaaaataatgagtaataaacttgcttagtatagtcctcaacggtgaagaagattttcattagcatgaactaacctgttctttggaataagcccctctataacagaaatgaggcatattagtgctgtttattttgtgatttttctatcttaacttcttattttctgagatataaaccaaaatcattcaccaagatgattcatttttgaaataatttaattaatctgtggaagtgatatgcatattagtacatactgaaatgctgtaattctagtagagcattctcttcactgtctgttctttcacaatccttgctacattgcaacctgctgtttagcttaagtctttcacattccacactaattgaatgtgttttaagaaacatacattagttatagtgaagtcaccaggatgatgccttcagtttttaattggtattactttgtgcattttttaagacattagcaaatcaaaaaccatttattcatttttaatttacagggtatttgagcaagaagctattaaggaactccttttttcatctctttagcagttcgaacttgatatttcttagacaagttttttattacctgttttgccgcatctaaaactgtatagattttaagcaaagaatataacttatcttttattttattttaaaggtttcaaatttatattcaaagctatca

SEQ ID NO: 313091 - DNA, 2235 bp, Homo sapiens
cgcagggctgtttggaggcgcttggggcgcacaatctggggcaggcggaaccttagtcctcagcctcgcgtttcccgcgactccgctctcaccgctacactaccacacaaacggcctccttcccccacccccgggggcccatcccggtggcgggctccggagctcgggactgctaatttcagcgaaacgattaaaagacgcccctacagctgacggcactttctctcctccggcagggaaggacgtccagcgtagcgtcgcccgcgcttccccgccggcgcagagcaggcctcacagaatcgcacgccgctggcacgcacgccgccccgcccccacggcccagcgccagccgcgccccgcgctcgcacgcatcccggcctcactgcccctcgactcctgttccgttggaggggcctgaggcgagcctgagcgcgctgttggccggagggaagccggaggagaccgggtcgactgggcagagcggcagagggtcgaggagcctgctctgcacgcccagggagtagaagtgggcagggagcagggtcacgtgagggagcgcgccgcgactgagcttgggtccgactggagctcaggctcgcgacccagactggtgggccaggcctccaagccggccttacacccaatccaaggaggacagaccggacacagagggacggagcgagcaaggagacatggcttcatcattcctgcccgcgggggccatcaccggcgacagcggtggagagctgagctcaggggacgactccggggaggtggagttcccccatagccctgagatcgaggagaccagttgcctggccgagctgtttgagaaggctgccgcgcacctgcaaggcctgattcaggtggccagcagggagcagctcttgtacctgtatgccaggtacaaacaggtcaaagttggaaattgtaatactcctaaaccaagcttctttgattttgaaggaaagcaaaaatgggaagcttggaaagcacttggtgattcaagccccagccaagcaatgcaggaatatatcgcagtagttaaaaaactagatccaggttggaatcctcagataccagagaagaaaggaaaagaagcaaatacaggttttggtgggccagttattagttctctatatcatgaagaaaccatcagggaagaagacaaaaatatatttgattactgcagggaaaacaacattgaccatataaccaaagccatcaaatcgaaaaatgtggatgtgaatgtgaaagatgaagagggtagggctctacttcactgggcctgtgatcgaggacataaggaactagtcacagtgttgctgcaacatagagctgacattaactgtcaggtaccagctcagccacaatgggctagaacgccaagcgggctgttggggtgcctgattccatgcctaggctcttggacagctttggaccagacaagccttggatagccttctggacttgtcgtgggccagaggggagcccactgccctgaagggacaatgaaggccaaacagctctacattatgcctctgcctgtgagtttctggatattgtagagctgctgctccagtctggtgctgaccccactctccgagaccaggatggctgcctgccagaggaggtgacaggctgcaaaacagtttctttggtgctgcagcggcacacaactggcaaggcttaatcaaaagactggaaaactgcagtctgtaatagcataaggcttccattatgaaagaaaactacaaaaataatacttcttttccacccgtctttggtatgtattggctaataaaatcagttctgtggaactgggaaaaaaaaaaaaaaaaaaaaaaaaaaaaaaaaaaaaaaaaaaaagaaaaaaaaaaaaaaaaaaaaaaaaaaaaaaaaaaaaaaaaaaaaaaaaaaaaaaaaaaaaaaaaaaaaaaaaaaagaaaaaacaaggggggggccgcggatgaaaacgacgcgaggggaacgaacaaaccataagagcaacccacaactaaatagataaaagggagaggccgcaccacatgaagcaggaaaactaaaaaaacagataccgacagacatgccgacataaaaaacaacacagcgggaaggcgaaaacaaccaaatccaaaccggactgcggacagaggaaggaaacacaccacaacacgagatggggggagacacacagacgaacaacacacaaccaggaaacaaacaccagccaac

SEQ ID NO: 313092 - DNA, 861 bp, Homo sapiens
ccaaagtgctggggttacagacgtgagccaccgcacctagctcagtgacacaatcttgatctagtgtttcattcacttaattcaagacaaaggaggcctttgctggaaaatgcatcttttctgcttttaccctacatagttcacagacactctctgcagttactaaacggggtggcctgagtaatcctgatctttaagcaaggatcttttctaaactctgagtggtatgggtaagaaaaagaaaagaaatatctcggtcttctgcagtgaaattgatttttctaatgctcctggaaatactgttttagagtagaaaaataagtggagccaggcactagaatcataggaaaatactttttccaaattgagaagggaacatacgtacatacataaatttggtaaccaaaatgcattttttcttttttcttttaatctaccatttgaaatctaaaatactgtgataaaaactgtcaaaagtgaaaatttgtttatgaaaggtatattgtttaatacatcctctactatagagtgatcagaagcaaaagaagtaaattaatgaaacatcaagaccccactcatctcagcactaagtctgtcagcaccaccatccttcctaaaggaaataaattaaacttgattccttaaggtactacaggaatcagagacaaaagtggaaagaacaaattaaggttggagagaaattttcagtttaaagtttatagatatgaagaaaattcttattttacccattaagaacaaatacagaagtgaaattttcttactggtagtcagtggtcagatatagctacattttccccttaagtcataccacccaactctagcttccaaaaaatgttgaaa

SEQ ID NO: 313093 - DNA, 1804 bp, Homo sapiens
  misc_feature (1603)..(1603): n is a, c, g, or t
  misc_feature (1626)..(1626): n is a, c, g, or t
  misc_feature (1645)..(1645): n is a, c, g, or t
  misc_feature (1664)..(1664): n is a, c, g, or t
  misc_feature (1673)..(1673): n is a, c, g, or t
caacagttccagttacaacagctccagttacaacagctccagttcaacagctccagttacaacagctccgctgatgaaagttagagctgcttcctccaggcagccctgggagtaggggcacagacttgtgcctcgcttcccagcagctgcccagtgcctctgtccacacccacctccctggtgtacttgccccctacagcagcagcccagatcctcccctggattaaaattgcaactggtgccctaacccaaaacttgagaaaaaattctctatcacatccactcttctggcatttgtagaatctctggccctgggtgtgtcttttcctgtagctgttacagatttcttaagcagatttcttaagcagatggacatgtccagattcatgcctaaatatccagttgataactggaaaatgctggttcacggttctttagtaaagattaataagggatccccatgtgctggggagtgtgcttccatttgagtggggatatcagaagaaaaagaggggcttgtgtagtaaaccttactttgccaattcagctgtagagcccaaattgttacaagatgcaaagatgtactccactttttgaccaagcatcagcacctttggcttaccatccagtccttacttctgtgactgtaagggccccaccagtgtcagcagacttgtttgtgctttgggggaactctcttctcagctccctttgccagtcccaagcctggtggatctgcatctcacgcccactgcacaccgttcctctccatctgcccttccctcccaggcccccggtcgggggagcaggtgtggcaagtgttaggaactcccttctggtgacagctggtcttcctagagtgttgctggtaactatcgcctcttggtcttctgacatcattgccaggaacggggcactttttcgtcttgtagtttggccctcgggtttcctcactaggtattgtgtaactccctcaaaaaaaggtttatgaaatgctgaacctcaggtttcatagacgtctttgtacactaaaaattctgcagcagaatatttttaaacattcgcagttttttgtaagctatatttttgtatatttaattgctattttaaaattttaatgcattttgctaatcactcctcaaaaataaaacatgcatgtaattgactcaaacgtgtaaataaaagcaaattttgaaaaatagtgttgtgcatatgcctttgaacagagggaacatccatgtgccactgacgcaagcaccttcagcaagacttggaaactcaaggtgagtaattctatcagagctggtaactagtactgagtgattgtgatggaagcccctgcccttcctgtggcatagtgtgcaagcgggggtggggtcagtggtgaagagtgtgtcaggccaccacagccagagaacagagaatcctggaatgcagagtacagtggagtctgaagccccctggcctccctgagctctgcaaacagctggatacagataagcagtcttccacgtgaacgccagcaccagggtgacctgaaatagcctcgtgccgaattcggcacgagcacacatcacaggcttaaactgtcttagagactttncaagtgattggatcacaggctanggatctgtgcatggtgccngttgaaacccaagtcttcncagtgctangtgagggagggctcaaccggggtaatgtgaatggggctgttgtcttttgcaatcccttaacatattaactttggacaaaccttgataggcttgcaccaaacctttctaaacatttttatggatcatctcct

SEQ ID NO: 313094 - DNA, 1750 bp, Homo sapiens
  misc_feature (1549)..(1549): n is a, c, g, or t
  misc_feature (1572)..(1572): n is a, c, g, or t
  misc_feature (1591)..(1591): n is a, c, g, or t
  misc_feature (1610)..(1610): n is a, c, g, or t
  misc_feature (1619)..(1619): n is a, c, g, or t
caacagttccagttacaacagctccagttacaacagctccagttcaacagctccagttacaacagctccgctgatgaaagttagagctgcttcctccaggcagccctgggagtaggggcacagacttgtgcctcgcttcccagcagctgcccagtgcctctgtccacacccacctccctggtgtacttgccccctacagcagcagcccagatcctcccctggattaaaattgcaactggtgccctaacccaaaacttgagaaaaaattctctatcacatccactcttctggcatttgtagaatctctggccctgggtgtgtcttttcctgtagctgttacagatttcttaagcagatttcttaagcagatggacatgtccagattcatgcctaaatatccagttgataactggaaaatgctggttcacggttctttagtaaagattaataagggatccccatgtgctggggagtgtgcttccatttgagtggggatatcagaagaaaaagaggggcttgtgtagtaaaccttactttgccaattcagctgtagagcccaaattgttacaagatgcaaagatgtactccactttttgaccaagcatcagcacctttggcttaccatccagtccttacttctgtgactgtaagggccccaccagtgtcagcagacttgtttgtgctttgggggaactctcttctcagctccctttgccagtcccaagcctggtggatctgcatctcacgcccactgcacaccgttcctctccatctgcccttccctcccaggcccccggtcgggggagcaggtgtggcaagtgttaggaactcccttctggtgacagctggtcttcctagagtgttgctggtaactatcgcctcttggtcttctgacatcattgccaggaacggggcactttttcgtcttgtagtttggccctcgggtttcctcactaggtattgtgtaactccctcaaaaaaaggtttatgaaatgctgaacctcaggtttcatagacgtctttgtacactaaaaattctgcagcagaatatttttaaacattcgcagttttttgtaagctatatttttgtatatttaattgctattttaaaattttaatgcattttgctaatcactcctcaaaaataaaacatgcatgtaattgactcaaacgtgtaaataaaagcaaattttgacgcaagcaccttcagcaagacttggaaactcaaggtgagtaattctatcagagctggtaactagtactgagtgattgtgatggaagcccctgcccttcctgtggcatagtgtgcaagcgggggtggggtcagtggtgaagagtgtgtcaggccaccacagccagagaacagagaatcctggaatgcagagtacagtggagtctgaagccccctggcctccctgagctctgcaaacagctggatacagataagcagtcttccacgtgaacgccagcaccagggtgacctgaaatagcctcgtgccgaattcggcacgagcacacatcacaggcttaaactgtcttagagactttncaagtgattggatcacaggctanggatctgtgcatggtgccngttgaaacccaagtcttcncagtgctangtgagggagggctcaaccggggtaatgtgaatggggctgttgtcttttgcaatcccttaacatattaactttggacaaaccttgataggcttgcaccaaacctttctaaacatttttatggatcatctcct

SEQ ID NO: 313095 - DNA, 1697 bp, Homo sapiens
  misc_feature (1496)..(1496): n is a, c, g, or t
  misc_feature (1519)..(1519): n is a, c, g, or t
  misc_feature (1538)..(1538): n is a, c, g, or t
  misc_feature (1557)..(1557): n is a, c, g, or t
  misc_feature (1566)..(1566): n is a, c, g, or t
caacagttccagttacaacagctccagttacaacagctccagttcaacagctccagttacaacagctccgctgatgaaagttagagctgcttcctccaggcagccctgggagtaggggcacagacttgtgcctcgcttcccagcagctgcccagtgcctctgtccacacccacctccctggtgtacttgccccctacagcagcagcccagatcctcccctggattaaaattgcaactggtgccctaacccaaaacttgagaaaaaattctctatcacatccactcttctggcatttgtagaatctctggccctgggtgtgtcttttcctgtagctgttacagatttcttaagcagatttcttaagcagatggacatgtccagattcatgcctaaatatccagttgataactggaaaatgctggttcacggttctttagtaaagattaataagggatccccatgtgctggggagtgtgcttccatttgagtggggatatcagaagaaaaagaggggcttgtgtagtaaaccttactttgccaattcagctgtagagcccaaattgttacaagatgcaaagatgtactccactttttgaccaagcatcagcacctttggcttaccatccagtccttacttctgtgactgtaagggccccaccagtgtcagcagacttgtttgtgctttgggggaactctcttctcagctccctttgccagtcccaagcctggtggatctgcatctcacgcccactgcacaccgttcctctccatctgcccttccctcccaggcccccggtcgggggagcaggtgtggcaagtgttaggaactcccttctggtgacagctggtcttcctagagtgttgctgtcgtcttgtagtttggccctcgggtttcctcactaggtattgtgtaactccctcaaaaaaaggtttatgaaatgctgaacctcaggtttcatagacgtctttgtacactaaaaattctgcagcagaatatttttaaacattcgcagttttttgtaagctatatttttgtatatttaattgctattttaaaattttaatgcattttgctaatcactcctcaaaaataaaacatgcatgtaattgactcaaacgtgtaaataaaagcaaattttgacgcaagcaccttcagcaagacttggaaactcaaggtgagtaattctatcagagctggtaactagtactgagtgattgtgatggaagcccctgcccttcctgtggcatagtgtgcaagcgggggtggggtcagtggtgaagagtgtgtcaggccaccacagccagagaacagagaatcctggaatgcagagtacagtggagtctgaagccccctggcctccctgagctctgcaaacagctggatacagataagcagtcttccacgtgaacgccagcaccagggtgacctgaaatagcctcgtgccgaattcggcacgagcacacatcacaggcttaaactgtcttagagactttncaagtgattggatcacaggctanggatctgtgcatggtgccngttgaaacccaagtcttcncagtgctangtgagggagggctcaaccggggtaatgtgaatggggctgttgtcttttgcaatcccttaacatattaactttggacaaaccttgataggcttgcaccaaacctttctaaacatttttatggatcatctcct

SEQ ID NO: 313096 - DNA, 988 bp, Homo sapiens
ttggcccactgcaagctccgcctcccaggttcacgccattctcccgcctcgggagctgggacaacaggtgcccgccaccacgctcggctaattttttgtatttttagtacagacggagtttcaccgtgttagccaggatggtctcgatctcctgacctcgtgatgcacctgccttgacctcccaaagtgctgggattacaggcgtgagccactgcgcccggccaataatttttttagtttaagttcatttttgtccccgctgatgaaagttagagctgcttcctccaggcagccctgggagtaggggcacagacttgtgcctcgcttcccagcagctgcccagtgcctctgtccacacccacctccctggtgtacttgccccctacagcagcagcccagatcctcccctggattaaaattgcaactggtgccctaacccaaaacttgagaaaaaattctctatcacatccactcttctggcatttgtagaatctctggccctgggtgtgtcttttcctgtagctgttacagatttcttaagcagatttcttaagcagatggacatgtccagattcatgcctaaatatccagttgataactggaaaatgctggttcacggttctttagtaaagattaataagggatccccatgtgctggggagtgtgcttccatttgagtggggatatcagaagaaaaagaggggcttgtgtagtaaaccttactttgccaattcagctgtagagcccaaattgttacaagatgcaaagatgtactccactttttgaccaagcatcagcacctttggcttaccatccagtccttacttctgtgactgtaagggccccaccagtgtcagcagacttgtttgtgctttgggggaactctcttctcagctccctttgccagtcccaagcctggtggatctgcatctcacgcccactgcacaccgttcctctccatctgcccttccctcccaggcccccggtc

SEQ ID NO: 313097 - DNA, 592 bp, Homo sapiens
tttttttttttgccgaggcaggtgtgcaatggtgtggtctcggctaactgcagcctccgcctcctgggttcaagcaattctcctgcctcagcctcccaagtagctgggattacaggcacccaccaccacacccggctaatttttttgtatttttagtacagacggcgtttcaccgtgttggccaggctggtgttgaactcctgacctcaggtgatccgcctgccttggcctcccaaagtgctgggattacaggcatgagccaccacacctggcgcgagctcttgatttttgttttaacttttaaacgaaattaaactggacaagtgtaatcttttatgtgaaaagttgtttttgtgtaaaaaaaaaaaaaaaacaagtttctgaaactgagttttaatgattagtaacaacctacatgccaaatgaaatagtttttctaagattgtattaacttagagctctctgcattgttcaacccagatcactaaattgattggtgaaattccgtttctccttgatttctgttgacattgtatatccatgttttttcttcttcctctctacctttagtgattctattctgacactatct

SEQ ID NO: 313098 - DNA, 3835 bp, Homo sapiens
agcggagcccctctacctccggaagagacgagtgcggtaacaccgttcacagagctagccggacgtcctccgactcaagatatttgtcaaatattttcagaagatggctgatccttggcaggaatgcatggattatgcagtaactctagcaagacaagctggagaggtagtttgtgaagctataaaaaatgaaatgaatgttatgctgaaaagttctccagttgatttggtaactgctacggaccaaaaagttgaaaaaatgcttatctcttccataaaggaaaagtatccatctcacagtttcattggtgaagaatctgtggcagctggggaaaaaagtatcttaaccgacaaccccacatggatcattgaccctattgatggaacaactaactttgtacatagatttccttttgtagctgtttcaattggctttgctgtaaataaaaagatagaatttggagttgtgtacagttgtgtggaaggcaagatgtacactgccagaaaaggaaaaggtgccttttgtaatggtcaaaaactacaagtttcacaacaagaagatattaccaaatctctcttggtgactgagttgggctcttccagaacaccagagactgtgagaatggttctttctaatatggaaaagcttttttgcattcctgttcatgggatccggagtgttggaacagcagctgttaatatgtgccttgtggcaactggcggagcagatgcatattatgaaatgggaattcactgctgggatgttgcaggagctggcattattgttactgaagctggtggcgtgctaatggatgttacaggtggaccatttgatttgatgtcacgaagagtaattgctgcaaataatagaatattagcagaaaggatagctaaagaaattcaggttatacctttgcaacgagacgacgaagattaattaaggcagcctcatagtcaatcccagttgcttttccccagatttggtgactcatcaatggatatgtgttttggatgtatgatatgcttggtttaaattctctttgtccaggtcaaaaatttggaacttgtttcttattttactatgtctaggtttgcaagaattgacataatgtttgtttcactgatttaaaaaattttgcatgtaagaatgtactttaggaaacatacccaggaagtacagttgataaatataacatcaactgaaatagtcaattagcaattttgtgtttctaaatatctatggtcccctgaaattttgacttagtatataggtgcagagacacccacttagaaagttaactgtttggaaaaacatttctctttagtttcaaaaaccatatataattaaatttgtaaggatatactgagtaccctaggccaacttttttttctttgcagagaaccttttttgttttattcttcagtgttcatatagcacctggcccattacatatctaggcaactaaaaacaaacattgtaagaatgaatatttttaatgtagtaattcctagttacaatagatacataaagtaatgaactcagcattctgtacttttgcttcaggtttgaagtaaaaattatctagttaaattttttttatttcacgttaccatgccatttcacattaccataccatcagatagcatggcttattgtgggcatttctgcagtgaatacattttccaaaacagttaaattgtctgtttggatttgctttaaagtcttgtgtaagagagaagaaactatttctataataaaaagcactctcatcagatatctgacataattagatacaatataacattttactaagttcagtattcatgttttaaaggtgtttatactgatttgattgtgctggcaaatatactgtattgttaatattgaactgtttatttttctcttagtcttcttatttaattaacttcattgccgctggattctgttcagcctttaaaaatatttcttagtggtcattgctctgcagaactcaaaaagaaaattgtacttgttcatagacatttttaaagggttaatttattgttcagccttatcccttggcacgtaaacagactactagacttattgtaggttcgtttgagctttgtgttgtaaaattaaaaatgcttctgtaaagttttcaaggtagggagtgattttattattgtgtatatctaatatattaagtatgtgtgatactaaggtttgactgctataattatttgtactgttgatcacatgtacttaaaacatctgatactgtattctaagacaggttgtttttgcaattaaatttattttaataagacgatcatgaataaaactttaaattgatatttttattattattaccattatcattattattatttttagattcagggtctcgctctgttgcccagggtctgtctctgactgtgctgtggtgcagtcatagctcactgtatccttaaattcctgggctcaagtgatcctcctctttcagtctcctgagtagctgggactataagttcatgccaccatgccctactaatgttttaattttatttttgtaaagatgggatcttcctatgttttccaggccccttggcctcccaaagtgctgggattacagatgtgagccaccgagccaggccatgatatttacattattaaagttaatagttcaaactacttttagaggctttgttttgtttttgttttttgaagacagtgtcttgctcttctgctcaaacagtaatgcagtggcatgatcaccattcattgcagtctcaaccttctgggctcaagcagtcctcccacctcagcctccctagtaactggaaccacaggcacatgccaccatgcctggctaattttttagtttttgtagagacagaatcttcctatgttgcttaggctggtctcattgggctcaagtgatcctcctgcctcagccttctaaagtgctgggattacagatgtgagccattgcacccaacatacttttagaggtttttgtgttgagttacaaatatttgaaacttgcaaatgtaatttaatatatgttcttattttttgcctgtaatctttccaacttttctaaaaacctatatttttttctacaatagcttttccatctgtttattctaaatgcagttgcatattttgtgtctgaaatttctttagatgctgaaaaaggatgatcgacaagtgaattatctaataatatttgaaaatatttctttgagtaacaggacttcttagacttaacatgtatattttgtatcagggtatattatctttctgcatgtggatacatacacagatacatacataaatatacataaatatatgtacttgaacacataaaatatatgtacttgccttttaacgaaattgtgttcattctatcctatacttacttgtgaagcattatttggctttgttatgaattaccagccattcttagaattggtttacaatgctaagtcagaagttttcctgggatatgtattattctgactaatttgtccttaattttaagatctagtgtagagcctaaaataccatgtttgaagaaaacaaaaataattattttaaactgtttccttttacctcagttccctatgtttaccctgcctcatttagaaaaaatacgtactttttattactgtctatttagtcacacacatagtttaaaatttcaaatactgctacacagttcagaatgaaaaccagcattttcctgttccattctatcccaccctagtttatctcctcaaactcttttagcagttgttgctggtatttacctccatctttgaaaaggatagatatgttctactaaatctt

SEQ ID NO: 313099 - DNA, 3707 bp, Homo sapiens
agcggagcccctctacctccggaagagacgagtgcggtaacaccgttcacagagctagccggacgtcctccgactcaagatatttgtcaaatattttcagaagatggctgatccttggcaggaatgcatggattatgcagtaactctagcaagacaagctggagaggtagtttgtgaagctataaaaaatgaaatgaatgttatgctgaaaagttctccagttgatttggtaactgctacggaccaaaaagttgaaaaaatgcttatctcttccataaaggaaaagtatccatctcacagtttcattggtgaagaatctgtggcagctggggaaaaaagtatcttaaccgacaaccccacatggatcattgaccctattgatggaacaactaactttgtacatagatttccttttgtagctgtttcaattggctttgctgtaaataaaaagatagaatttggagttgtgtacagttgtgtggaaggcaagatgtacactgccagaaaaggaaaaggtgccttttgtaatggtcaaaaactacaagtttcacaacaagaagatattaccaaatctctcttggtgactgagttgggctcttccagaacaccagagactgtgagaatggttctttctaatatggaaaagcttttttgcattcctgttcatgggatccggagtgttggaacagcagctgttaatatgtgccttgtggcaactggcggagcagatgcatattatgaaatgggaattcactgctgggatgttgcaggagctggcattattgttactgaagctggtggcgtgctaatggatgttacaggtggaccatttgatttgatgtcacgaagagtaattgctgcaaataatagaatattagcagaaaggatagctaaagaaattcaggttatacctttgcaacgagacgacgaagattaattaaggcagcctcatagtcaatcccagttgcttttccccagatttggtgactcatcaatggatatgtgttttggatgtatgatatgcttggtttaaattctctttgtccaggtcaaaaatttggaacttgtttcttattttactatgtctaggtttgcaagaattgacataatgtttgtttcactgatttaaaaaattttgcatgtaagaatgtactttaggaaacatacccaggaagtacagttgataaatataacatcaactgaaatagtcaattagcaattttgtgtttctaaatatctatggtcccctgaaattttgacttagtatataggtgcagagacacccacttagaaagttaactgtttggaaaaacatttctctttagtttcaaaaaccatatataattaaatttgtaaggatatactgagtaccctaggccaacttttttttctttgcagagaaccttttttgttttattcttcagtgttcatatagcacctggcccattacatatctaggcaactaaaaacaaacattgtaagaatgaatatttttaatgtagtaattcctagttacaatagatacataaagtaatgaactcagcattctgtacttttgcttcaggtttgaagtaaaaattatctagttaaattttttttatttcacgttaccatgccatttcacattaccataccatcagatagcatggcttattgtgggcatttctgcagtgaatacattttccaaaacagttaaattgtctgtttggatttgctttaaagtcttgtgtaagagagaagaaactatttctataataaaaagcactctcatcagatatctgacataattagatacaatataacattttactaagttcagtattcatgttttaaaggtgtttatactgatttgattgtgctggcaaatatactgtattgttaatattgaactgtttatttttctcttagtcttcttatttaattaacttcattgccgctggattctgttcagcctttaaaaatatttcttagtggtcattgctctgcagaactcaaaaagaaaattgtacttgttcatagacatttttaaagggttaatttattgttcagccttatcccttggcacgtaaacagactactagacttattgtaggttcgtttgagctttgtgttgtaaaattaaaaatgcttctgtaaagttttcaaggtagggagtgattttattattgtgtatatctaatatattaagtatgtgtgatactaaggtttgactgctataattatttgtactgttgatcacatgtacttaaaacatctgatactgtattctaagacaggttgtttttgcaattaaatttattttaataagacgatcatgaacttatagtcccagctactcaggagactgaaagaggaggatctcctgagtagctgggactataagttcatgccaccatgccctactaatgttttaattttatttttgtaaagatgggatcttcctatgttttccaggccccttggcctcccaaagtgctgggattacagatgtgagccaccgagccaggccatgatatttacattattaaagttaatagttcaaactacttttagaggctttgttttgtttttgttttttgaagacagtgtcttgctcttctgctcaaacagtaatgcagtggcatgatcaccattcattgcagtctcaaccttctgggctcaagcagtcctcccacctcagcctccctagtaactggaaccacaggcacatgccaccatgcctggctaattttttagtttttgtagagacagaatcttcctatgttgcttaggctggtctcattgggctcaagtgatcctcctgcctcagccttctaaagtgctgggattacagatgtgagccattgcacccaacatacttttagaggtttttgtgttgagttacaaatatttgaaacttgcaaatgtaatttaatatatgttcttattttttgcctgtaatctttccaacttttctaaaaacctatatttttttctacaatagcttttccatctgtttattctaaatgcagttgcatattttgtgtctgaaatttctttagatgctgaaaaaggatgatcgacaagtgaattatctaataatatttgaaaatatttctttgagtaacaggacttcttagacttaacatgtatattttgtatcagggtatattatctttctgcatgtggatacatacacagatacatacataaatatacataaatatatgtacttgaacacataaaatatatgtacttgccttttaacgaaattgtgttcattctatcctatacttacttgtgaagcattatttggctttgttatgaattaccagccattcttagaattggtttacaatgctaagtcagaagttttcctgggatatgtattattctgactaatttgtccttaattttaagatctagtgtagagcctaaaataccatgtttgaagaaaacaaaaataattattttaaactgtttccttttacctcagttccctatgtttaccctgcctcatttagaaaaaatacgtactttttattactgtctatttagtcacacacatagtttaaaatttcaaatactgctacacagttcagaatgaaaaccagcattttcctgttccattctatcccaccctagtttatctcctcaaactcttttagcagttgttgctggtatttacctccatctttgaaaaggatagatatgttctactaaatctt

SEQ ID NO: 313100 - DNA, 3991 bp, Homo sapiens
aattgcccctttttatgtccccaactccgaaaagctcctagaaacttggtgcatccccaggcccaggtagtcactctaagtgatggggcagcgcccaggtcctgtgctgcccgcagtcgcggtgctgggacaggtggcaaaaaggaaggtggcctggctcctacgctggaaggctgtgaccaggacagaaacagcaggaaacagttcaggtgtttatggctttgggaaaatgaaaatatttgtcaaatattttcagaagatggctgatccttggcaggaatgcatggattatgcagtaactctagcaagacaagctggagaggtagtttgtgaagctataaaaaatgaaatgaatgttatgctgaaaagttctccagttgatttggtaactgctacggaccaaaaagttgaaaaaatgcttatctcttccataaaggaaaagtatccatctcacagtttcattggtgaagaatctgtggcagctggggaaaaaagtatcttaaccgacaaccccacatggatcattgaccctattgatggaacaactaactttgtacatagatttccttttgtagctgtttcaattggctttgctgtaaataaaaagatagaatttggagttgtgtacagttgtgtggaaggcaagatgtacactgccagaaaaggaaaaggtgccttttgtaatggtcaaaaactacaagtttcacaacaagaagatattaccaaatctctcttggtgactgagttgggctcttccagaacaccagagactgtgagaatggttctttctaatatggaaaagcttttttgcattcctgttcatgggatccggagtgttggaacagcagctgttaatatgtgccttgtggcaactggcggagcagatgcatattatgaaatgggaattcactgctgggatgttgcaggagctggcattattgttactgaagctggtggcgtgctaatggatgttacaggtggaccatttgatttgatgtcacgaagagtaattgctgcaaataatagaatattagcagaaaggatagctaaagaaattcaggttatacctttgcaacgagacgacgaagattaattaaggcagcctcatagtcaatcccagttgcttttccccagatttggtgactcatcaatggatatgtgttttggatgtatgatatgcttggtttaaattctctttgtccaggtcaaaaatttggaacttgtttcttattttactatgtctaggtttgcaagaattgacataatgtttgtttcactgatttaaaaaattttgcatgtaagaatgtactttaggaaacatacccaggaagtacagttgataaatataacatcaactgaaatagtcaattagcaattttgtgtttctaaatatctatggtcccctgaaattttgacttagtatataggtgcagagacacccacttagaaagttaactgtttggaaaaacatttctctttagtttcaaaaaccatatataattaaatttgtaaggatatactgagtaccctaggccaacttttttttctttgcagagaaccttttttgttttattcttcagtgttcatatagcacctggcccattacatatctaggcaactaaaaacaaacattgtaagaatgaatatttttaatgtagtaattcctagttacaatagatacataaagtaatgaactcagcattctgtacttttgcttcaggtttgaagtaaaaattatctagttaaattttttttatttcacgttaccatgccatttcacattaccataccatcagatagcatggcttattgtgggcatttctgcagtgaatacattttccaaaacagttaaattgtctgtttggatttgctttaaagtcttgtgtaagagagaagaaactatttctataataaaaagcactctcatcagatatctgacataattagatacaatataacattttactaagttcagtattcatgttttaaaggtgtttatactgatttgattgtgctggcaaatatactgtattgttaatattgaactgtttatttttctcttagtcttcttatttaattaacttcattgccgctggattctgttcagcctttaaaaatatttcttagtggtcattgctctgcagaactcaaaaagaaaattgtacttgttcatagacatttttaaagggttaatttattgttcagccttatcccttggcacgtaaacagactactagacttattgtaggttcgtttgagctttgtgttgtaaaattaaaaatgcttctgtaaagttttcaaggtagggagtgattttattattgtgtatatctaatatattaagtatgtgtgatactaaggtttgactgctataattatttgtactgttgatcacatgtacttaaaacatctgatactgtattctaagacaggttgtttttgcaattaaatttattttaataagacgatcatgaataaaactttaaattgatatttttattattattaccattatcattattattatttttagattcagggtctcgctctgttgcccagggtctgtctctgactgtgctgtggtgcagtcatagctcactgtatccttaaattcctgggctcaagtgatcctcctctttcagtctcctgagtagctgggactataagttcatgccaccatgccctactaatgttttaattttatttttgtaaagatgggatcttcctatgttttccaggccccttggcctcccaaagtgctgggattacagatgtgagccaccgagccaggccatgatatttacattattaaagttaatagttcaaactacttttagaggctttgttttgtttttgttttttgaagacagtgtcttgctcttctgctcaaacagtaatgcagtggcatgatcaccattcattgcagtctcaaccttctgggctcaagcagtcctcccacctcagcctccctagtaactggaaccacaggcacatgccaccatgcctggctaattttttagtttttgtagagacagaatcttcctatgttgcttaggctggtctcattgggctcaagtgatcctcctgcctcagccttctaaagtgctgggattacagatgtgagccattgcacccaacatacttttagaggtttttgtgttgagttacaaatatttgaaacttgcaaatgtaatttaatatatgttcttattttttgcctgtaatctttccaacttttctaaaaacctatatttttttctacaatagcttttccatctgtttattctaaatgcagttgcatattttgtgtctgaaatttctttagatgctgaaaaaggatgatcgacaagtgaattatctaataatatttgaaaatatttctttgagtaacaggacttcttagacttaacatgtatattttgtatcagggtatattatctttctgcatgtggatacatacacagatacatacataaatatacataaatatatgtacttgaacacataaaatatatgtacttgccttttaacgaaattgtgttcattctatcctatacttacttgtgaagcattatttggctttgttatgaattaccagccattcttagaattggtttacaatgctaagtcagaagttttcctgggatatgtattattctgactaatttgtccttaattttaagatctagtgtagagcctaaaataccatgtttgaagaaaacaaaaataattattttaaactgtttccttttacctcagttccctatgtttaccctgcctcatttagaaaaaatacgtactttttattactgtctatttagtcacacacatagtttaaaatttcaaatactgctacacagttcagaatgaaaaccagcattttcctgttccattctatcccaccctagtttatctcctcaaactcttttagcagttgttgctggtatttacctccatctttgaaaaggatagatatgttctactaaatctt

SEQ ID NO: 313101 - DNA, 3789 bp, Homo sapiens
agcggagcccctctacctccggaagagacgagtgcggtaacaccgttcacagagctagccggacgtcctccgactcaagatatttgtcaaatattttcagaagatggctgatccttggcaggaatgcatggattatgcagtaactctagcaagacaagctggagaggtagtttgtgaagctataaaaaatgaaatgaatgttatgctgaaaagttctccagttgatttggtaactgctacggaccaaaaagttgaaaaaatgcttatctcttccataaaggaaaagtatccatctcacagtttcattggtgaagaatctgtggcagctggggaaaaaagtatcttaaccgacaaccccacatggatcattgaccctattgatggaacaactaactttgtacatagatagaatttggagttgtgtacagttgtgtggaaggcaagatgtacactgccagaaaaggaaaaggtgccttttgtaatggtcaaaaactacaagtttcacaacaagaagatattaccaaatctctcttggtgactgagttgggctcttccagaacaccagagactgtgagaatggttctttctaatatggaaaagcttttttgcattcctgttcatgggatccggagtgttggaacagcagctgttaatatgtgccttgtggcaactggcggagcagatgcatattatgaaatgggaattcactgctgggatgttgcaggagctggcattattgttactgaagctggtggcgtgctaatggatgttacaggtggaccatttgatttgatgtcacgaagagtaattgctgcaaataatagaatattagcagaaaggatagctaaagaaattcaggttatacctttgcaacgagacgacgaagattaattaaggcagcctcatagtcaatcccagttgcttttccccagatttggtgactcatcaatggatatgtgttttggatgtatgatatgcttggtttaaattctctttgtccaggtcaaaaatttggaacttgtttcttattttactatgtctaggtttgcaagaattgacataatgtttgtttcactgatttaaaaaattttgcatgtaagaatgtactttaggaaacatacccaggaagtacagttgataaatataacatcaactgaaatagtcaattagcaattttgtgtttctaaatatctatggtcccctgaaattttgacttagtatataggtgcagagacacccacttagaaagttaactgtttggaaaaacatttctctttagtttcaaaaaccatatataattaaatttgtaaggatatactgagtaccctaggccaacttttttttctttgcagagaaccttttttgttttattcttcagtgttcatatagcacctggcccattacatatctaggcaactaaaaacaaacattgtaagaatgaatatttttaatgtagtaattcctagttacaatagatacataaagtaatgaactcagcattctgtacttttgcttcaggtttgaagtaaaaattatctagttaaattttttttatttcacgttaccatgccatttcacattaccataccatcagatagcatggcttattgtgggcatttctgcagtgaatacattttccaaaacagttaaattgtctgtttggatttgctttaaagtcttgtgtaagagagaagaaactatttctataataaaaagcactctcatcagatatctgacataattagatacaatataacattttactaagttcagtattcatgttttaaaggtgtttatactgatttgattgtgctggcaaatatactgtattgttaatattgaactgtttatttttctcttagtcttcttatttaattaacttcattgccgctggattctgttcagcctttaaaaatatttcttagtggtcattgctctgcagaactcaaaaagaaaattgtacttgttcatagacatttttaaagggttaatttattgttcagccttatcccttggcacgtaaacagactactagacttattgtaggttcgtttgagctttgtgttgtaaaattaaaaatgcttctgtaaagttttcaaggtagggagtgattttattattgtgtatatctaatatattaagtatgtgtgatactaaggtttgactgctataattatttgtactgttgatcacatgtacttaaaacatctgatactgtattctaagacaggttgtttttgcaattaaatttattttaataagacgatcatgaataaaactttaaattgatatttttattattattaccattatcattattattatttttagattcagggtctcgctctgttgcccagggtctgtctctgactgtgctgtggtgcagtcatagctcactgtatccttaaattcctgggctcaagtgatcctcctctttcagtctcctgagtagctgggactataagttcatgccaccatgccctactaatgttttaattttatttttgtaaagatgggatcttcctatgttttccaggccccttggcctcccaaagtgctgggattacagatgtgagccaccgagccaggccatgatatttacattattaaagttaatagttcaaactacttttagaggctttgttttgtttttgttttttgaagacagtgtcttgctcttctgctcaaacagtaatgcagtggcatgatcaccattcattgcagtctcaaccttctgggctcaagcagtcctcccacctcagcctccctagtaactggaaccacaggcacatgccaccatgcctggctaattttttagtttttgtagagacagaatcttcctatgttgcttaggctggtctcattgggctcaagtgatcctcctgcctcagccttctaaagtgctgggattacagatgtgagccattgcacccaacatacttttagaggtttttgtgttgagttacaaatatttgaaacttgcaaatgtaatttaatatatgttcttattttttgcctgtaatctttccaacttttctaaaaacctatatttttttctacaatagcttttccatctgtttattctaaatgcagttgcatattttgtgtctgaaatttctttagatgctgaaaaaggatgatcgacaagtgaattatctaataatatttgaaaatatttctttgagtaacaggacttcttagacttaacatgtatattttgtatcagggtatattatctttctgcatgtggatacatacacagatacatacataaatatacataaatatatgtacttgaacacataaaatatatgtacttgccttttaacgaaattgtgttcattctatcctatacttacttgtgaagcattatttggctttgttatgaattaccagccattcttagaattggtttacaatgctaagtcagaagttttcctgggatatgtattattctgactaatttgtccttaattttaagatctagtgtagagcctaaaataccatgtttgaagaaaacaaaaataattattttaaactgtttccttttacctcagttccctatgtttaccctgcctcatttagaaaaaatacgtactttttattactgtctatttagtcacacacatagtttaaaatttcaaatactgctacacagttcagaatgaaaaccagcattttcctgttccattctatcccaccctagtttatctcctcaaactcttttagcagttgttgctggtatttacctccatctttgaaaaggatagatatgttctactaaatctt

SEQ ID NO: 313102 - DNA, 3730 bp, Homo sapiens
agcggagcccctctacctccggaagagacgagtgcggtaacaccgttcacagagctagccggacgtcctccgactcaagatatttgtcaaatattttcagaagatggctgatccttggcaggaatgcatggattatgcagtaactctagcaagacaagctggagaggtagtttgtgaagctataaaaaatgaaatgaatgttatgctgaaaagttctccagttgatttggtaactgctacggaccaaaaagttgaaaaaatgcttatctcttccataaaggaaaagtatccatctcacagatttccttttgtagctgtttcaattggctttgctgtaaataaaaagatagaatttggagttgtgtacagttgtgtggaaggcaagatgtacactgccagaaaaggaaaaggtgccttttgtaatggtcaaaaactacaagtttcacaacaagaagatattaccaaatctctcttggtgactgagttgggctcttccagaacaccagagactgtgagaatggttctttctaatatggaaaagcttttttgcattcctgttcatgggatccggagtgttggaacagcagctgttaatatgtgccttgtggcaactggcggagcagatgcatattatgaaatgggaattcactgctgggatgttgcaggagctggcattattgttactgaagctggtggcgtgctaatggatgttacaggtggaccatttgatttgatgtcacgaagagtaattgctgcaaataatagaatattagcagaaaggatagctaaagaaattcaggttatacctttgcaacgagacgacgaagattaattaaggcagcctcatagtcaatcccagttgcttttccccagatttggtgactcatcaatggatatgtgttttggatgtatgatatgcttggtttaaattctctttgtccaggtcaaaaatttggaacttgtttcttattttactatgtctaggtttgcaagaattgacataatgtttgtttcactgatttaaaaaattttgcatgtaagaatgtactttaggaaacatacccaggaagtacagttgataaatataacatcaactgaaatagtcaattagcaattttgtgtttctaaatatctatggtcccctgaaattttgacttagtatataggtgcagagacacccacttagaaagttaactgtttggaaaaacatttctctttagtttcaaaaaccatatataattaaatttgtaaggatatactgagtaccctaggccaacttttttttctttgcagagaaccttttttgttttattcttcagtgttcatatagcacctggcccattacatatctaggcaactaaaaacaaacattgtaagaatgaatatttttaatgtagtaattcctagttacaatagatacataaagtaatgaactcagcattctgtacttttgcttcaggtttgaagtaaaaattatctagttaaattttttttatttcacgttaccatgccatttcacattaccataccatcagatagcatggcttattgtgggcatttctgcagtgaatacattttccaaaacagttaaattgtctgtttggatttgctttaaagtcttgtgtaagagagaagaaactatttctataataaaaagcactctcatcagatatctgacataattagatacaatataacattttactaagttcagtattcatgttttaaaggtgtttatactgatttgattgtgctggcaaatatactgtattgttaatattgaactgtttatttttctcttagtcttcttatttaattaacttcattgccgctggattctgttcagcctttaaaaatatttcttagtggtcattgctctgcagaactcaaaaagaaaattgtacttgttcatagacatttttaaagggttaatttattgttcagccttatcccttggcacgtaaacagactactagacttattgtaggttcgtttgagctttgtgttgtaaaattaaaaatgcttctgtaaagttttcaaggtagggagtgattttattattgtgtatatctaatatattaagtatgtgtgatactaaggtttgactgctataattatttgtactgttgatcacatgtacttaaaacatctgatactgtattctaagacaggttgtttttgcaattaaatttattttaataagacgatcatgaataaaactttaaattgatatttttattattattaccattatcattattattatttttagattcagggtctcgctctgttgcccagggtctgtctctgactgtgctgtggtgcagtcatagctcactgtatccttaaattcctgggctcaagtgatcctcctctttcagtctcctgagtagctgggactataagttcatgccaccatgccctactaatgttttaattttatttttgtaaagatgggatcttcctatgttttccaggccccttggcctcccaaagtgctgggattacagatgtgagccaccgagccaggccatgatatttacattattaaagttaatagttcaaactacttttagaggctttgttttgtttttgttttttgaagacagtgtcttgctcttctgctcaaacagtaatgcagtggcatgatcaccattcattgcagtctcaaccttctgggctcaagcagtcctcccacctcagcctccctagtaactggaaccacaggcacatgccaccatgcctggctaattttttagtttttgtagagacagaatcttcctatgttgcttaggctggtctcattgggctcaagtgatcctcctgcctcagccttctaaagtgctgggattacagatgtgagccattgcacccaacatacttttagaggtttttgtgttgagttacaaatatttgaaacttgcaaatgtaatttaatatatgttcttattttttgcctgtaatctttccaacttttctaaaaacctatatttttttctacaatagcttttccatctgtttattctaaatgcagttgcatattttgtgtctgaaatttctttagatgctgaaaaaggatgatcgacaagtgaattatctaataatatttgaaaatatttctttgagtaacaggacttcttagacttaacatgtatattttgtatcagggtatattatctttctgcatgtggatacatacacagatacatacataaatatacataaatatatgtacttgaacacataaaatatatgtacttgccttttaacgaaattgtgttcattctatcctatacttacttgtgaagcattatttggctttgttatgaattaccagccattcttagaattggtttacaatgctaagtcagaagttttcctgggatatgtattattctgactaatttgtccttaattttaagatctagtgtagagcctaaaataccatgtttgaagaaaacaaaaataattattttaaactgtttccttttacctcagttccctatgtttaccctgcctcatttagaaaaaatacgtactttttattactgtctatttagtcacacacatagtttaaaatttcaaatactgctacacagttcagaatgaaaaccagcattttcctgttccattctatcccaccctagtttatctcctcaaactcttttagcagttgttgctggtatttacctccatctttgaaaaggatagatatgttctactaaatctt

SEQ ID NO: 313103 - DNA, 3140 bp, Homo sapiens
agcggagcccctctacctccggaagagacgagtgcggtaacaccgttcacagagctagccggacgtcctccgactcaagatatttgtcaaatattttcagaagatggctgatccttggcaggaatgcatggattatgcagtaactctagcaagacaagctggagaggtagtttgtgaagctataaaaaatgaaatgaatgttatctggggaaaaaagtatcttaaccgacaaccccacatggatcattgaccctattgatggaacaactaactttgtacatagatttggtgactcatcaatggatatgtgttttggatgtatgatatgcttggtttaaattctctttgtccaggtcaaaaatttggaacttgtttcttattttactatgtctaggtttgcaagaattgacataatgtttgtttcactgatttaaaaaattttgcatgtaagaatgtactttaggaaacatacccaggaagtacagttgataaatataacatcaactgaaatagtcaattagcaattttgtgtttctaaatatctatggtcccctgaaattttgacttagtatataggtgcagagacacccacttagaaagttaactgtttggaaaaacatttctctttagtttcaaaaaccatatataattaaatttgtaaggatatactgagtaccctaggccaacttttttttctttgcagagaaccttttttgttttattcttcagtgttcatatagcacctggcccattacatatctaggcaactaaaaacaaacattgtaagaatgaatatttttaatgtagtaattcctagttacaatagatacataaagtaatgaactcagcattctgtacttttgcttcaggtttgaagtaaaaattatctagttaaattttttttatttcacgttaccatgccatttcacattaccataccatcagatagcatggcttattgtgggcatttctgcagtgaatacattttccaaaacagttaaattgtctgtttggatttgctttaaagtcttgtgtaagagagaagaaactatttctataataaaaagcactctcatcagatatctgacataattagatacaatataacattttactaagttcagtattcatgttttaaaggtgtttatactgatttgattgtgctggcaaatatactgtattgttaatattgaactgtttatttttctcttagtcttcttatttaattaacttcattgccgctggattctgttcagcctttaaaaatatttcttagtggtcattgctctgcagaactcaaaaagaaaattgtacttgttcatagacatttttaaagggttaatttattgttcagccttatcccttggcacgtaaacagactactagacttattgtaggttcgtttgagctttgtgttgtaaaattaaaaatgcttctgtaaagttttcaaggtagggagtgattttattattgtgtatatctaatatattaagtatgtgtgatactaaggtttgactgctataattatttgtactgttgatcacatgtacttaaaacatctgatactgtattctaagacaggttgtttttgcaattaaatttattttaataagacgatcatgaataaaactttaaattgatatttttattattattaccattatcattattattatttttagattcagggtctcgctctgttgcccagggtctgtctctgactgtgctgtggtgcagtcatagctcactgtatccttaaattcctgggctcaagtgatcctcctctttcagtctcctgagtagctgggactataagttcatgccaccatgccctactaatgttttaattttatttttgtaaagatgggatcttcctatgttttccaggccccttggcctcccaaagtgctgggattacagatgtgagccaccgagccaggccatgatatttacattattaaagttaatagttcaaactacttttagaggctttgttttgtttttgttttttgaagacagtgtcttgctcttctgctcaaacagtaatgcagtggcatgatcaccattcattgcagtctcaaccttctgggctcaagcagtcctcccacctcagcctccctagtaactggaaccacaggcacatgccaccatgcctggctaattttttagtttttgtagagacagaatcttcctatgttgcttaggctggtctcattgggctcaagtgatcctcctgcctcagccttctaaagtgctgggattacagatgtgagccattgcacccaacatacttttagaggtttttgtgttgagttacaaatatttgaaacttgcaaatgtaatttaatatatgttcttattttttgcctgtaatctttccaacttttctaaaaacctatatttttttctacaatagcttttccatctgtttattctaaatgcagttgcatattttgtgtctgaaatttctttagatgctgaaaaaggatgatcgacaagtgaattatctaataatatttgaaaatatttctttgagtaacaggacttcttagacttaacatgtatattttgtatcagggtatattatctttctgcatgtggatacatacacagatacatacataaatatacataaatatatgtacttgaacacataaaatatatgtacttgccttttaacgaaattgtgttcattctatcctatacttacttgtgaagcattatttggctttgttatgaattaccagccattcttagaattggtttacaatgctaagtcagaagttttcctgggatatgtattattctgactaatttgtccttaattttaagatctagtgtagagcctaaaataccatgtttgaagaaaacaaaaataattattttaaactgtttccttttacctcagttccctatgtttaccctgcctcatttagaaaaaatacgtactttttattactgtctatttagtcacacacatagtttaaaatttcaaatactgctacacagttcagaatgaaaaccagcattttcctgttccattctatcccaccctagtttatctcctcaaactcttttagcagttgttgctggtatttacctccatctttgaaaaggatagatatgttctactaaatctt

SEQ ID NO: 313104 - DNA, 299 bp, Homo sapiens
gtatttttatttactgtgtacaagaaatgtttattatctcaccatttcttggggttctgcatatgagagtagcttgactacacggttcttgccaaggtcttccatgaagttacagtcaaagtgttggtcaaggctgcagtcaactgaaggttggactggaactgaaggatccattcactcacgtgattgttggcagatgtcagttcctgggggagttgtctgctggtagcttctctcagttccttaccatgtagcctcttcacagagtagctcacgacatggaagctgacatctcctag

SEQ ID NO: 313105 - DNA, 2578 bp, Homo sapiens
agcggagcccctctacctccggaagagacgagtgcggtaacaccgttcacagagctagccggacgtcctccgactcaagatatttgtcaaatattttcagaagatggctgatccttggcaggaatgcatggattatgcagtaactctagcaagacaagctggagaggtagtttgtgaagctataaaaaatgaaatgaatgttatgctgaaaagttctccagttgatttggtaactgctacggaccaaaaagttgaaaaaatgcttatctcttccataaaggaaaagtatccatctcacagtttcattggtgaagaatctgtggcagctggggaaaaaagtatcttaaccgacaaccccacatggatcattgaccctattgatggaacaactaactttgtacatagatttccttttgtagctgtttcaattggctttgctgtaaataaaaagatagaatttggagttgtgtacagttgtgtggaaggcaagatgtacactgccagaaaaggaaaaggtgccttttgtaatggtcaaaaactacaagtttcacaacaagaagatattaccaaatctctcttggtgactgagttgggctcttccagaacaccagagactgtgagaatggttctttctaatatggaaaagcttttttgcattcctgttcatgggatccggagtgttggaacagcagctgttaatatgtgccttgtggcaactggcggagcagatgcatattatgaaatgggaattcactgctgggatgttgcaggagctggcattattgttactgaagctggtggcgtgctaatggatgttacaggtggaccatttgatttgatgtcacgaagagtaattgctgcaaataatagaatattagcagaaaggatagctaaagaaattcaggttatacctttgcaacgagacgacgaagattaattaaggcagcctcatagtcaatcccagttgcttttccccagatttggtgactcatcaatggatatgtgttttggatgtatgatatgcttggtttaaattctctttgtccaggtcaaaaatttggaacttgtttcttattttactatgtctaggtttgcaagaattgacataatgtttgtttcactgatttaaaaaattttgcatgtaagaatgtactttaggaaacatacccaggaagtacagttgataaatataacatcaactgaaatagtcaattagcaattttgtgtttctaaatatctatggtcccctgaaattttgacttagtatataggtgcagagacacccacttagaaagttaactgtttggaaaaacatttctctttagtttcaaaaaccatatataattaaatttgtaaggatatactgagtaccctaggccaacttttttttctttgcagagaaccttttttgttttattcttcagtgttcatatagcacctggcccattacatatctaggcaactaaaaacaaacattgtaagaatgaatatttttaatgtagtaattcctagttacaatagatacataaagtaatgaactcagcattctgtacttttgcttcaggtttgaagtaaaaattatctagttaaattttttttatttcacgttaccatgccatttcacattaccataccatcagatagcatggcttattgtgggcatttctgcagtgaatacattttccaaaacagttaaattgtctgtttggatttgctttaaagtcttgtgtaagagagaagaaactatttctataataaaaagcactctcatcagatatctgacataattagatacaatataacattttactaagttcagtattcatgttttaaaggtgtttatactgatttgattgtgctggcaaatatactgtattgttaatattgaactgtttatttttctcttagtcttcttatttaattaacttcattgccgctggattctgttcagcctttaaaaatatttcttagtggtcattgctctgcagaactcaaaaagaaaattgtacttgttcatagacatttttaaagggttaatttattgttcagccttatcccttggcacgtaaacagactactagacttattgtaggttcgtttgagctttgtgttgtaaaattaaaaatgcttctgtaaagttttcaaggtagggagtgattttattattgtgtatatctaatatattaagtatgtgtgatactaaggtttgactgctataattatttgtactgttgatcacatgtacttaaaacatctgatactgtattctaagacaggttgtttttgcaattaaatttattttaataagacgatcatgaataaaactttaaattgatatttttattattattaccattatcattattattatttttagattcagggtctcgctctgttgcccagggtctgtctctgactgtgctgtggtgcagtcatagctcactgtatccttaaattcctgggctcaagtgatcctcctctttcagtctcctgagtagctgggactataagaggaggatagcttgagcccaggagttcgagacctgcctgggcaatatagcgagaccccgttctccag

SEQ ID NO: 313106 - DNA, 3782 bp, Homo sapiens
agcggagcccctctacctccggaagagacgagtgcggtaacaccgttcacagagctagccggacgtcctccgactcaagatatttgtcaaatattttcagaagatggctgatccttggcaggaatgcatggattatgcagtaactctagcaagacaagctggagaggtagtttgtgaagctataaaaaatgaaatgaatgttatgctgaaaagttctccagttgatttggtaactgctacggaccaaaaagttgaaaaaatgcttatctcttccataaaggaaaagtatccatctcacagtttcattggtgaagaatctgtggcagctggggaaaaaagtatcttaaccgacaaccccacatggatcattgaccctattgatggaacaactaactttgtacatagatttccttttgtagctgtttcaattggctttgctgtaaataaaaagatagaatttggagttgtgtacagttgtgtggaaggcaagatgtacactgccagaaaaggaaaaggtgccttttgtaatggtcaaaaactacaagtttcacaacaagaagatattaccaaatctctcttggtgactgagttgggctcttccagaacaccagagactgtgagaatggttctttctaatatggaaaagcttttttgcattcctgttcatgggatccggagtgttggaacagcagctgttaatatgtgccttgtggcaactggcggagcagatgcatattatgaaatgggaattcactgctgggatgttgcaggagctggcattattgttactgaagctggtggcgtgctaatggatgttacaggtggaccatttgatttgatgtcacgaagagtaattgctgcaaataatagaatattagcagaaaggatagctaaagaaattcaggttatacctttgcaacgagacgacgaagattaattaaggcagcctcatagtcaatcccagttgcttttccccagatttggtgactcatcaatggatatgtgttttggatgtatgatatgcttggtttaaattctctttgtccaggtcaaaaatttggaacttgtttcttattttactatgtctaggtttgcaagaattgacataatgtttgtttcactgatttaaaaaattttgcatgtaagaatgtactttaggaaacatacccaggaagtacagttgataaatataacatcaactgaaatagtcaattagcaattttgtgtttctaaatatctatggtcccctgaaattttgacttagtatataggtgcagagacacccacttagaaagttaactgtttggaaaaacatttctctttagtttcaaaaaccatatataattaaatttgtaaggatatactgagtaccctaggccaacttttttttctttgcagagaaccttttttgttttattcttcagtgttcatatagcacctggcccattacatatctaggcaactaaaaacaaacattgtaagaatgaatatttttaatgtagtaattcctagttacaatagatacataaagtaatgaactcagcattctgtacttttgcttcaggtttgaagtaaaaattatctagttaaattttttttatttcacgttaccatgccatttcacattaccataccatcagatagcatggcttattgtgggcatttctgcagtgaatacattttccaaaacagttaaattgtctgtttggatttgctttaaagtcttgtgtaagagagaagaaactatttctataataaaaagcactctcatcagatatctgacataattagatacaatataacattttactaagttcagtattcatgttttaaaggtgtttatactgatttgattgtgctggcaaatatactgtattgttaatattgaactgtttatttttctcttagtcttcttatttaattaacttcattgccgctggattctgttcagcctttaaaaatatttcttagtgtaaagggttaatttattgttcagccttatcccttggcacgtaaacagactactagacttattgtaggttcgtttgagctttgtgttgtaaaattaaaaatgcttctgtaaagttttcaaggtagggagtgattttattattgtgtatatctaatatattaagtatgtgtgatactaaggtttgactgctataattatttgtactgttgatcacatgtacttaaaacatctgatactgtattctaagacaggttgtttttgcaattaaatttattttaataagacgatcatgaataaaactttaaattgatatttttattattattaccattatcattattattatttttagattcagggtctcgctctgttgcccagggtctgtctctgactgtgctgtggtgcagtcatagctcactgtatccttaaattcctgggctcaagtgatcctcctctttcagtctcctgagtagctgggactataagttcatgccaccatgccctactaatgttttaattttatttttgtaaagatgggatcttcctatgttttccaggccccttggcctcccaaagtgctgggattacagatgtgagccaccgagccaggccatgatatttacattattaaagttaatagttcaaactacttttagaggctttgttttgtttttgttttttgaagacagtgtcttgctcttctgctcaaacagtaatgcagtggcatgatcaccattcattgcagtctcaaccttctgggctcaagcagtcctcccacctcagcctccctagtaactggaaccacaggcacatgccaccatgcctggctaattttttagtttttgtagagacagaatcttcctatgttgcttaggctggtctcattgggctcaagtgatcctcctgcctcagccttctaaagtgctgggattacagatgtgagccattgcacccaacatacttttagaggtttttgtgttgagttacaaatatttgaaacttgcaaatgtaatttaatatatgttcttattttttgcctgtaatctttccaacttttctaaaaacctatatttttttctacaatagcttttccatctgtttattctaaatgcagttgcatattttgtgtctgaaatttctttagatgctgaaaaaggatgatcgacaagtgaattatctaataatatttgaaaatatttctttgagtaacaggacttcttagacttaacatgtatattttgtatcagggtatattatctttctgcatgtggatacatacacagatacatacataaatatacataaatatatgtacttgaacacataaaatatatgtacttgccttttaacgaaattgtgttcattctatcctatacttacttgtgaagcattatttggctttgttatgaattaccagccattcttagaattggtttacaatgctaagtcagaagttttcctgggatatgtattattctgactaatttgtccttaattttaagatctagtgtagagcctaaaataccatgtttgaagaaaacaaaaataattattttaaactgtttccttttacctcagttccctatgtttaccctgcctcatttagaaaaaatacgtactttttattactgtctatttagtcacacacatagtttaaaatttcaaatactgctacacagttcagaatgaaaaccagcattttcctgttccattctatcccaccctagtttatctcctcaaactcttttagcagttgttgctggtatttacctccatctttgaaaaggatagatatgttctactaaatctt

SEQ ID NO: 313107 - DNA, 3814 bp, Homo sapiens
agcggagcccctctacctccggaagagacgagtgcggtaacaccgttcacagagctagccggacgtcctccgactcaagaagatggctgatccttggcaggaatgcatggattatgcagtaactctagcaagacaagctggagaggtagtttgtgaagctataaaaaatgaaatgaatgttatgctgaaaagttctccagttgatttggtaactgctacggaccaaaaagttgaaaaaatgcttatctcttccataaaggaaaagtatccatctcacagtttcattggtgaagaatctgtggcagctggggaaaaaagtatcttaaccgacaaccccacatggatcattgaccctattgatggaacaactaactttgtacatagatttccttttgtagctgtttcaattggctttgctgtaaataaaaagatagaatttggagttgtgtacagttgtgtggaaggcaagatgtacactgccagaaaaggaaaaggtgccttttgtaatggtcaaaaactacaagtttcacaacaagaagatattaccaaatctctcttggtgactgagttgggctcttccagaacaccagagactgtgagaatggttctttctaatatggaaaagcttttttgcattcctgttcatgggatccggagtgttggaacagcagctgttaatatgtgccttgtggcaactggcggagcagatgcatattatgaaatgggaattcactgctgggatgttgcaggagctggcattattgttactgaagctggtggcgtgctaatggatgttacaggtggaccatttgatttgatgtcacgaagagtaattgctgcaaataatagaatattagcagaaaggatagctaaagaaattcaggttatacctttgcaacgagacgacgaagattaattaaggcagcctcatagtcaatcccagttgcttttccccagatttggtgactcatcaatggatatgtgttttggatgtatgatatgcttggtttaaattctctttgtccaggtcaaaaatttggaacttgtttcttattttactatgtctaggtttgcaagaattgacataatgtttgtttcactgatttaaaaaattttgcatgtaagaatgtactttaggaaacatacccaggaagtacagttgataaatataacatcaactgaaatagtcaattagcaattttgtgtttctaaatatctatggtcccctgaaattttgacttagtatataggtgcagagacacccacttagaaagttaactgtttggaaaaacatttctctttagtttcaaaaaccatatataattaaatttgtaaggatatactgagtaccctaggccaacttttttttctttgcagagaaccttttttgttttattcttcagtgttcatatagcacctggcccattacatatctaggcaactaaaaacaaacattgtaagaatgaatatttttaatgtagtaattcctagttacaatagatacataaagtaatgaactcagcattctgtacttttgcttcaggtttgaagtaaaaattatctagttaaattttttttatttcacgttaccatgccatttcacattaccataccatcagatagcatggcttattgtgggcatttctgcagtgaatacattttccaaaacagttaaattgtctgtttggatttgctttaaagtcttgtgtaagagagaagaaactatttctataataaaaagcactctcatcagatatctgacataattagatacaatataacattttactaagttcagtattcatgttttaaaggtgtttatactgatttgattgtgctggcaaatatactgtattgttaatattgaactgtttatttttctcttagtcttcttatttaattaacttcattgccgctggattctgttcagcctttaaaaatatttcttagtggtcattgctctgcagaactcaaaaagaaaattgtacttgttcatagacatttttaaagggttaatttattgttcagccttatcccttggcacgtaaacagactactagacttattgtaggttcgtttgagctttgtgttgtaaaattaaaaatgcttctgtaaagttttcaaggtagggagtgattttattattgtgtatatctaatatattaagtatgtgtgatactaaggtttgactgctataattatttgtactgttgatcacatgtacttaaaacatctgatactgtattctaagacaggttgtttttgcaattaaatttattttaataagacgatcatgaataaaactttaaattgatatttttattattattaccattatcattattattatttttagattcagggtctcgctctgttgcccagggtctgtctctgactgtgctgtggtgcagtcatagctcactgtatccttaaattcctgggctcaagtgatcctcctctttcagtctcctgagtagctgggactataagttcatgccaccatgccctactaatgttttaattttatttttgtaaagatgggatcttcctatgttttccaggccccttggcctcccaaagtgctgggattacagatgtgagccaccgagccaggccatgatatttacattattaaagttaatagttcaaactacttttagaggctttgttttgtttttgttttttgaagacagtgtcttgctcttctgctcaaacagtaatgcagtggcatgatcaccattcattgcagtctcaaccttctgggctcaagcagtcctcccacctcagcctccctagtaactggaaccacaggcacatgccaccatgcctggctaattttttagtttttgtagagacagaatcttcctatgttgcttaggctggtctcattgggctcaagtgatcctcctgcctcagccttctaaagtgctgggattacagatgtgagccattgcacccaacatacttttagaggtttttgtgttgagttacaaatatttgaaacttgcaaatgtaatttaatatatgttcttattttttgcctgtaatctttccaacttttctaaaaacctatatttttttctacaatagcttttccatctgtttattctaaatgcagttgcatattttgtgtctgaaatttctttagatgctgaaaaaggatgatcgacaagtgaattatctaataatatttgaaaatatttctttgagtaacaggacttcttagacttaacatgtatattttgtatcagggtatattatctttctgcatgtggatacatacacagatacatacataaatatacataaatatatgtacttgaacacataaaatatatgtacttgccttttaacgaaattgtgttcattctatcctatacttacttgtgaagcattatttggctttgttatgaattaccagccattcttagaattggtttacaatgctaagtcagaagttttcctgggatatgtattattctgactaatttgtccttaattttaagatctagtgtagagcctaaaataccatgtttgaagaaaacaaaaataattattttaaactgtttccttttacctcagttccctatgtttaccctgcctcatttagaaaaaatacgtactttttattactgtctatttagtcacacacatagtttaaaatttcaaatactgctacacagttcagaatgaaaaccagcattttcctgttccattctatcccaccctagtttatctcctcaaactcttttagcagttgttgctggtatttacctccatctttgaaaaggatagatatgttctactaaatctt

SEQ ID NO: 313108 - DNA, 808 bp, Homo sapiens
  misc_feature (807)..(807): n is a, c, g, or t
actagttaacaggcattgcctgaaaagagtataaaagaatttcagcatgattttccatattgtgcttccaccactgccaataacaaaataactagcaaccatgaagtgggtggaatcaatttttttaattttcctactaaattttactgaatccagaacactgcatagaaatgaatatggaatagcttccatattggattcttaccaatgtactgcagagataagtttagctgacctggctaccatattttttgcccagtttgttcaagaagccacttacaaggaagtaagcaaaatggtgaaagatgcattgactgcaattgagaaacccactggagatgaacagtcttcagggtgtttagaaaaccagctacctgcctttctggaagaactttgccatgagaaagaaattttggagaagtacggacattcagactgctgcagccaaagtgaagagggaagacataactgttttcttgcacacaaaaagcccactccagcatcgatcccacttttccaagttccagaacctgtcacaagctgtgaagcatatgaagaagacagggagacattcatgaacaaattcatttatgagatagcaagaaggcatcccttcctgtatgcacctacaattcttctttgggctgctcgctatgacaaaataattccatcttgctgcaaagctgaaaatgcagttgaatgcttccaaacaaaggcagcaacagttacaaaagaattaagagaaagcagcttgttaaatcaacatgcatgtgcagtaatgaagtttaccggtgattttacttgatnc

SEQ ID NO: 313109 - DNA, 780 bp, Homo sapiens
  misc_feature (726)..(726): n is a, c, g, or t
  misc_feature (757)..(757): n is a, c, g, or t
actagttaacaggcattgcctgaaaagagtataaaagaatttcagcatgattttccatattgtgcttccaccactgccaataacaaaataactagcaaccatgaagtgggtggaatcaatttttttaattttcctactaaattttactgaatccagaacactgcatagaaatgaatatggaatagcttccatattggattcttaccaatgtactgcagagataagtttagctgacctggctaccatattttttgcccagtttgttcaagaagccacttacaaggaagtaagcaaaatggtgaaagatgcattgactgcaattgagaaacccactggagatgaacagtcttcagggtgtttagaaaaccagctacctgcctttctggaagaactttgccatgagaaagaaattttggagaagtacggacattcagactgctgcagccaaagtgaagagggaagacataactgttttcttgcacacaaaaagcccactccagcatcgatcccacttttccaagttccagaacctgtcacaagctgtgaagcatatgaagaagacagggagacattcatgaacaaattcatttatgagatagcaagaaggcatcccttcctgtatgcacctacaattcttctttgggctgctcgctatgacaaaataattccatcttgctgcaaagctgaaaatgcagttgaatgcttccaaacaaagaaaaacccccnaaaaaaaaagggggggggcccccaaaggggncccccaaaaaaaacccccccaaa

SEQ ID NO: 313110 - DNA, 475 bp, Homo sapiens
atgaggggagattgccttccactacacataagtatggtcaagtatgaaatagtgttttatccacaacctgcacaactccaggctggtggaacacttggcatgttttcagcctcaatctttctactgaaagtactagacaaggtttctcattaaccttgtgaagcaaaagccacaaataacagaggaacaacttgaggctgtcattgcagatttctcaggcctgttggagaaatgctgccaaggccaggaacaggaagtctgctttgctgaagagggacaaaaactgatttcaaaaactcgtgctgctttgggagtttaaattacttcaggggaagagaagacaaaacgagtctttcattcggtgtgaacttttctctttaattttaactgatttaacactttttgtgaattaatgaaatgataaagacttttatgtgagatttccttatcacagaaataaaatatctccaaatgt

SEQ ID NO: 313111 - DNA, 266 bp, Homo sapiens
aataaatgaatataaagtccgtaattgaaaagtcaaattgagagatgcaggagaaaacaaaaagccattttacaggacaatttgaaggatcacagtctgtattaacagttttgccattcatataattcaaatcatatttgattttcaggtttatttatttgaatttaacttccacatgccatattatataggaataactggagaagtgatggctccttttgtctcttagttccaataacttgaaatatttttctccacatatttca

SEQ ID NO: 313112 - DNA, 2029 bp, Homo sapiens
actagttaacaggcattgcctgaaaagagtataaaagaatttcagcatgattttccatattgtgcttccaccactgccaataacaaaataactagcaaccatgaagtgggtggaatcaatttttttaattttcctactaaattttactgaatccagaacactgcatagaaatgaatatggaatagcttccatattggattcttaccaatgtactgcagagataagtttagctgacctggctaccatattttttgcccagtttgttcaagaagccacttacaaggaagtaagcaaaatggtgaaagatgcattgactgcaattgagaaacccactggagatgaacagtcttcagggtgtttagaaaaccagctacctgcctttctggaagaactttgccatgagaaagaaattttggagaagtacggacattcagactgctgcagccaaagtgaagagggaagacataactgttttcttgcacacaaaaagcccactccagcatcgatcccacttttccaagttccagaacctgtcacaagctgtgaagcatatgaagaagacagggagacattcatgaacaaattcatttatgagatagcaagaaggcatcccttcctgtatgcacctacaattcttctttgggctgctcgctatgacaaaataattccatcttgctgcaaagctgaaaatgcagttgaatgcttccaaacaaaggcagcaacagttacaaaagaattaagagaaagcagcttgttaaatcaacatgcatgtgcagtaatgaaaaattttgggacccgaacttttcaagccataactggtactaaactgagtcagaagtttaccaaagttaattttactgaaatccagaaactagtcctggatgtggcccatgtacatgagcactgttgcagaggagatgtgctggattgtctgcaggatggggaaaaaatcatgtcctacatatgttctcaacaagacactctgtcaaacaaaataacagaatgctgcaaactgaccacgctggaacgtggtcaatgtataattcatgcagaaaatgatgaaaaacctgaaggtctatctccaaatctaaacaggtttttaggagatagagattttaaccaattttcttcaggggaaaaaaatatcttcttggcaagttttgttcatgaatattcaagaagacatcctcagcttgctgtctcagtaattctaagagttgctaaaggataccaggagttattggagaagtgtttccagactgaaaaccctcttgaatgccaagataaaggagaagaagaattacagaaatacatccaggagagccaagcattggcaaagcgaagctgcggcctcttccagaaactaggagaatattacttacaaaatgcgtttctcgttgcttacacaaagaaagccccccagctgacctcgtcggagctgatggccatcaccagaaaaatggcagccacagctgacattattatcggacacttatgtatcagacatgaaatgactccagtaaaccctggtgttggccagtgctgcacttcttcatatgccaacaggaggccatgcttcagcagcttggtggtggatgaaacatatgtccctcctgcattctctgatgacaagttcattttccataaggatctgtgccaagctcagggtgtagcgctgcaaacgatgaagcaagagtttctcattaaccttgtgaagcaaaagccacaaataacagaggaacaacttgaggctgtcattgcagatttctcaggcctgttggagaaatgctgccaaggccaggaacaggaagtctgctttgctgaagagggacaaaaactgatttcaaaaactcgtgctgctttgggagtttaaattacttcaggggaagagaagacaaaacgagtctttcattcggtgtgaacttttctctttaattttaactgatttaacactttttgtgaattaatgaaatgataaagacttttatgtgagatttccttatcacagaaataaaatatctccaaatgt

SEQ ID NO: 313113 - DNA, 2038 bp, Homo sapiens
actagttaacaggcattgcctgaaaagagtataaaagaatttcagcatgattttccatattgtgcttccaccactgccaataacaaaataactagcaaccatgaagtgggtggaatcaatttttttaattttcctactaaattttactgaatccagaacactgcatagaaatgaatatggaatagcttccatattggattcttaccaatgtactgcagagataagtttagctgacctggctaccatattttttgcccagtttgttcaagaagccacttacaaggaagtaagcaaaatggtgaaagatgcattgactgcaattgagaaacccactggagatgaacagtcttcagggtgtttagaaaaccagaagtacggacattcagactgctgcagccaaagtgaagagggaagacataactgttttcttgcacacaaaaagcccactccagcatcgatcccacttttccaagttccagaacctgtcacaagctgtgaagcatatgaagaagacagggagacattcatgaacaaattcatttatgagatagcaagaaggcatcccttcctgtatgcacctacaattcttctttgggctgctcgctatgacaaaataattccatcttgctgcaaagctgaaaatgcagttgaatgcttccaaacaaaggcagcaacagttacaaaagaattaagagaaagcagcttgttaaatcaacatgcatgtgcagtaatgaaaaattttgggacccgaacttttcaagccataactggtactaaactgagtcagaagtttaccaaagttaattttactgaaatccagaaactagtcctggatgtggcccatgtacatgagcactgttgcagaggagatgtgctggattgtctgcaggatggggaaaaaatcatgtcctacatatgttctcaacaagacactctgtcaaacaaaataacagaatgctgcaaactgaccacgctggaacgtggtcaatgtataattcatgcagaaaatgatgaaaaacctgaaggtctatctccaaatctaaacaggtttttaggagatagagattttaaccaattttcttcaggggaaaaaaatatcttcttggcaagttttgttcatgaatattcaagaagacatcctcagcttgctgtctcagtaattctaagagttgctaaaggataccaggagttattggagaagtgtttccagactgaaaaccctcttgaatgccaagataaaggagaagaagaattacagaaatacatccaggagagccaagcattggcaaagcgaagctgcggcctcttccagaaactaggagaatattacttacaaaatgcgtttctcgttgcttacacaaagaaagccccccagctgacctcgtcggagctgatggccatcaccagaaaaatggcagccacagcagccacttgttgccaactcagtgaggacaaactattggcctgtggcgagggagcggctgacattattatcggacacttatgtatcagacatgaaatgactccagtaaaccctggtgttggccagtgctgcacttcttcatatgccaacaggaggccatgcttcagcagcttggtggtggatgaaacatatgtccctcctgcattctctgatgacaagttcattttccataaggatctgtgccaagctcagggtgtagcgctgcaaacgatgaagcaagagtttctcattaaccttgtgaagcaaaagccacaaataacagaggaacaacttgaggctgtcattgcagatttctcaggcctgttggagaaatgctgccaaggccaggaacaggaagtctgctttgctgaagagggacaaaaactgatttcaaaaactcgtgctgctttgggagtttaaattacttcaggggaagagaagacaaaacgagtctttcattcggtgtgaacttttctctttaattttaactgatttaacactttttgtgaattaatgaaatgataaagacttttatgtgagatttccttatcacagaaataaaatatctccaaatgt

SEQ ID NO: 313114 - DNA, 1669 bp, Homo sapiens
actagttaacaggcattgcctgaaaagagtataaaagaatttcagcatgattttccatattgtgcttccaccactgccaataacaaaataactagcaaccatgaagtgggtggaatcaatttttttaattttcctactaaattttactgaatccagaacactgcatagaaatgaatatggaatagcttccatattggattcttaccaatgtactgcagagataagtttagctgacctggctaccatattttttgcccagtttgttcaagaagccacttacaaggaagtaagcaaaatggtgaaagatgcattgactgcaattgagaaacccactggagatgaacagtcttcagggtgtttagaaaaccagctacctgcctttctggaagaactttgaactggtactaaactgagtcagaagtttaccaaagttaattttactgaaatccagaaactagtcctggatgtggcccatgtacatgagcactgttgcagaggagatgtgctggattgtctgcaggatggggaaaaaatcatgtcctacatatgttctcaacaagacactctgtcaaacaaaataacagaatgctgcaaactgaccacgctggaacgtggtcaatgtataattcatgcagaaaatgatgaaaaacctgaaggtctatctccaaatctaaacaggtttttaggagatagagattttaaccaattttcttcaggggaaaaaaatatcttcttggcaagttttgttcatgaatattcaagaagacatcctcagcttgctgtctcagtaattctaagagttgctaaaggataccaggagttattggagaagtgtttccagactgaaaaccctcttgaatgccaagataaaggagaagaagaattacagaaatacatccaggagagccaagcattggcaaagcgaagctgcggcctcttccagaaactaggagaatattacttacaaaatgcgtttctcgttgcttacacaaagaaagccccccagctgacctcgtcggagctgatggccatcaccagaaaaatggcagccacagcagccacttgttgccaactcagtgaggacaaactattggcctgtggcgagggagcggctgacattattatcggacacttatgtatcagacatgaaatgactccagtaaaccctggtgttggccagtgctgcacttcttcatatgccaacaggaggccatgcttcagcagcttggtggtggatgaaacatatgtccctcctgcattctctgatgacaagttcattttccataaggatctgtgccaagctcagggtgtagcgctgcaaacgatgaagcaagagtttctcattaaccttgtgaagcaaaagccacaaataacagaggaacaacttgaggctgtcattgcagatttctcaggcctgttggagaaatgctgccaaggccaggaacaggaagtctgctttgctgaagagggacaaaaactgatttcaaaaactcgtgctgctttgggagtttaaattacttcaggggaagagaagacaaaacgagtctttcattcggtgtgaacttttctctttaattttaactgatttaacactttttgtgaattaatgaaatgataaagacttttatgtgagatttccttatcacagaaataaaatatctccaaatgt

SEQ ID NO: 313115 - DNA, 2487 bp, Homo sapiens
actagttaacaggcattgcctgaaaagagtataaaagaatttcagcatgattttccatattgtgcttccaccactgccaataacaaaataactagcaaccatgaagtgggtggaatcaatttttttaattttcctactaaattttactgaatccagaacactgcatagaaatgaatatggaatagcttccatattggattcttaccaatgtactgcagagataagtttagctgacctggctaccatattttttgcccagtttgttcaagaagccacttacaaggaagtaagcaaaatggtgaaagatgcattgactgcaattgagaaacccactggagatgaacagtcttcagggtgtttagaaaaccagctacctgcctttctggaagaactttgccatgagaaagaaattttggagaagtacggacattcagactgctgcagccaaagtgaagagggaagacataactgttttcttgcacacaaaaagcccactccagcatcgatcccacttttccaagttccagaacctgtcacaagctgtgaagcatatgaagaagacagggagacattcatgaacaaattcatttatgagatagcaagaaggcatcccttcctgtatgcacctacaattcttctttgggctgctcgctatgacaaaataattccatcttgctgcaaagctgaaaatgcagttgaatgcttccaaacaaaggcagcaacagttacaaaagaattaagagaaagcagcttgttaaatcaacatgcatgtgcagtaatgaaaaattttgggacccgaacttttcaagccataactggtactaaactgagtcagaagtttaccaaagttaattttactgaaatccagaaactagtcctggatgtggcccatgtacatgagcactgttgcagaggagatgtgctggattgtctgcaggatggggaaaaaatcatgtcctacatatgttctcaacaagacactctgtcaaacaaaataacagaatgctgcaaactgaccacgctggaacgtggtcaatgtataattcatgcagaaaatgatgaaaaacctgaaggtctatctccaaatctaaacaggtttttaggagatagagattttaaccaattttcttcaggggaaaaaaatatcttcttggcaagttttgttcatgaatattcaagaagacatcctcagcttgctgtctcagtaattctaagagttgctaaaggataccaggagttattggagaagtgtttccagactgaaaaccctcttgaatgccaagataaaggagaagaagaattacagaaatacatccaggagagccaagcattggcaaagcgaagctgcggcctcttccagaaactaggagaatattacttacaaaatgcgtttctcgttgcttacacaaagaaagccccccagctgacctcgtcggagctgatggccatcaccagaaaaatggcagccacagcagccacttgttgccaactcagtgaggacaaactattggcctgtggcgagggagcggctgacattattatcggacacttatgtatcagacatgaaatgactccagtaaaccctggtgttggccagtgctgcacttcttcatatgccaacaggaggccatgcttcagcagcttggtggtggatgaaacatatgtccctcctgcattctctgatgacaagttcattttccataaggatctgtgccaagctcagggtgtagcgctgcaaacgatgaagcaagagtttctcattaaccttgtgaagcaaaagccacaaataacagaggaacaacttgaggctgtcattgcagatttctcaggcctgttggagaaatgctgccaaggccaggaacaggaagtctgctttgctgaagagggacaaaaactgatttcaaaaactcgtgctgctttgggagtttaaattacttcaggggaagagaagacaaaacgagtctttcattcggtgtgaacttttctctttaattttaactgatttaacactttttgtgaattaatgaaatgataaagacttttatgtgagatttccttatcacagaaataaaatatctccaaatgttttccttttccaagtttgcttatttatgaaaagttatcgataatttctttagttttgtataccattgtctgaagcagattctgttaaaatagcattaagtgttggttgttataggagattaaagctatccaaggatggatttacagcactagatcacttggtgaactgaaaaatgttcccaagttaaacactatttgatgctaccagggcattttgtttattaaatgaccatcactgaagtattctaacagataatctggagatgagaaaagaaattattattcttctatgggatctaagaaaatttaacatctactttttttctcaatcttgttcagttctctattcacagacattttaaaacataagaatattacagttttgattgaatataattaatg

SEQ ID NO: 313116 - DNA, 2031 bp, Homo sapiens
actagttaacaggcattgcctgaaaagagtataaaagaatttcagcatgattttccatattgtgcttccaccactgccaataacaaaataactagcaaccatgaagtgggtggaatcaatttttttaattttcctactaaattttactgaatccagaacactgcatagaaatgaatatggaatagcttccatattggattcttaccaatgtactgcagagataagtttagctgacctggctaccatattttttgcccagtttgttcaagaagccacttacaaggaagtaagcaaaatggtgaaagatgcattgactgcaattgagaaacccactggagatgaacagtcttcagggtgtttagaaaaccagctacctgcctttctggaagaactttgccatgagaaagaaattttggagaagtacggacattcagactgctgcagccaaagtgaagagggaagacataactgttttcttgcacacaaaaagcccactccagcatcgatcccacttttccaagttccagaacctgtcacaagctgtgaagcatatgaagaagacagggagacattcatgaacaaattcatttatgagatagcaagaaggcatcccttcctgtatgcacctacaattcttctttgggctgctcgctatgacaaaataattccatcttgctgcaaagctgaaaatgcagttgaatgcttccaaacaaaggcagcaacagttacaaaagaattaagagaaagcagcttgttaaatcaacatgcatgtgcagtaatgaaaaattttgggacccgaacttttcaagccataactggtactaaactgagtcagaagtttaccaaagttaattttactgaaatccagaaactagtcctggatgtggcccatgtacatgagcactgttgcagaggagatgtgctggattgtctgcaggatggggaaaaaatcatgtcctacatatgttctcaacaagacactctgtcaaacaaaataacagaatgctgcaaactgaccacgctggaacgtggtcaatgtataattcatgcagaaaatgatgaaaaacctgaaggtctatctccaaatctaaacaggtttttaggagatagagattttaaccaattttcttcaggggaaaaaaatatcttcttggcaagttttgttcatgaatattcaagaagacatcctcagcttgctgtctcagtaattctaagagttgctaaaggataccaggagttattggagaagtgtttccagactgaaaaccctcttgaatgccaagataaaggagaagaagaattacagaaatacatccaggagagccaagcattggcaaagcgaagctgcggcctcttccagaaactaggagaatattacttacaaaatgcgtttctcgttgcttacacaaagaaagccccccagctgacctcgtcggagctgatggccatcaccagaaaaatggcagccacagcagccacttgttgccaactcagtgaggacaaactattggcctgtggcgagggagcggctgacattattatcggacacttatgtatcagacatgaaatgactccagtaaaccctggtgttggccagtgctgcacttcttcatatgccaacaggaggccatgcttcagcagctccataaggatctgtgccaagctcagggtgtagcgctgcaaacgatgaagcaagagtttctcattaaccttgtgaagcaaaagccacaaataacagaggaacaacttgaggctgtcattgcagatttctcaggcctgttggagaaatgctgccaaggccaggaacaggaagtctgctttgctgaagagggacaaaaactgatttcaaaaactcgtgctgctttgggagtttaaattacttcaggggaagagaagacaaaacgagtctttcattcggtgtgaacttttctctttaattttaactgatttaacactttttgtgaattaatgaaatgataaagacttttatgtgagatttccttatcacagaaataaaatatctccaaatgt

SEQ ID NO: 313117 - DNA, 2030 bp, Homo sapiens
actagttaacaggcattgcctgaaaagagtataaaagaatttcagcatgattttccatattgtgcttccaccactgccaataacaaaataactagcaaccatgaagtgggtggaatcaatttttttaattttcctactaaattttactgaatccagaacactgcatagaaatgaatatggaatagcttccatattggattcttaccaatgtactgcagagataagtttagctgacctggctaccatattttttgcccagtttgttcaagaagccacttacaaggaagtaagcaaaatggtgaaagatgcattgactgcaattgagaaacccactggagatgaacagtcttcagggtgtttagaaaaccagctacctgcctttctggaagaactttgccatgagaaagaaattttggagaagtacggacattcagactgctgcagccaaagtgaagagggaagacataactgttttcttgcacacaaaaagcccactccagcatcgatcccacttttccaagttccagaacctgtcacaagctgtgaagcatatgaagaagacagggagacattcatgaacaaattcatttatgagatagcaagaaggcatcccttcctgtatgcacctacaattcttctttgggctgctcgctatgacaaaataattccatcttgctgcaaagctgaaaatgcagttgaatgcttccaaacaaaggcagcaacagttacaaaagaattaagagaaagcagcttgttaaatcaacatgcatgtgcagtaatgaaaaattttgggacccgaacttttcaagccataactggtactaaactgagtcagaagtttaccaaagttaattttactgaaatccagaaactagtcctggatgtggcccatgtacatgagcactgttgcagaggagatgtgctggattgtctgcaggatggggaaaaaatcatgtcctacatatgttctcaacaagacactctgtcaaacaaaataacagaatgctgcaaactgaccacgctggaacgtggtcaatgtataattcatgcagaaaatgatgaaaaacctgaaggtctatctccaaatctaaacaggtttttaggagatagagattttaaccaattttcttcaggggaaaaaaatatcttcttggcaagttttgttcatgaatattcaagaagacatcctcagcttgctgtctcagtaattctaagagttgctaaaggataccaggagttattggagaagtgtttccagactgaaaaccctcttgaatgccaagataaaggagaagaagaattacagaaatacatccaggagagccaagcattggcaaagcgaagctgcggcctcttccagaaactaggagaatattacttacaaaatgcgtttctcgttgcttacacaaagaaagccccccagctgacctcgtcggagctgatggccatcaccagaaaaatggcagccacagcagccacttgttgccaactcagtgaggacaaactattggcctgtggcgagggagcggctgacattattatcggacacttatgtatcagacatgaaatgactccagtaaaccctggtgttggccagtgctgcacttcttcatatgccaacaggaggccatgcttcagcagcttggtggtggatgaaacatatgtccctcctgcattctctgatgacaagttcattttccataaggatctgtgccaagctcagggtgtagcgctgcaaacgatgaagcaagagtttctcattaaccttgtgaagcaaaagccacaaataacagaggaacaacttgaggctgtcattgcagatttctcaggcctgttggagaaatgctgccaaggccaggaacaggaagtctgctttgctgaagagggacaaaaactgatttcaaaaactcgtgctgctttgggagtttaaattacttcagaactgatttaacactttttgtgaattaatgaaatgataaagacttttatgtgagatttccttatcacagaaataaaatatctccaaatgt

SEQ ID NO: 313118 - DNA, 2086 bp, Homo sapiens
actagttaacaggcattgcctgaaaagagtataaaagaatttcagcatgattttccatattgtgcttccaccactgccaataacaaaataactagcaaccatgaagtgggtggaatcaatttttttaattttcctactaaattttactgaatccagaacactgcatagaaatgaatatggaatagcttccatattggattcttaccaatgtactgcagagataagtttagctgacctggctaccatattttttgcccagtttgttcaagaagccacttacaaggaagtaagcaaaatggtgaaagatgcattgactgcaattgagaaacccactggagatgaacagtcttcagggtgtttagaaaaccagctacctgcctttctggaagaactttgccatgagaaagaaattttggagaagtacggacattcagactgctgcagccaaagtgaagagggaagacataactgttttcttgcacacaaaaagcccactccagcatcgatcccacttttccaagttccagaacctgtcacaagctgtgaagcatatgaagaagacagggagacattcatgaacaaattcatttatgagatagcaagaaggcatcccttcctgtatgcacctacaattcttctttgggctgctcgctatgacaaaataattccatcttgctgcaaagctgaaaatgcagttgaatgcttccaaacaaaggcagcaacagttacaaaagaattaagagaaagcagcttgttaaatcaacatgcatgtgcagtaatgaaaaattttgggacccgaacttttcaagccataactggtactaaactgagtcagaagtttaccaaagttaattttactgaaatccagaaactagtcctggatgtggcccatgtacatgagcactgttgcagaggagatgtgctggattgtctgcaggatggggaaaaaatcatgtcctacatatgttctcaacaagacactctgtcaaacaaaataacagaatgctgcaaactgaccacgctggaacgtggtcaatgtataattcatgcagaaaatgatgaaaaacctgaaggtctatctccaaatctaaacaggtttttaggagatagagattttaaccaattttcttcaggggaaaaaaatatcttcttggcaagttttgttcatgaatattcaagaagacatcctcagcttgctgtctcagtaattctaagagttgctaaaggataccaggagttattggagaagtgtttccagactgaaaaccctcttgaatgccaagataaaggagaagaagaattacagaaatacatccaggagagccaagcattggcaaagcgaagctgcggcctcttccagaaactaggagaatattacttacaaaatgcgtttctcgttgcttacacaaagaaagccccccagctgacctcgtcggagctgatggccatcaccagaaaaatggcagccacagcagccacttgttgccaactcagtgaggacaaactattggcctgtggcgagggagcggctgacattattatcggacacttatgtatcagacatgaaatgactccagtaaaccctggtgttggccagtgctgcacttcttcatatgccaacaggaggccatgcttcagcagcttggtggtggatgaaacatatgtccctcctgcattctctgatgacaagttcattttccataaggatctgtgccaagctcagggtgtagcgctgcaaacgatgaagcaagagtttctcattaaccttgtgaagcaaaagccacaaataacagaggaacaacttgaggctgtcattgcagatttctcaggcctgttggagaaatgctgccaaggccaggaacaggaagtctgctttgctgaagagggacaaaaactgatttcaaaaactcgtgctgctttgggagtttaaattacttcaggggaagagaagacaaaacgagtctttcattcggtgtgaacttttctctttaattttaactgatttaacactttttgtgaattaatgaaatgataaagacttttatgtgagatttccttatcacagaaataaaatatctccaaatgt

SEQ ID NO: 313119 - DNA, 2170 bp, Homo sapiens
actagttaacaggcattgcctgaaaagagtataaaagaatttcagcatgattttccatattgtgcttccaccactgccaataacaaaataactagcaaccatgaagtgggtggaatcaatttttttaattttcctactaaattttactgaatccagaacactgcatagaaatgaatatggaatagcttccatattggattcttaccaatgtactgcagagataagtttagctgacctggctaccatattttttgcccagtttgttcaagaagccacttacaaggaagtaagcaaaatggtgaaagatgcattgactgcaattgagaaacccactggagatgaacagtcttcagggtgtttagaaaaccagctacctgcctttctggaagaactttgccatgagaaagaaattttggagaagtacggacattcagactgctgcagccaaagtgaagagggaagacataactgttttcttgcacacaaaaagcccactccagcatcgatcccacttttccaagttccagaacctgtcacaagctgtgaagcatatgaagaagacagggagacattcatgaacaaattcatttatgagatagcaagaaggcatcccttcctgtatgcacctacaattcttctttgggctgctcgctatgacaaaataattccatcttgctgcaaagctgaaaatgcagttgaatgcttccaaacaaaggcagcaacagttacaaaagaattaagagaaagcagcttgttaaatcaacatgcatgtgcagtaatgaaaaattttgggacccgaacttttcaagccataactggtactaaactgagtcagaagtttaccaaagttaattttactgaaatccagaaactagtcctggatgtggcccatgtacatgagcactgttgcagaggagatgtgctggattgtctgcaggatggggaaaaaatcatgtcctacatatgttctcaacaagacactctgtcaaacaaaataacagaatgctgcaaactgaccacgctggaacgtggtcaatgtataattcatgcagaaaatgatgaaaaacctgaaggtctatctccaaatctaaacaggtttttaggagatagagattttaaccaattttcttcaggggaaaaaaatatcttcttggcaagttttgttcatgaatattcaagaagacatcctcagcttgctgtctcagtaattctaagagttgctaaaggataccaggagttattggagaagtgtttccagactgaaaaccctcttgaatgccaagataaaggagaagaagaattacagaaatacatccaggagagccaagcattggcaaagcgaagctgcggcctcttccagaaactaggagaatattacttacaaaatgcgtttctcgttgcttacacaaagaaagccccccagctgacctcgtcggagctgatggccatcaccagaaaaatggcagccacagcagccacttgttgccaactcagtgaggacaaactattggcctgtggcgagggagcggctgacattattatcggacacttatgtatcagacatgaaatgactccagtaaaccctggtgttggccagtgctgcacttcttcatatgccaacaggaggccatgcttcagcagcttggtggtggatgaaacatatgtccctcctgcattctctgatgacaagttcattttccataaggatctgtgccaagctcagggtgtagcgctgcaaacgatgaagcaagagtttctcattaaccttgtgaagcaaaagccacaaataacagaggaacaacttgaggctgtcattgcagatttctcaggcctgttggagaaatgctgccaaggccaggaacaggaagtctgctttgctgaagagggacaaaaactgatttcaaaaactcgtgctgctttgggagtttaaattacttcaggggaagagaagacaaaacgagtctttcattcggtgtgaacttttctctttaattttaactgatttaacactttttgtgaattaatgaaatgataaagacttttatgtgagatttccttatcacagaaataaaatatctccaaatgtaaaaaaaaaaaacacttaccaatatggtgcccacgtaacccgcaggtagtacttttatcgcgttgttgtcttgtgccccggtcg

SEQ ID NO: 313120 - DNA, 2060 bp, Homo sapiens
actagttaacaggcattgcctgaaaagagtataaaagaatttcagcatgattttccatattgtgcttccaccactgccaataacaaaataactagcaaccatgaagtgggtggaatcaatttttttaattttcctactaaattttactgaatccagaacactgcatagaaatgaatatggaatagcttccatattggattcttaccaatgtactgcagagataagtttagctgacctggctaccatattttttgcccagtttgttcaagaagccacttacaaggaagtaagcaaaatggtgaaagatgcattgactgcaattgagaaacccactggagatgaacagtcttcagggtgtttagaaaaccagccatgagaaagaaattttggagaagtacggacattcagactgctgcagccaaagtgaagagggaagacataactgttttcttgcacacaaaaagcccactccagcatcgatcccacttttccaagttccagaacctgtcacaagctgtgaagcatatgaagaagacagggagacattcatgaacaaattcatttatgagatagcaagaaggcatcccttcctgtatgcacctacaattcttctttgggctgctcgctatgacaaaataattccatcttgctgcaaagctgaaaatgcagttgaatgcttccaaacaaaggcagcaacagttacaaaagaattaagagaaagcagcttgttaaatcaacatgcatgtgcagtaatgaaaaattttgggacccgaacttttcaagccataactggtactaaactgagtcagaagtttaccaaagttaattttactgaaatccagaaactagtcctggatgtggcccatgtacatgagcactgttgcagaggagatgtgctggattgtctgcaggatggggaaaaaatcatgtcctacatatgttctcaacaagacactctgtcaaacaaaataacagaatgctgcaaactgaccacgctggaacgtggtcaatgtataattcatgcagaaaatgatgaaaaacctgaaggtctatctccaaatctaaacaggtttttaggagatagagattttaaccaattttcttcaggggaaaaaaatatcttcttggcaagttttgttcatgaatattcaagaagacatcctcagcttgctgtctcagtaattctaagagttgctaaaggataccaggagttattggagaagtgtttccagactgaaaaccctcttgaatgccaagataaaggagaagaagaattacagaaatacatccaggagagccaagcattggcaaagcgaagctgcggcctcttccagaaactaggagaatattacttacaaaatgcgtttctcgttgcttacacaaagaaagccccccagctgacctcgtcggagctgatggccatcaccagaaaaatggcagccacagcagccacttgttgccaactcagtgaggacaaactattggcctgtggcgagggagcggctgacattattatcggacacttatgtatcagacatgaaatgactccagtaaaccctggtgttggccagtgctgcacttcttcatatgccaacaggaggccatgcttcagcagcttggtggtggatgaaacatatgtccctcctgcattctctgatgacaagttcattttccataaggatctgtgccaagctcagggtgtagcgctgcaaacgatgaagcaagagtttctcattaaccttgtgaagcaaaagccacaaataacagaggaacaacttgaggctgtcattgcagatttctcaggcctgttggagaaatgctgccaaggccaggaacaggaagtctgctttgctgaagagggacaaaaactgatttcaaaaactcgtgctgctttgggagtttaaattacttcaggggaagagaagacaaaacgagtctttcattcggtgtgaacttttctctttaattttaactgatttaacactttttgtgaattaatgaaatgataaagacttttatgtgagatttccttatcacagaaataaaatatctccaaatgt

SEQ ID NO: 313121 - DNA, 1601 bp, Homo sapiens
actagttaacaggcattgcctgaaaagagtataaaagaatttcagcatgattttccatattgtgcttccaccactgccaataacaaaataactagcaaccatgaagtgggtggaatcaatttttttaattttcctactaaattttactgaatccagaacactgcatagaaatgaatatggaatagcttccatattggattcttaccaatgtactgcagagataagtttagctgacctggctaccatattttttgcccagtttgttcaagaagccacttacaaggaagtaagcaaaatggtgaaagatgcattgactgcaattgagaaacccactggagatgaacagtcttcagggtgtttagaaaaccagctacctgcctttctggaagaactttgccatgagaaagaaattttggagaagtacggacattcagactgctgcagccaaagtgaagagggaagacataactgttttcttgcacacaaaaagcccactccagcatcgatcccacttttccaagttccagaacctgtcacaagctgtgaagcatatgaagaagacagggagacattcatgaacaaattcatttatgagatagcaagaaggcatcccttcctgtatgcacctacaattcttctttgggctgctcgctatgacaaaataattccatcttgctgcaaagctgaaaatgcagttgaatgcttccaaacaaaggcagcaacagttacaaaagaattaagagaaagcagcttgttaaatcaacatgcatgtgcagtaatgaaaaattttgggacccgaacttttcaagccataactggtactaaactgagtcagaagtttaccaaagttaattttactgaaatccagaaactagtcctggatgtggcccatgtacatgagcactgttgcagaggagatgtgctggattgtctgcaggatggggaaaaaatcatgtcctacatatgttctcaacaagacactctgtcaaacaaaataacagaatgctgcaaactgaccacgctggaacgtggtcaatgtataattcatgcagaaaatgatgaaaaacctgaaggtctatctccaaatctaaacaggtttttaggagatagagattttaaccaattttcttcaggggaaaaaaatatcttcttggcaagtggtggtggatgaaacatatgtccctcctgcattctctgatgacaagttcattttccataaggatctgtgccaagctcagggtgtagcgctgcaaacgatgaagcaagagtttctcattaaccttgtgaagcaaaagccacaaataacagaggaacaacttgaggctgtcattgcagatttctcaggcctgttggagaaatgctgccaaggccaggaacaggaagtctgctttgctgaagagggacaaaaactgatttcaaaaactcgtgctgctttgggagtttaaattacttcaggggaagagaagacaaaacgagtctttcattcggtgtgaacttttctctttaattttaactgatttaacactttttgtgaattaatgaaatgataaagacttttatgtgagatttccttatcacagaaataaaatatctccaaatgt

SEQ ID NO: 313122 - DNA, 2426 bp, Homo sapiens
actagttaacaggcattgcctgaaaagagtataaaagaatttcagcatgattttccatattgtgcttccaccactgccaataacaaaataactagcaaccatgaagtgggtggaatcaatttttttaattttcctactaaattttactgaatccagaacactgcatagaaatgaatatggaatagcttccatattggattcttaccaatgtactgcagagataagtttagctgacctggctaccatattttttgcccagtttgttcaagaagccacttacaaggaagtaagcaaaatggtgaaagatgcattgactgcaattgagaaacccactggagatgaacagtcttcagggtgtttagaaaaccagctacctgcctttctggaagaactttgccatgagaaagaaattttggagaagtacggacattcagactgctgcagccaaagtgaagagggaagacataactgttttcttgcacacaaaaagcccactccagcatcgatcccacttttccaagttccagaacctgtcacaagctgtgaagcatatgaagaagacagggagacattcatgaacaaattcatttatgagatagcaagaaggcatcccttcctgtatgcacctacaattcttctttgggctgctcgctatgacaaaataattccatcttgctgcaaagctgaaaatgcagttgaatgcttccaaacaaaggcagcaacagttacaaaagaattaagagaaagcagcttgttaaatcaacatgcatgtgcagtaatgaaaaattttgggacccgaacttttcaagccataactggtactaaactgagtcagaagtttaccaaagttaattttactgaaatccagaaactagtcctggatgtggcccatgtacatgagcactgttgcagaggagatgtgctggattgtctgcaggatggggaaaaaatcatgtcctacatatgttctcaacaagacactctgtcaaacaaaataacagaatgctgcaaactgaccacgctggaacgtggtcaatgtataattcatgcagaaaatgatgaaaaacctgaaggtctatctccaaatctaaacaggtttttaggagatagagattttaaccaattttcttcaggggaaaaaaatatcttcttggcaagttttgttcatgaatattcaagaagacatcctcagcttgctgtctcagtaattctaagagttgctaaaggataccaggagttattggagaagtgtttccagactgaaaaccctcttgaatgccaagataaaggagaagaagaattacagaaatacatccaggagagccaagcattggcaaagcgaagctgcggcctcttccagaaactaggagaatattacttacaaaatgcgtttctcgttgcttacacaaagaaagccccccagctgacctcgtcggagctgatggccatcaccagaaaaatggcagccacagcagccacttgttgccaactcagtgaggacaaactattggcctgtggcgagggagcggctgacattattatcggacacttatgtatcagacatgaaatgactccagtaaaccctggtgttggccagtgctgcacttcttcatatgccaacaggaggccatgcttcagcagcttggtggtggatgaaacatatgtccctcctgcattctctgatgacaagttcattttccataaggatctgtgccaagctcagggtgtagcgctgcaaacgatgaagcaagagtttctcattaaccttgtgaagcaaaagccacaaataacagaggaacaacttgaggctgtcattgcagatttctcaggcctgttggagaaatgctgccaaggccaggaacaggaagtctgctttgctgaagagggacaaaaactgatttcaaaaactcgtgctgctttgggagtttaaattacttcaggtaacaaaacattcagacaagcctgaatacaatgttgtttctccagaaatatcaatccataatgagatagatcatgaggagtgccattaattctcttaaaaatacatggaattcaaaaaaaagtttattttaaaaacacttgaacaaaattacgcacacaatgttaaattagtggctcaactatgcaaaatcctttttggttatttaaaagacttcaacaaatgctatcagaagactttcctacgtatccaatatttctctgatataaaataatagaaccagttacttactgcacctattagtttaattagtatttaatatatttttgctcatattgcaggggaagagaagacaaaacgagtctttcattcggtgtgaacttttctctttaattttaactgatttaacactttttgtgaattaatgaaatgataaagacttttatgtgagatttccttatcacagaaataaaatatctccaaatgt

SEQ ID NO: 313123 - DNA, 1655 bp, Homo sapiens
cgcctcgagtgtggccccgcctccagctccttcgtcgcggcctctagtgcactttcggctccttccccttcccgggcctttcagcttggtctttccgggcctcgcttcccccagcccctgcgcccggcccgaacgagaggttccggagccccggcgcgggcgggttctggggtgtagacgctgctggccagcccgccccagccgaggttctcggcaccgccttgagagcttcagctgccccagggtgtgattagaatcccaagaaaatcaaatggcatccggggatttctgctcacctggagaagggatggaaatacttcaacaagtgtgcagcaaacaacttcctccttgtaacctgagtaaagaggacctgttacagaacccatacttcagcaagcttctcctgaatctctcacagcatgtggatgagagtggcttaagcctcaccctagcaaaggagcaggctcaggcatggaaggaagttcgactgcataagacaacatggttgaggtctgagattttacacagagtcattcaagagttgcttgtggactactatgtgaagatacaagacacaaatgtaacttctgaggacaaaaagtttcatgagacccttgaacagcggctgcttgtaactgaactgatgcggctcttaggtcctagccaggagagggagatacctccactgctggggctggagaaagcggaccttctggaactcatgccactctcagaggatttgtgtggatgagggctcggctacagcaagaagtagaggagcagctcaaaaagaaatgtttcactctgctctgctactatgatcccaattcagatgctgacagtgaaaccgtgaaggcagcaaaggtgtggaaactcgcagaggtcctggtgggtgagcagcagcagtgccaggatgccaagagccagcagaaggagcagatgttgctgctggagaagaagagtgctgcttactcccaggtgcttctccgctgcctcactttgctgcagaggcttcttcaagaacaccggctgaagactcaatccgagctagaccgcatcaatgcccagtacctggaagtcaagtgcggtgctatgatccttaagctgaggatggaggagctaaagattttgtccgacacttacactgttgagaaagtggaagttcatcgtctgattagggaccgtttggagggagccattcacctacaggagcaggacatggagaactcaagacaggtcctgaactcctatgaggtccttggggaggagtttgacaggctggtgaaagagtacaccgtactcaagcaggcaacagagaacaagcggtgggccctccaggagttcagcaaggtctaccgttgagctctggcagggccaggagacatggcttctgcatagctgctgcctcctaatcttcctgctagtgggaccaccttcacctggggctgccttcagtacaagggagtgtggaaatgcttacgcttgaaacactgcagtcatttaggcactctcctggtttctctttattttttatgactgggcctcttctggaaaatctagcaaggagatttatataatttttatgcatagctgtgtgtcagtgtcagccctgtattgtatttgattatctcctgaataaagttatgatattataa

SEQ ID NO: 313124 - DNA, 1603 bp, Homo sapiens
  misc_feature (9)..(10): n is a, c, g, or t
  misc_feature (16)..(16): n is a, c, g, or t
  misc_feature (22)..(22): n is a, c, g, or t
aaggctagnncgggcnggtgtnaatcggccgaggtggtctttccgggcctcgcttcccccagcccctgcgcccggcccgaacgagaggttccggagccccggcgcgggcgggttctggggtgtagacgctgctggccagcccgccccagccgaggttctcggcaccgccttgagagcttcagctgccccagggtgtgattagaatcccaagaaaatcaaatggcatccggggatttctgctcacctggagaagggatggaaatacttcaacaagtgtgcagcaaacaacttcctccttgtaacctgagtaaagaggacctgttacagaacccatacttcagcaagcttctcctgaatctctcacagcatgtggatgagagtggcttaagcctcaccctagcaaaggagcaggctcaggcatggaaggaagttcgactgcataagacaacatggttgaggtctgagattttacacagagtcattcaagagttgcttgtggactactatgtgaagatacaagacacaaatgtaacttctgaggacaaaaagtttcatgagacccttgaacagcggctgcttgtaactgaactgatgcggctcttaggtcctagccaggagagggagatacctccactgctggggctggagaaagcggaccttctggaactcatgccactctcagaggatttgtgtggatgagggctcggctacagcaagaagtagaggagcagctcaaaaagaaatgtttcactctgctctgctactatgatcccaattcagatgctgacagtgaaaccgtgaaggcagcaaaggtgtggaaactcgcagaggtcctggtgggtgagcagcagcagtgccaggatgccaagagccagcagaaggagcagatgttgctgctggagaagaagagtgctgcttactcccaggtgcttctccgctgcctcactttgctgcagaggcttcttcaagaacaccggctgaagactcaatccgagctagaccgcatcaatgcccagtacctggaagtcaagtgcggtgctatgatccttaagctgaggatggaggagctaaagattttgtccgacacttacactgttgagaaagtggaagttcatcgtctgattagggaccgtttggagggagccattcacctacaggagcaggacatggagaactcaagacaggtcctgaactcctatgaggtccttggggaggagtttgacaggctggtgaaagagtacaccgtactcaagcaggcaacagagaacaagcggtgggccctccaggagttcagcaaggtctaccgttgagctctggcagggccaggagacatggcttctgcatagctgctgcctcctaatcttcctgctagtgggaccaccttcacctggggctgccttcagtacaagggagtgtggaaatgcttacgcttgaaacactgcagtcatttaggcactctcctggtttctctttattttttatgactgggcctcttctggaaaatctagcaaggagatttatataatttttatgcatagctgtgtgtcagtgtcagccctgtattgtatttgattatctcctgaataaagttatgatattataa

SEQ ID NO: 313125 - DNA, 1600 bp, Homo sapiens
  misc_feature (1)..(1): n is a, c, g, or t
ntatacggctaggtagcgaggctgggtggtgtggtctttccgggcctcgcttcccccagcccctgcgcccggcccgaacgagaggttccggagccccggcgcgggcgggttctggggtgtagacgctgctggccagcccgccccagccgaggttctcggcaccgccttgagagcttcagctgccccagggtgtgattagaatcccaagaaaatcaaatggcatccggggatttctgctcacctggagaagggatggaaatacttcaacaagtgtgcagcaaacaacttcctccttgtaacctgagtaaagaggacctgttacagaacccatacttcagcaagcttctcctgaatctctcacagcatgtggatgagagtggcttaagcctcaccctagcaaaggagcaggctcaggcatggaaggaagttcgactgcataagacaacatggttgaggtctgagattttacacagagtcattcaagagttgcttgtggactactatgtgaagatacaagacacaaatgtaacttctgaggacaaaaagtttcatgagacccttgaacagcggctgcttgtaactgaactgatgcggctcttaggtcctagccaggagagggagatacctccactgctggggctggagaaagcggaccttctggaactcatgccactctcagaggatttgtgtggatgagggctcggctacagcaagaagtagaggagcagctcaaaaagaaatgtttcactctgctctgctactatgatcccaattcagatgctgacagtgaaaccgtgaaggcagcaaaggtgtggaaactcgcagaggtcctggtgggtgagcagcagcagtgccaggatgccaagagccagcagaaggagcagatgttgctgctggagaagaagagtgctgcttactcccaggtgcttctccgctgcctcactttgctgcagaggcttcttcaagaacaccggctgaagactcaatccgagctagaccgcatcaatgcccagtacctggaagtcaagtgcggtgctatgatccttaagctgaggatggaggagctaaagattttgtccgacacttacactgttgagaaagtggaagttcatcgtctgattagggaccgtttggagggagccattcacctacaggagcaggacatggagaactcaagacaggtcctgaactcctatgaggtccttggggaggagtttgacaggctggtgaaagagtacaccgtactcaagcaggcaacagagaacaagcggtgggccctccaggagttcagcaaggtctaccgttgagctctggcagggccaggagacatggcttctgcatagctgctgcctcctaatcttcctgctagtgggaccaccttcacctggggctgccttcagtacaagggagtgtggaaatgcttacgcttgaaacactgcagtcatttaggcactctcctggtttctctttattttttatgactgggcctcttctggaaaatctagcaaggagatttatataatttttatgcatagctgtgtgtcagtgtcagccctgtattgtatttgattatctcctgaataaagttatgatattataa

SEQ ID NO: 313126 - DNA, 2217 bp, Homo sapiens
cgcctcgagtgtggccccgcctccagctccttcgtcgcggcctctagtgcactttcggctccttccccttcccgggcctttcagcttggtctttccgggcctcgcttcccccagcccctgcgcccggcccgaacgagaggttccggagccccggcgcgggcgggttctggggtgtagacgctgctggccagcccgccccagccgaggttctcggcaccgccttgagagcttcagctgccccagggtgtgattagaatcccaagaaaatcaaatggcatccggggatttctgctcacctggagaagggatggaaatacttcaacaagtgtgcagcaaacaacttcctccttgtaacctgagtaaagaggacctgttacagaacccatacttcagcaagcttctcctgaatctctcacagcatgtggatgagagtggcttaagcctcaccctagcaaaggagcaggctcaggcatggaaggaagttcgactgcataagacaacatggttgaggtctgagattttacacagagtcattcaagagttgcttgtggactactatgtgaagatacaagacacaaatgtaacttctgaggacaaaaagtttcatgagacccttgaacagcggctgcttgtaactgaactgatgcggctcttaggtcctagccaggagagggagatacctccactgctggggctggagaaagcggaccttctggaactcatgccactctcagaggatttgtgtggatgagggctcggctacagcaagaagtagaggagcagctcaaaaagaaatgtttcactctgctctgctactatgatcccaattcagatgctgacagtgaaaccgtgaaggcagcaaaggtgtggaaactcgcagaggtcctggtgggtgagcagcagcagtgccaggatgccaagagccagcagaaggagcagatgttgctgctggagaagaagagtgctgcttactcccaggtgcttctccgctgcctcactttgctgcagaggcttcttcaagaacaccggctgaagactcaatccgagctagaccgcatcaatgcccagtacctggaagtcaagtgcggtgctatgatccttaagctgaggatggaggagctaaagattttgtccgacacttacactgttgagaaagtggaagttcatcgtctgattagggaccgtttggagggagccattcacctacaggagcaggacatggagaactcaagacaggtcctgaactcctatgaggtccttggggaggagtttgacaggctggtgaaagagtacaccgtactcaagcaggcaacagagaacaagcggtgggccctccaggagttcagcaaggtctaccgttgagctctggcagggccaggagacatggcttctgcatagctgctgcctcctaatcttcctgctagtgggaccaccttcacctggggctgccttcagtacaagggagtgtggaaatgcttacgcttgaaacactgcagtcatttaggcactctcctggtttctctttattttttatgactgggcctcttctggaaaatctagcaaggagatttatataatttttatgcatagctgtgtgtcagtgtcagccctgtattgtatttgattatctcctgaataaagttatgatattataaaaaaaaaaaacgccagcacccacgcccacacgcccacacaaacaccgagcgacccacaccgcgcgcgcccaacacacgggcacacaaacggcccccggccacagcgggccagcgaacaacgcggccacaaaggcgcgcacacacccggacgaaccccacacagatgccaacataacctccacacaccggatccggaagcccccccacaacaacagcacccaccaacccaccacaacaccacccaccacaccacacccacacccaccacccaaggatgacacaccacaggccctcaaccgtacaccgactcaagcacagaaactcgcccagtcatcagcgctctcaggctgctacgacgtgtgaaggcttcaagctagtgagagaacggagctcgtctatgctatcgtgctagttcattccaggcaaccgcagacactgcgggagcgagaaagtaaaaggtgaggagaaagagaggtcgcaggaccctataacagcaggactaacctctgaggagaagagagcacggcactagaccacgtgtggtcgctacgaacagatggcg

SEQ ID NO: 313127 - DNA, 1779 bp, Homo sapiens
cgcctcgagtgtggccccgcctccagctccttcgtcgcggcctctagtgcactttcggctccttccccttcccgggcctttcagcttggtctttccgggcctcgcttcccccagcccctgcgcccggcccgaacgagaggttccggagccccggcgcgggcgggttctggggtgtagacgctgctggccagcccgccccagccgaggttctcggcaccgccttgagagcttcagctgccccagggtgtgattagaatcccaagaaaatcaaatggcatccggggatttctgctcacctggagaagggatggaaatacttcaacaagtgtgcagcaaacaacttcctccttgtaacctgagtaaagaggacctgttacagaacccatacttcagcaagcttctcctgaatctctcacagcatgtggatgagagtggcttaagcctcaccctagcaaaggagcaggctcaggcatggaaggaagttcgactgcataagacaacatggttgaggtctgagattttacacagagtcattcaagagttgcttgtggactactatgtgaagatacaagacacaaatgtaacttctgaggacaaaaagtttcatgagacccttgaacagcggctgcttgtaactgaactgatgcggctcttaggtcctagccaggagagggagatacctccactgctggggctggagaaagcggaccttctggaactcatgccactctcagaggatttgtgtggatgagggctcggctacagcaagaagtagaggagcagctcaaaaagaaatgtttcactctgctctgctactatgatcccaattcagatgctgacagtgaaaccgtgaaggcagcaaaggtgtggaaactcgcagaggtcctggtgggtgagcagcagcagtgccaggatgccaagagccagcagaaggagcagatgttgctgctggagaagaagagtgctgcttactcccaggtgcttctccgctgcctcactttgctgcagaggcttcttcaagaacaccggctgaagactcaatccgagctagaccgcatcaatgcccagtacctggaagtcaagtgcggtgctatgatccttaagctgaggatggaggagctaaagattttgtccgacacttacactgttgagaaagtggaagttcatcgtctgattagggaccgtttggagggagccattcacctacaggagcaggacatggagaactcaagacaggtcctgaactcctatgaggtccttggggaggagtttgacaggctggtgaaagagtacaccgtactcaagcaggcaacagagaacaagcggtgggccctccaggagttcagcaaggtctaccgttgagctctggcagggccaggagacatggcttctgcatagctgctgcctcctaatcttcctgctagtgggaccaccttcacctggggctgccttcagtacaagggagtgtggaaatgcttacgcttgaaacactgcagtcatttaggcactctcctggtttctctttattttttatgactgggcctcttctggaaaatctagcaaggagatttatataatttttatgcatagctgtgtgtcagtgtcagccctgtattgtatttgattatctcctgaataaagttatgatattataaaaacacacaacacaaaacaaacaacaaacacaaccaaacaggacacacaaaacacacaaaaaaaaaaggggggggcaaaatacacagaggaaagagaaaagcaaagtgaaagagaacaaaaaaa

SEQ ID NO: 313128 - DNA, 1615 bp, Homo sapiens
cgcctcgagtgtggccccgcctccagctccttcgtcgcggcctctagtgcactttcggctccttccccttcccgggcctttcagcttggtctttccgggcctcgcttcccccagcccctgcgcccggcccgaacgagaggttccggagccccggcgcgggcgggttctggggtgtagacgctgctggccagcccgccccagccgaggttctcggcaccgccttgagagcttcagctgccccagggtgtgattagaatcccaagaaaatcaaatggcatccggggatttctgctcacctggagaagggatggaaatacttcaacaagtgtgcagcaaacaacttcctccttgtaacctgagtaaagaggacctgttacagaacccatacttcagcaagcttctcctgaatctctcacagcatgtggatgagagtggcttaagcctcaccctagcaaaggagcaggctcaggcatggaaggaagttcgactgcataagacaacatggttgaggtctgagattttacacagagtcattcaagagttgcttgtggactactatgtgaagatacaagacacaaatgtaacttctgaggacaaaaagtttcatgagacccttgaacagcggctgcttgtaactgaactgatgcggctcttaggtcctagccaggagagggagatacctccactgctggggctggagaaagcggaccttctggaactcatgccactctcagaggatttgtgtggatgagggctcggctacagcaagaagtagaggagcagctcaaaaagaaatgtttcactctgctctgctactatgatcccaattcagatgctgacagtgaaaccgtgaaggcagcaaaggtgtggaaactcgcagaggtcctggtgggtgagcagcagcagtgccaggatgccaagagccagcagaaggagcagatgttgctgctggagaagaagagtgctgcttactcccaggtttatcagggcatgggacagcccctttcctttatcctgaccccaggagcacttttggggaagacaaagattcctgatctaccctcctttctactatctttatttatgccctcttcttcctccatcttgggctcaggtgcttctccgctgcctcactttgctgcagaggcttcttcaagaacaccggctgaagactcaatccgagctagaccgcatcaatgcccagtacctggaagtcaagtgcggtgctatgatccttaagctgaggatggaggagctaaagattttgtccaacagagaacaagcggtgggccctccaggagttcagcaaggtctaccgttgagctctggcagggccaggagacatggcttctgcatagctgctgcctcctaatcttcctgctagtgggaccaccttcacctggggctgccttcagtacaagggagtgtggaaatgcttacgcttgaaacactgcagtcatttaggcactctcctggtttctctttattttttatgactgggcctcttctggaaaatctagcaaggagatttatataatttttatgcatagctgtgtgtcagtgtcagccctgtattgtatttgattatctcctgaataaagttatgatattataa

SEQ ID NO: 313129 - DNA, 1537 bp, Homo sapiens
cgcctcgagtgtggccccgcctccagctccttcgtcgcggcctctagtgcactttcggctccttccccttcccgggcctttcagcttggtctttccgggcctcgcttcccccagcccctgcgcccggcccgaacgagaggttccggagccccggcgcgggcgggttctggggtgtagacgctgctggccagcccgccccagccgaggttctcggcaccgccttgagagcttcagctgccccagggtgtgattagaatcccaagaaaatcaaatggcatccggggatttctgctcacctggagaagggatggaaatacttcaacaagtgtgcagcaaacaacttcctccttgtaacctgagtaaagaggacctgttacagaacccatacttcagcaagcttctcctgaatctctcacagcatgtggatgagagtggcttaagcctcaccctagcaaaggagcaggctcaggcatggaaggaagttcgactgcataagacaacatggttgaggtctgagattttacacagagtcattcaagagttgcttgtggactactatgtgaagatacaagacacaaatgtaacttctgaggacaaaaagtttcatgagacccttgaacagcggctgcttgtaactgaactgatgcggctcttaggtcctagccaggagagggagatacctccactgctggggctggagaaagcggaccttctggaactcatgccactctcagaggatttgtgtggatgagggctcggctacagcaagaagtagaggagcagctcaaaaagaaatgtttcactctgctctgctactatgatcccaattcagatgctgacagtgaaaccgtgaaggcagcaaaggtgtggaaactcgcagaggtcctggtgggtgagcagcagcagtgccaggatgccaagagccagcagaaggagcagatgttgctgctggagaagaagagtgctgcttactcccaggtttatcagggcatgggacagcccctttcctttatcctgaccccaggagcacttttggggaagacaaagattcctgatctaccctcctttctactatctttatttatgccctcttcttcctccatcttgggctcaggtgcttctccgctgcctcactttgctgcagaggcttcttcaagaacaccggctgaagactcaatccgagctagaccgcatcaatgcccagtacctggaagtcaagtgcggtgctatgatccttaagctgaggtgagctgtgacccctgtggatcttaagggattctgtctcacgttatcagccctctatcccttaccctaatctctttcctctcccttatcctagcgccttgtgggtatccagtaaatgtcacatagcagtattagcttttggattacccaaaagctttcaacatccttgagacttttcttttacagtcttctgaaataggcactttactgtgagatcaattgctcgggaattcagagtgaccttgtttatcctatcagtgcttagcccacaccttgaccgtcggcaggtact

SEQ ID NO: 313130 - DNA, 1736 bp, Homo sapiens
ataatggtggtggtggtggagaatcctcttgtttagactcagtgaattggaaagttctctttttaggatgctccttttggacagcttggagcaagtggaaacacatgtgtgcttagaatgtgacatgttttggcacttgtaaatctgtttgtccataaagcttgtgtaagagcttgggacccaggatgtgtggtataggccctctgtaaaagtcatccttgaggttcctttccagcttgtggacagcagaaatttgaacataaggtagtgtccttggagcagccagctgtttattcatctttttgttttctttcacttcttggttccacaattagaatcccaagaaaatcaaatggcatccggggatttctgctcacctggagaagggatggaaatacttcaacaagtgtgcagcaaacaacttcctccttgtaacctgagtaaagaggacctgttacagaacccatacttcagcaagcttctcctgaatctctcacagcatgtggatgagagtggcttaagcctcaccctagcaaaggagcaggctcaggcatggaaggaagttcgactgcataagacaacatggttgaggtctgagattttacacagagtcattcaagagttgcttgtggactactatgtgaagatacaagacacaaatgtaacttctgaggacaaaaagtttcatgagacccttgaacagcggctgcttgtaactgaactgatgcggctcttaggtcctagccaggagagggagatacctccactgctggggctggagaaagcggaccttctggaactcatgccactctcagaggatttgtgtggatgagggctcggctacagcaagaagtagaggagcagctcaaaaagaaatgtttcactctgctctgctactatgatcccaattcagatgctgacagtgaaaccgtgaaggcagcaaaggtgtggaaactcgcagaggtcctggtgggtgagcagcagcagtgccaggatgccaagagccagcagaaggagcagatgttgctgctggagaagaagagtgctgcttactcccaggtgcttctccgctgcctcactttgctgcagaggcttcttcaagaacaccggctgaagactcaatccgagctagaccgcatcaatgcccagtacctggaagtcaagtgcggtgctatgatccttaagctgaggatggaggagctaaagattttgtccgacacttacactgttgagaaagtggaagttcatcgtctgattagggaccgtttggagggagccattcacctacaggagcaggacatggagaactcaagacaggtcctgaactcctatgaggtccttggggaggagtttgacaggctggtgaaagagtacaccgtactcaagcaggcaacagagaacaagcggtgggccctccaggagttcagcaaggtctaccgttgagctctggcagggccaggagacatggcttctgcatagctgctgcctcctaatcttcctgctagtgggaccaccttcacctggggctgccttcagtacaagggagtgtggaaatgcttacgcttgaaacactgcagtcatttaggcactctcctggtttctctttattttttatgactgggcctcttctggaaaatctagcaaggagatttatataatttttatgcatagctgtgtgtcagtgtcagccctgtattgtatttgattatctcctgaataaagttatgatattataa

SEQ ID NO: 313131 - DNA, 1520 bp, Homo sapiens
cgcctcgagtgtggccccgcctccagctccttcgtcgcggcctctagtgcactttcggctccttccccttcccgggcctttcagcttggtctttccgggcctcgcttcccccagcccctgcgcccggcccgaacgagaggttccggagccccggcgcgggcgggttctggggtgtagacgctgctggccagcccgccccagccgaggttctcggcaccgccttgagagcttcagctgccccagggtgtgattagaatcccaagaaaatcaaatggcatccggggatttctgctcacctggagaagggatggaaatacttcaacaagtgtgcagcaaacaacttcctccttgtaacctgagtaaagaggacctgttacagaacccatacttcagcaagcttctcctgaatctctcacagcatgtggatgagagtggcttaagcctcaccctagcaaaggagcaggctcaggcatggaaggaagttcgactgcataagacaacatggttgaggtctgagattttacacagagtcattcaagagttgcttgtggactactatgtgaagatacaagacacaaatgtaacttctgaggacaaaaaggatttgtgtggatgagggctcggctacagcaagaagtagaggagcagctcaaaaagaaatgtttcactctgctctgctactatgatcccaattcagatgctgacagtgaaaccgtgaaggcagcaaaggtgtggaaactcgcagaggtcctggtgggtgagcagcagcagtgccaggatgccaagagccagcagaaggagcagatgttgctgctggagaagaagagtgctgcttactcccaggtgcttctccgctgcctcactttgctgcagaggcttcttcaagaacaccggctgaagactcaatccgagctagaccgcatcaatgcccagtacctggaagtcaagtgcggtgctatgatccttaagctgaggatggaggagctaaagattttgtccgacacttacactgttgagaaagtggaagttcatcgtctgattagggaccgtttggagggagccattcacctacaggagcaggacatggagaactcaagacaggtcctgaactcctatgaggtccttggggaggagtttgacaggctggtgaaagagtacaccgtactcaagcaggcaacagagaacaagcggtgggccctccaggagttcagcaaggtctaccgttgagctctggcagggccaggagacatggcttctgcatagctgctgcctcctaatcttcctgctagtgggaccaccttcacctggggctgccttcagtacaagggagtgtggaaatgcttacgcttgaaacactgcagtcatttaggcactctcctggtttctctttattttttatgactgggcctcttctggaaaatctagcaaggagatttatataatttttatgcatagctgtgtgtcagtgtcagccctgtattgtatttgattatctcctgaataaagttatgatattataa

SEQ ID NO: 313132 - DNA, 931 bp, Homo sapiens
cgcctcgagtgtggccccgcctccagctccttcgtcgcggcctctagtgcactttcggctccttccccttcccgggcctttcagcttggtctttccgggcctcgcttcccccagcccctgcgcccggcccgaacgagaggttccggagccccggcgcgggcgggttctggggtgtagacgctgctggccagcccgccccagccgaggttctcggcaccgccttgagagcttcagctgccccagggtgtgattagaatcccaagaaaatcaaatggcatccggggatttctgctcacctggagaagggatggaaatacttcaacaagtgtgcagcaaacaacttcctccttgtaacctgagtaaagaggacctgttacagaacccatacttcagcaagcttctcctgaatctctcacagcatgtggatgagagtggcttaagcctcaccctagcaaaggagcaggctcaggcatggaaggaagttcgactgcataagacaacatggttgaggtctgagattttacacagagtcattcaagagttgcttgtggactactatgtgaagatacaagacacaaatgtaacttctgaggacaaaaagtttcatgagacccttgaacagcggctgcttgtaactgaactgatgcggctcttaggtcctagccaggagagggagatacctccactgctggggctggagaaagcggaccttctggaactcatgccactctcagaggatttgtgtggatgagggctcggctacagcaagaagtagaggagcagctcaaaaagaaatgtttcactctgctctgctactatgatcccaattcagggtgagtgctagctgtctgttctgctcacagctggacttcagggttcctggtctgctcttttgagaataatatattttgattttagatttgggacagag

SEQ ID NO: 313133 - DNA, 1180 bp, Homo sapiens
tcaagcaatcctcctgccttggcctcccaaagtgctaggattgcaggcgtaagccaccatgctcagcccagaatggggccatttttaatagattattagaagaaaacctgtcataaggcaggatttgtgggtctagatacaggataggggcactggaaggttgctttacagggattgtagcgattagggttttcctgtcagtcctctgcccctttgctcagatgctgacagtgaaaccgtgaaggcagcaaaggtgtggaaactcgcagaggtcctggtgggtgagcagcagcagtgccaggatgccaagagccagcagaaggagcagatgttgctgctggagaagaagagtgctgcttactcccaggtttatcagggcatgggacagcccctttcctttatcctgaccccaggagcacttttggggaagacaaagattcctgatctaccctcctttctactatctttatttatgccctcttcttcctccatcttgggctcaggtgcttctccgctgcctcactttgctgcagaggcttcttcaagaacaccggctgaagactcaatccgagctagaccgcatcaatgcccagtacctggaagtcaagtgcggtgctatgatccttaagctgaggatggaggagctaaagattttgtccgacacttacactgttgagaaagtggaagttcatcgtctgattagggaccgtttggagggagccattcacctacaggagcaggacatggagaactcaagacaggtcctgaactcctatgaggtccttggggaggagtttgacaggctggtgaaagagtacaccgtactcaagcaggcaacagagaacaagcggtgggccctccaggagttcagcaaggtctaccgttgagctctggcagggccaggagacatggcttctgcatagctgctgcctcctaatcttcctgctagtgggaccaccttcacctggggctgccttcagtacaagggagtgtggaaatgcttacgcttgaaacactgcagtcatttaggcactctcctggtttctctttattttttatgactgggcctcttctggaaaatctagcaaggagatttatataatttttatgcatagctgtgtgtcagtgtcagccctgtattgtatttgattatctcctgaataaagttatgatattataa

SEQ ID NO: 313134 - DNA, 969 bp, Homo sapiens
cgcctcgagtgtggccccgcctccagctccttcgtcgcggcctctagtgcactttcggctccttccccttcccgggcctttcagcttggtctttccgggcctcgcttcccccagcccctgcgcccggcccgaacgagaggttccggagccccggcgcgggcgggttctggggtgtagacgctgctggccagcccgccccagccgaggttctcggcaccgccttgagagcttcagctgccccagggtgtgcaggtttgctttagagggtcggcgggcggagcttcggggaagaggagctctgggagagtcattccggccagtggccggagaccgtcgtcgctcttgggaatccttggccgcccagacagaagggaagtaggcgccggagagcccgttctgcattttgattcatctcgggccctattagaatcccaagaaaatcaaatggcatccggggatttctgctcacctggagaagggatggaaatacttcaacaagtgtgcagcaaacaacttcctccttgtaacctgagtaaagaggacctgttacagaacccatacttcagcaagcttctcctgaatctctcacagcatgtggatgagagtggcttaagcctcaccctagcaaaggagcaggctcaggcatggaaggaagttcgactgcataagacaacatggttgaggtctgagattttacacagagtcattcaagagttgcttgtggactactatgtgaagatacaagacacaaatgtaacttctgaggacaaaaagtttcatgagacccttgaacagcggctgcttgtaactgaactgatgcggctcttaggtcctagccaggagagggagatacctccactgctggggctggagaaagcggaccttctggaactcatgccactctcagaggttggcggggagatattggaaccaaataaatgaaatggtttaatttctcccatatcttta

SEQ ID NO: 313135 - DNA, 818 bp, Homo sapiens
cgcctcgagtgtggccccgcctccagctccttcgtcgcggcctctagtgcactttcggctccttccccttcccgggcctttcagcttggtctttccgggcctcgcttcccccagcccctgcgcccggcccgaacgagaggttccggagccccggcgcgggcgggttctggggtgtagacgctgctggccagcccgccccagccgaggttctcggcaccgccttgagagcttcagctgccccagggtgtgattagaatcccaagaaaatcaaatggcatccggggatttctgctcacctggagaagggatggaaatacttcaacaagtgtgcagcaaacaacttcctccttgtaacctgagtaaagaggacctgttacagaacccatacttcagcaagcttctcctgaatctctcacagcatgtggatgagagtggcttaagcctcaccctagcaaaggagcaggctcaggcatggaaggaagttcgactgcataagacaacatggttgaggtctgagattttacacagagtcattcaagagttgcttgtggactactatgtgaagatacaagacacaaatgtaacttctgaggacaaaaagtttcatgagacccttgaacagcggctgcttgtaactgaactgatgcggctcttaggtcctagccaggagagggagatacctccactgctggggctggagaaagcggaccttctggaactcatgccactctcagaggattgtgtggatgagggctcggtacagcagaagtaaggaccagtcaaaaaatggtcacctgccggaattagacccaacattg

SEQ ID NO: 313136 - DNA, 993 bp, Homo sapiens
cgcctcgagtgtggccccgcctccagctccttcgtcgcggcctctagtgcactttcggctccttccccttcccgggcctttcagcttggtctttccgggcctcgcttcccccagcccctgcgcccggcccgaacgagaggttccggagccccggcgcgggcgggttctggggtgtagacgctgctggccagcccgccccagccgaggttctcggcaccgccttgagagcttcagctgccccagggtgtgcaggtttgctttagagggtcggcgggcggagcttcggggaagaggagctctgggagagtcattccggccagtggccggagaccgtcgtcgctcttgggaatccttggccgcccagacagaagggaagtaggcgccggagagcccgttctgcattttgattcatctcgggccctattagaatcccaagaaaatcaaatggcatccggggatttctgctcacctggagaagggatggaaatacttcaacaagtgtgcagcaaacaacttcctccttgtaacctgagtaaagaggacctgttacagaacccatacttcagcaagcttctcctgaatctctcacagcatgtggatgagagtggcttaagcctcaccctagcaaaggagcaggctcaggcatggaaggaagttcgactgcataagacaacatggttgaggtctgagattttacacagagtcattcaagagttgcttgtggactactatgtgaagatacaagacacaaatgtaacttctgaggacaaaaagtttcatgagacccttgaacagcggctgcttgtaactgaactgatgcggctcttaggtcctagccaggagagggagatacctccactgctggggctggagaaagcggaccttctggaaaatctagcaaggagatttatataatttttatgcatagctgtgtgtcagtgtcagccctgtattgtatttgattatctcctgaataaagttatgatattataa

SEQ ID NO: 313137 - DNA, 1444 bp, Homo sapiens
  misc_feature (1)..(1): n is a, c, g, or t
ntatacggctaggtagcgaggctgggtggtgtggtctttccgggcctcgcttcccccagcccctgcgcccggcccgaacgagaggttccggagccccggcgcgggcgggttctggggtgtagacgctgctggccagcccgccccagccgaggttctcggcaccgccttgagagcttcagctgccccagggtgtgcaggtttgctttagagggtcggcgggcggagcttcggggaagaggagctctgggagagtcattccggccagtggccggagaccgtcgtcgctcttgggaatccttggccgcccagacagaagggaagtaggcgccggagagcccgttctgcattttgattcatctcgggccctgtaagggtcatatcttgtgaaaataacctgtaaaatcaatttaacgttcagtgcagcgtgtaaagacagctctaagaatttaaaagacgcctgagtcagaacatttaaatgcttgggtccctgtagcagcgttttaacacgtctgagtgcagagggtggagaatcgagcctgattgccgttcacgccctgtaacctttaagaagggtaaagaaaggcaccctaaaaaacgcaaggggacacttaccctagggggggacgaacagctagctttttggaatttgggttggtcttcatttccaagtgcgaaatttgcctgcaaaactttttatttgcagtcatagatcaacgataaacagaattgttaaaacactgaacttaactaagtagtggctttgttgacaagtcgattgtgttattaattcttaatgtctcatccaaggcaggaatcgttatctcagttttgcaggtgggaaaagtttggcacagaaaaaagcattttccttaagttctcagaagcaacggccggccgagctgcaaattaagtcccagcattctgcctcctcagctgcgtccccctctagaccatgttagaaaacaaatgagtagttactttgatgttactcataaaacgatcgagtaaaccaaatgttctataaacatgaagcgttaaatcataataaccttcaatgcctgttcagctttgggaggctcagttgccctttggagtttgataccttgcagagaggaggggcagagcaaaaacatgaaaagtaatgtcaagggaaaatttttgtctcctgaggtcaaactgtgcccatctttactgcccctgtgttggtgtcattcctttcagcgcactccatgttctggcaaaacacccacagctcacgttctcgttgtagccacattacacctttgcattactcttttgccactgacctcactgtcagtcttcttgtcacgctgtttcctccaggtgctcttttcttaggctgttatgtgaaaaccagttgttcaagtgtggaatgatttgtcattcctgaaggatgattctagagttaatgataaaaaaaaaa

SEQ ID NO: 313138 - DNA, 790 bp, Homo sapiens
tcaagcaatcctcctgccttggcctcccaaagtgctaggattgcaggcgtaagccaccatgctcagcccagaatggggccatttttaatagattattagaagaaaacctgtcataaggcaggatttgtgggtctagatacaggataggggcactggaaggttgctttacagggattgtagcgattagggttttcctgtcagtcctctgcccctttgctcagatgctgacagtgaaaccgtgaaggcagcaaaggtgtggaaactcgcagaggtcctggtgggtgagcagcagcagtgccaggatgccaagagccagcagaaggagcagatgttgctgctggagaagaagagtgctgcttactcccaggtgcttctccgctgcctcactttgctgcagaggcttcttcaagaacaccggctgaagactcaatccgagctagaccgcatcaatgcccagtacctggaagtcaagtgcggtgctatgatccttaagctgaggtgagctgtgacccctgtggatcttaagggattctgtctcacgttatcagccctctatcccttaccctaatctctttcctctcccttatcctagcgccttgtgggtatccagtaaatgtcacatagcagtattagcttttggattacccaaaagctttcaacatccttgagacttttcttttacagtcttctgaaataggcactttactgtgagatcaattgctcgggaattcagagtgaccttgtttatcctatcagtgcttagcccacaccttgaccgtcggcaggtact

SEQ ID NO: 313139 - DNA, 579 bp, Homo sapiens
  misc_feature (1)..(1): n is a, c, g, or t
ntatacggctaggtagcgaggctgggtggtgtggtctttccgggcctcgcttcccccagcccctgcgcccggcccgaacgagaggttccggagccccggcgcgggcgggttctggggtgtagacgctgctggccagcccgccccagccgaggttctcggcaccgccttgagagcttcagctgccccagggtgtgattagaatcccaagaaaatcaaatggcatccggggatttctgctcacctggagaagggatggaaatacttcaacaagtgcataagacaacatggttgaggtctgagattttacacagagtcattcaagagttgcttgtggactactatgtgaagatacaagacacaaatgtaacttctgaggacaaaaagtttcatgagacccttgaacagcggctgcttgtaactgaactgatgcggctcttaggtcctagccaggagagggagatacctccactgctggggctggagaaagcggaccttctggaactcatgccactctcagaggttggcggggagatattggaaccaaataaatgaaatggtttaatttctcccatatcttta

SEQ ID NO: 313140 - DNA, 396 bp, Homo sapiens
ttcagcaaggtctaccgttgagctctggcagggccaggagacatggcttctgcatagctgctgcctcctaatcttcctgctagtgggaccaccttcacctggggctgccttcagtacaagggagtgtggaaatgcttacgcttgaaacactgcagtcatttaggcactctcctggtttctctttattttttatgactgggcctcttctggaaaatctagcaaggagatttatataatttttatgcatagctgtgtgtcagtgtcagccctgtattgtatttgattatctcctgaataaagttatgatattataacttaggattttagtcattttccttgggcaaagattgaaaaagaacattgaaggctatatgggtaaggagcggggaactgagt

SEQ ID NO: 313141 - DNA, 763 bp, Homo sapiens
  misc_feature (1)..(1): n is a, c, g, or t
ntatacggctaggtagcgaggctgggtggtgtggtctttccgggcctcgcttcccccagcccctgcgcccggcccgaacgagaggttccggagccccggcgcgggcgggttctggggtgtagacgctgctggccagcccgccccagccgaggttctcggcaccgccttgagagcttcagctgccccagggtgtgattagaatcccaagaaaatcaaatggcatccggggatttctgctcacctggagaagggatggaaatacttcaacaagtgtgcagcaaacaacttcctccttgtaacctgagtaaagaggacctgttacagaacccatacttcagcaagcttctcctgaatctctcacagcatgtggatgagagtggcttaagcctcaccctagcaaaggagcaggctcaggcatggaaggaagttcgactgcataagacaacatggttgaggtctgagattttacacagagtcattcaagagttgcttgtggactactatgtgaagatacaagacacaaatgtaacttctgaggacaaaaagtttcatgagacccttgaacagcggctgcttgtaactgaactgatgcggctcttaggtcctagccaggagagggagatacctccactgctggggctggagaaagcggaccttctggaactcatgccactctcagaggattgtgtggatgagggctcggtacagcagaagtaaggaccagtcaaaaaatggtcacctgccggaattagacccaacattg

SEQ ID NO: 313142 - DNA, 1791 bp, Homo sapiens
cgcctcgagtgtggccccgcctccagctccttcgtcgcggcctctagtgcactttcggctccttccccttcccgggcctttcagcttggtctttccgggcctcgcttcccccagcccctgcgcccggcccgaacgagaggttccggagccccggcgcgggcgggttctggggtgtagacgctgctggccagcccgccccagccgaggttctcggcaccgccttgagagcttcagctgccccagggtgtgattagaatcccaagaaaatcaaatggcatccggggatttctgctcacctggagaagggatggaaatacttcaacaagtgtgcagcaaacaacttcctccttgtaacctgagtaaagaggacctgttacagaacccatacttcagcaagcttctcctgaatctctcacagcatgtggatgagagtggcttaagcctcaccctagcaaaggagcaggctcaggcatggaaggaagttcgactgcataagacaacatggttgaggtctgagattttacacagagtcattcaagagttgcttgtggactactatgtgaagatacaagacacaaatgtaacttctgaggacaaaaagtttcatgagacccttgaacagcggctgcttgtaactgaactgatgcggctcttaggtcctagccaggagagggagatacctccactgctggggctggagaaagcggaccttctggaactcatgccactctcagaggatttgtgtggatgagggctcggctacagcaagaagtagaggagcagctcaaaaagaaatgtttcactctgctctgctactatgatcccaattcagatgctgacagtgaaaccgtgaaggcagcaaaggtgtggaaactcgcagaggtcctggtgggtgagcagcagcagtgccaggatgccaagagccagcagaaggagcagatgttgctgctggagaagaagagtgctgcttactcccaggtttatcagggcatgggacagcccctttcctttatcctgaccccaggagcacttttggggaagacaaagattcctgatctaccctcctttctactatctttatttatgccctcttcttcctccatcttgggctcaggtgcttctccgctgcctcactttgctgcagaggcttcttcaagaacaccggctgaagactcaatccgagctagaccgcatcaatgcccagtacctggaagtcaagtgcggtgctatgatccttaagctgaggatggaggagctaaagattttgtccgacacttacactgttgagaaagtggaagttcatcgtctgattagggaccgtttggagggagccattcacctacaggagcaggacatggagaactcaagacaggtcctgaactcctatgaggtccttggggaggagtttgacaggctggtgaaagagtacaccgtactcaagcaggcaacagagaacaagcggtgggccctccaggagttcagcaaggtctaccgttgagctctggcagggccaggagacatggcttctgcatagctgctgcctcctaatcttcctgctagtgggaccaccttcacctggggctgccttcagtacaagggagtgtggaaatgcttacgcttgaaacactgcagtcatttaggcactctcctggtttctctttattttttatgactgggcctcttctggaaaatctagcaaggagatttatataatttttatgcatagctgtgtgtcagtgtcagccctgtattgtatttgattatctcctgaataaagttatgatattataa

SEQ ID NO: 313143 - DNA, 1479 bp, Homo sapiens
cgcctcgagtgtggccccgcctccagctccttcgtcgcggcctctagtgcactttcggctccttccccttcccgggcctttcagcttggtctttccgggcctcgcttcccccagcccctgcgcccggcccgaacgagaggttccggagccccggcgcgggcgggttctggggtgtagacgctgctggccagcccgccccagccgaggttctcggcaccgccttgagagcttcagctgccccagggtgtgattagaatcccaagaaaatcaaatggcatccggggatttctgctcacctggagaagggatggaaatacttcaacaagtgtgcagcaaacaacttcctccttgtaacctgagtaaagaggacctgttacagaacccatacttcagcaagcttctcctgaatctctcacagcatgtggatgagagtggcttaagcctcaccctagcaaaggagcaggctcaggcatggaaggaagttcgactgcataagacaacatggttgaggtctgagattttacacagagtcattcaagagttgcttgtggactactatgtgaagatacaagacacaaatgtaacttctgaggacaaaaagtttcatgagacccttgaacagcggctgcttgtaactgaactgatgcggctcttaggtcctagccaggagagggagatacctccactgctggggctggagaaagcggaccttctggaactcatgccactctcagaggatttgtgtggatgagggctcggctacagcaagaagtagaggagcagctcaaaaagaaatgtttcactctgctctgctactatgatcccaattcagatgctgacagtgaaaccgtgaaggcagcaaaggtgtggaaactcgcagaggtcctggtgggtgagcagcagcagtgccaggatgccaagagccagcagaaggagcagatgttgctgctggagaagaagagtgctgcttactcccaggtgcttctccgctgcctcactttgctgcagaggcttcttcaagaacaccggctgaagactcaatccgagctagaccgcatcaatgcccagtacctggaagtcaagtgcggtgctatgatccttaagctgaggatggaggagctaaagattttgtccaacagagaacaagcggtgggccctccaggagttcagcaaggtctaccgttgagctctggcagggccaggagacatggcttctgcatagctgctgcctcctaatcttcctgctagtgggaccaccttcacctggggctgccttcagtacaagggagtgtggaaatgcttacgcttgaaacactgcagtcatttaggcactctcctggtttctctttattttttatgactgggcctcttctggaaaatctagcaaggagatttatataatttttatgcatagctgtgtgtcagtgtcagccctgtattgtatttgattatctcctgaataaagttatgatattataa

SEQ ID NO: 313144 - DNA, 1675 bp, Homo sapiens
cgcctcgagtgtggccccgcctccagctccttcgtcgcggcctctagtgcactttcggctccttccccttcccgggcctttcagcttggtctttccgggcctcgcttcccccagcccctgcgcccggcccgaacgagaggttccggagccccggcgcgggcgggttctggggtgtagacgctgctggccagcccgccccagccgaggttctcggcaccgccttgagagcttcagctgccccagggtgtgattagaatcccaagaaaatcaaatggcatccggggatttctgctcacctggagaagggatggaaatacttcaacaagtgtgcagcaaacaacttcctccttgtaacctgagtaaagaggacctgttacagaacccatacttcagcaagcttctcctgaatctctcacagcatgtggatgagagtggcttaagcctcaccctagcaaaggagcaggctcaggcatggaaggaagttcgactgcataagacaacatggttgaggtctgagattttacacagagtcattcaagagttgcttgtggactactatgtgaagatacaagacacaaatgtaacttctgaggacaaaaagtttcatgagacccttgaacagcggctgcttgtaactgaactgatgcggctcttaggtcctagccaggagagggagatacctccactgctggggctggagaaagcggaccttctggaactcatgccactctcagaggatttgtgtggatgagggctcggctacagcaagaagtagaggagcagctcaaaaagaaatgtttcactctgctctgctactatgatcccaattcagtcctctgcccctttgctcagatgctgacagtgaaaccgtgaaggcagcaaaggtgtggaaactcgcagaggtcctggtgggtgagcagcagcagtgccaggatgccaagagccagcagaaggagcagatgttgctgctggagaagaagagtgctgcttactcccaggtgcttctccgctgcctcactttgctgcagaggcttcttcaagaacaccggctgaagactcaatccgagctagaccgcatcaatgcccagtacctggaagtcaagtgcggtgctatgatccttaagctgaggatggaggagctaaagattttgtccgacacttacactgttgagaaagtggaagttcatcgtctgattagggaccgtttggagggagccattcacctacaggagcaggacatggagaactcaagacaggtcctgaactcctatgaggtccttggggaggagtttgacaggctggtgaaagagtacaccgtactcaagcaggcaacagagaacaagcggtgggccctccaggagttcagcaaggtctaccgttgagctctggcagggccaggagacatggcttctgcatagctgctgcctcctaatcttcctgctagtgggaccaccttcacctggggctgccttcagtacaagggagtgtggaaatgcttacgcttgaaacactgcagtcatttaggcactctcctggtttctctttattttttatgactgggcctcttctggaaaatctagcaaggagatttatataatttttatgcatagctgtgtgtcagtgtcagccctgtattgtatttgattatctcctgaataaagttatgatattataa

SEQ ID NO: 313145 - DNA, 1509 bp, Homo sapiens
cgcctcgagtgtggccccgcctccagctccttcgtcgcggcctctagtgcactttcggctccttccccttcccgggcctttcagcttggtctttccgggcctcgcttcccccagcccctgcgcccggcccgaacgagaggttccggagccccggcgcgggcgggttctggggtgtagacgctgctggccagcccgccccagccgaggttctcggcaccgccttgagagcttcagctgccccagggtgtgattagaatcccaagaaaatcaaatggcatccggggatttctgctcacctggagaagggatggaaatacttcaacaagtgtgcagcaaacaacttcctccttgtaacctgagtaaagaggacctgttacagaacccatacttcagcaagcttctcctgaatctctcacagcatgtggatgagagtggcttaagcctcaccctagcaaaggagcaggctcaggcatggaaggaagttcgactgcataagacaacatggttgaggtctgagattttacacagagtcattcaagagttgcttgtggactactatgtgaagatacaagacacaaatgtaacttctgaggacaaaaagtttcatgagacccttgaacagcggctgcttgtaactgaactgatgcggctcttaggtcctagccaggagagggagatacctccactgctggggctggagaaagcggaccttctggaactcatgccactctcagaggatttgtgtggatgagggctcggctacagcaagaagtagaggagcagctcaaaaagaaatgtttcactctgctctgctactatgatcccaattcaggtgcttctccgctgcctcactttgctgcagaggcttcttcaagaacaccggctgaagactcaatccgagctagaccgcatcaatgcccagtacctggaagtcaagtgcggtgctatgatccttaagctgaggatggaggagctaaagattttgtccgacacttacactgttgagaaagtggaagttcatcgtctgattagggaccgtttggagggagccattcacctacaggagcaggacatggagaactcaagacaggtcctgaactcctatgaggtccttggggaggagtttgacaggctggtgaaagagtacaccgtactcaagcaggcaacagagaacaagcggtgggccctccaggagttcagcaaggtctaccgttgagctctggcagggccaggagacatggcttctgcatagctgctgcctcctaatcttcctgctagtgggaccaccttcacctggggctgccttcagtacaagggagtgtggaaatgcttacgcttgaaacactgcagtcatttaggcactctcctggtttctctttattttttatgactgggcctcttctggaaaatctagcaaggagatttatataatttttatgcatagctgtgtgtcagtgtcagccctgtattgtatttgattatctcctgaataaagttatgatattataa

SEQ ID NO: 313146 - DNA, 1828 bp, Homo sapiens
cgcctcgagtgtggccccgcctccagctccttcgtcgcggcctctagtgcactttcggctccttccccttcccgggcctttcagcttggtctttccgggcctcgcttcccccagcccctgcgcccggcccgaacgagaggttccggagccccggcgcgggcgggttctggggtgtagacgctgctggccagcccgccccagccgaggttctcggcaccgccttgagagcttcagctgccccagggtgtgcaggtttgctttagagggtcggcgggcggagcttcggggaagaggagctctgggagagtcattccggccagtggccggagaccgtcgtcgctcttgggaatccttggccgcccagacagaagggaagtaggcgccggagagcccgttctgcattttgattcatctcgggccctattagaatcccaagaaaatcaaatggcatccggggatttctgctcacctggagaagggatggaaatacttcaacaagtgtgcagcaaacaacttcctccttgtaacctgagtaaagaggacctgttacagaacccatacttcagcaagcttctcctgaatctctcacagcatgtggatgagagtggcttaagcctcaccctagcaaaggagcaggctcaggcatggaaggaagttcgactgcataagacaacatggttgaggtctgagattttacacagagtcattcaagagttgcttgtggactactatgtgaagatacaagacacaaatgtaacttctgaggacaaaaagtttcatgagacccttgaacagcggctgcttgtaactgaactgatgcggctcttaggtcctagccaggagagggagatacctccactgctggggctggagaaagcggaccttctggaactcatgccactctcagaggatttgtgtggatgagggctcggctacagcaagaagtagaggagcagctcaaaaagaaatgtttcactctgctctgctactatgatcccaattcagatgctgacagtgaaaccgtgaaggcagcaaaggtgtggaaactcgcagaggtcctggtgggtgagcagcagcagtgccaggatgccaagagccagcagaaggagcagatgttgctgctggagaagaagagtgctgcttactcccaggtgcttctccgctgcctcactttgctgcagaggcttcttcaagaacaccggctgaagactcaatccgagctagaccgcatcaatgcccagtacctggaagtcaagtgcggtgctatgatccttaagctgaggatggaggagctaaagattttgtccgacacttacactgttgagaaagtggaagttcatcgtctgattagggaccgtttggagggagccattcacctacaggagcaggacatggagaactcaagacaggtcctgaactcctatgaggtccttggggaggagtttgacaggctggtgaaagagtacaccgtactcaagcaggcaacagagaacaagcggtgggccctccaggagttcagcaaggtctaccgttgagctctggcagggccaggagacatggcttctgcatagctgctgcctcctaatcttcctgctagtgggaccaccttcacctggggctgccttcagtacaagggagtgtggaaatgcttacgcttgaaacactgcagtcatttaggcactctcctggtttctctttattttttatgactgggcctcttctggaaaatctagcaaggagatttatataatttttatgcatagctgtgtgtcagtgtcagccctgtattgtatttgattatctcctgaataaagttatgatattataa

SEQ ID NO: 313147 - DNA, 1540 bp, Homo sapiens
cgcctcgagtgtggccccgcctccagctccttcgtcgcggcctctagtgcactttcggctccttccccttcccgggcctttcagcttggtctttccgggcctcgcttcccccagcccctgcgcccggcccgaacgagaggttccggagccccggcgcgggcgggttctggggtgtagacgctgctggccagcccgccccagccgaggttctcggcaccgccttgagagcttcagctgccccagggtgtgattagaatcccaagaaaatcaaatggcatccggggatttctgctcacctggagaagggatggaaatacttcaacaagtgtgcagcaaacaacttcctccttgtaacctgagtaaagaggacctgttacagaacccatacttcagcaagcttctcctgaatctctcacagcatgtggatgagagtggcttaagcctcaccctagcaaaggagcaggctcaggcatggaaggaagttcgactgcataagacaacatggttgaggtctgagattttacacagagtcattcaagagttgcttgtggactactatgtgaagatacaagacacaaatgtaacttctgaggacaaaaaggatttgtgtggatgagggctcggctacagcaagaagtagaggagcagctcaaaaagaaatgtttcactctgctctgctactatgatcccaattcagtcctctgcccctttgctcagatgctgacagtgaaaccgtgaaggcagcaaaggtgtggaaactcgcagaggtcctggtgggtgagcagcagcagtgccaggatgccaagagccagcagaaggagcagatgttgctgctggagaagaagagtgctgcttactcccaggtgcttctccgctgcctcactttgctgcagaggcttcttcaagaacaccggctgaagactcaatccgagctagaccgcatcaatgcccagtacctggaagtcaagtgcggtgctatgatccttaagctgaggatggaggagctaaagattttgtccgacacttacactgttgagaaagtggaagttcatcgtctgattagggaccgtttggagggagccattcacctacaggagcaggacatggagaactcaagacaggtcctgaactcctatgaggtccttggggaggagtttgacaggctggtgaaagagtacaccgtactcaagcaggcaacagagaacaagcggtgggccctccaggagttcagcaaggtctaccgttgagctctggcagggccaggagacatggcttctgcatagctgctgcctcctaatcttcctgctagtgggaccaccttcacctggggctgccttcagtacaagggagtgtggaaatgcttacgcttgaaacactgcagtcatttaggcactctcctggtttctctttattttttatgactgggcctcttctggaaaatctagcaaggagatttatataatttttatgcatagctgtgtgtcagtgtcagccctgtattgtatttgattatctcctgaataaagttatgatattataa

SEQ ID NO: 313148 - DNA, 888 bp, Homo sapiens
gcacgagaaaaggttctataatgcagattttatagaaccttttgtacaccctatgggttcttgatgcaaccagtaattttaaataaataaattctacctccaaggaggctgcagctaaaccaacataaggtgtacaaaaggttctataaaatctgcattatagagacaaagaggcaggcaaatccatgtcacaagggtaaagcttacagtttacaaactgggaacgccagggtgtaggatataaaaacgcactcttgagaaaacaaatgtaatcagggtgctgaaaacttgcatggtgctttcagacattagccttgttcaacaaatttcttgtattgacagatccatagtgtgcatgggcagacacattttgcctctatgtctcttaaaattttaattaaaaatactctttccagtaatcctaatttgcacgaagatataatgtccacattacgtgccttgccttgaaatctaaaaaacaaaaaacaaaaaaaaaaaaacaaaaaaatacaacaaagtgacatcactacacttgttttgctgcatttattatcattttaaatctttaccatttttatgacaaaatattttgtactccagacgaagaaaaatgtgtgacatcatggattttttagacagttatacctttatctcacatttataaagcatatcatggctgtgtatagttgccgcttaaaaattgtaatcgaccagcaatattttcagtattttggtgtttttttctattaacctttcatgtttttcatcttccaattaatatttgggggggaggggtttcaaatttatacgaattatgcaataccaagttttgcctatgtaggtagtgcttttagctgtattggttattataggtaagtacacagattt

SEQ ID NO: 313149 - DNA, 970 bp, Homo sapiens
atgaacagcacactgaggaggacacaaaagaagtagacagaatctctgcctctgcttaggagtatgcaatttagttggggcgacaaaacttaaatgctagaaccaataaaagaagattacaaagcaactcgcaaattctggacaatcaggaagtccaagccacaatgatcctgccaagaatcctccaggttaccttgaggatagttttgtaaaatctggagtcttcaatgtatcagaacttgtaagagtatccagaacgcccataacccagggaactggagtcaacttcccaattggagaaatcccaagccaaccatactatcatgacatgaactcgggggtcaatcttcagaggtctctgtcttctccaccaagcagcaaaagacccaaaactatatccatagatgaaaatatggaaccaagtcctacaggagacttttacccctctccaagttcaccagctgctggaagtcgaacatggcacgaaagagatcaagatatgtcttctccgactactatgaagaagcctgaaaagccattgttcagctctgcatctccacaggattcttccccaagactgagcactttcccccagcaccaccatcccggaatacctggagttgcacacagtgtcatctcaactcgaactccacctccaccttcaccgttgccatttccaacacaagctatccttcctccagccccatcgagctacttttctcatccaacaatcagatatcctccccacctgaatcctcaggatactctgaagaactatgtaccttcttatgacccatccagtccacaaaccagccagtcctgggtacctgggtagctggggcctttcccagtgtcgaaagggaacccctttttacggacagtccaaatccggttgacctatggggaacttccttagagaaaagcactggggaagacacccagttgaaatttttcaaacacaaaggaggag

SEQ ID NO: 313150 - DNA, 518 bp, Homo sapiens
tgcctcttgggaaagtaaggttaatgccatgtacagtactagtttgcatgtgttcatttaaatactaaaaactgtagtactgctcgatccatatctgactgctaggtttcaattgacagctgaggatttgtgactggaccatgaatcaaaacggcaggcatttataccccagtaccagtgaggatacattgggaattacttggcaaaggtaacattttaattatttccaaccctacacttacacctaaaaattacatgagctatagtgtttgtttttaactagctttacagaaaatatatgttaaaaatttagttgttttggctatgccattcttctttccctgtcctcctcctttatttcttatgtaaatggaacgtcaaattaagttgggactatagtatatgcttactgatcattggaatttttaaatgctataaaatgttttctacaatttatactgtttttggtgggggagggggtggaatgtgacatttagattttaggacctgaaaagtga

SEQ ID NO: 313151 - DNA, 3095 bp, Homo sapiens
tcccgcgcccccctccccgccttttttgaaaaagcattttaccaccaaccaccaccccaatccaacccacaccgaaccttcgcgcaccccctacaccccaacaacaacaacaactgcaaaatagaaaacaaatccccaaacccaggcgaaaagcagccaacaccggcggcggcggcggcctcggcaagcacggccagcgcgctcggactgcaagagggttaaaagtgtagattggatttcacccctggaactctagcacgccgagtgaacttgaatctttggctatttaaggaggactgggtttgttgtgaagttgcggtgatccagcgcagagccccgtcctgattgatcgcatcgcggggctcagatgactgtaaaatgaatagatgaaattcttgcttctcgaagattttcttgggcatctcccggaaagtgcgttttaaggcgaagtcatgatgtattctcccatctgtctcactcaggatgaatttcacccattcatcgaggcacttcttccacatgtccgtgcaattgcctatacttggttcaacctgcaggctcgaaaacgcaagtactttaaaaagcatgagaagcgaatgtcaaaggatgaagaaagagcagtcaaagatgagcttctcagtgaaaagcctgaaatcaaacagaagtgggcatccaggctccttgccaaactgcgcaaagatattcgccaggagtatcgagaggactttgtgctcaccgtgactggcaagaagcacccgtgctgtgtcttatccaatcccgaccagaagggtaagattaggagaatcgactgcctgcgacaggcagacaaagtctggcgtctggatctagtcatggtgatcctgttcaaaggcatccccttggaaagtaccgatggagagcggctcatgaaatccccacattgcacaaacccagcactttgtgtccagccacatcatatcacagtatcagttaaggagcttgatttgtttttggcatactacgtgcaggagcaagattctggacaatcaggaagtccaagccacaatgatcctgccaagaatcctccaggttaccttgaggatagttttgtaaaatctggagtcttcaatgtatcagaacttgtaagagtatccagaacgcccataacccagggaactggagtcaacttcccaattggagaaatcccaagccaaccatactatcatgacatgaactcgggggtcaatcttcagaggtctctgtcttctccaccaagcagcaaaagacccaaaactatatccatagatgaaaatatggaaccaagtcctacaggagacttttacccctctccaagttcaccagctgctggaagtcgaacatggcacgaaagagatcaagatatgtcttctccgactactatgaagaagcctgaaaagccattgttcagctctgcatctccacaggattcttccccaagactgagcactttcccccagcaccaccatcccggaatacctggagttgcacacagtgtcatctcaactcgaactccacctccaccttcaccgttgccatttccaacacaagctatccttcctccagccccatcgagctacttttctcatccaacaatcagatatcctccccacctgaatcctcaggatactctgaagaactatgtaccttcttatgacccatccagtccacaaaccagccagtcctggtacctgggctagcttggttcctttccaagtgtcaaataggacacccatcttaccggccaatgtccaaaattacggtttgaacataattggagaacctttccttcaagcagaaacaagcaactgagggaaaaagaaacacaacaatagtttaagaaattttttttttaaataaaaaaaaaggaaaagaggaagactggacaaaacaacacaaaggcagaaaggaaagaaactgaagaaagaagataatagaccagcaattgcagcacttacaatcactaattcccttaaggttgaaactgtaatgacataaaaagggtcgatgatatttcactgatggtagatcgcagcccctgcaacgtagcctttgttacatgaagtccgctgggaaatagatgttctgtctctatgacaatatattttaactgactttctagatgccttaatatttgcatgataagctagttttattggtttagtattcttgttgtttacgcatggaatcactattcctggttatctcaccaacgaaggctaggaggcggcgtcagaggtgctgggtgacagagccatgagccagccattttataagcactctgatttctaaaagttaaaaaaaatatatgaaatctctgtagcctttagttatcagtacagatttattaaatttcggcccttaacccagccttttccagtgtgtaacccagtttgaaatcttaaaaaaagaaaaaatgaaaaaaaaaggaaaaaaagaaaaaaggaaaaaaacagtttgaacacaaaggctctatggaagaaatgcctctatgtaggtgaagtgttctctctgcatgcaacagtaaaaattaatataatattttccccacaaaagaaacacttaacagaggcaagtgcaatttataaatttatatctaaaggggaatcatgattataagtccttcagcccttggactctaaattgaggggattaaaaagaatttaaaataattttgaacgaatttattttcccctcagtttttgagggcattaaaaaggcattaaatcaagacaaatcatgtgcttgagaaaaataaaattaatgaaaacacagcacttatgttggtttagctgcagcctccttggaggtagaatttatttatttaaaattactggttgcatcaagaacccatagggtgtacaaaaggttctataaaatctgcattatagagacaaagaggggaatcctgtcacaggtaagctaagttacaactggaagcggggtggttaaaaacgctttggaaaaaaagtatcgggggcactgtgggttcgattagccggtcaatttggttggcacccggtggggacattgcttcttataaaatttcacatgggaatggacctgggtaaaaacaaagt

SEQ ID NO: 313152 - DNA, 3969 bp, Homo sapiens
tcccgcgcccccctccccgccttttttgaaaaagcattttaccaccaaccaccaccccaatccaacccacaccgaaccttcgcgcaccccctacaccccaacaacaacaacaactgcaaaatagaaaacaaatccccaaacccaggcgaaaagcagccaacaccggcggcggcggcggcctcggcaagcacggccagcgcgctcggactgcaagagggttaaaagtgtagattggatttcacccctggaactctagcacgccgagtgaacttgaatctttggctatttaaggaggactgggtttgttgtgaagttgcggtgatccagcgcagagccccgtcctgattgatcgcatcgcggggctcagatgactgtaaaatgaatagatgaaattcttgcttctcgaagattttcttgggcatctcccggaaagtgcgttttaaggcgaagtcatgatgtattctcccatctgtctcactcaggatgaatttcacccattcatcgaggcacttcttccacatgtccgtgcaattgcctatacttggttcaacctgcaggctcgaaaacgcaagtactttaaaaagcatgagaagcgaatgtcaaaggatgaagaaagagcagtcaaagatgagcttctcagtgaaaagcctgaaatcaaacagaagtgggcatccaggctccttgccaaactgcgcaaagatattcgccaggagtatcgagaggactttgtgctcaccgtgactggcaagaagcacccgtgctgtgtcttatccaatcccgaccagaagggtaagattaggagaatcgactgcctgcgacaggcagacaaagtctggcgtctggatctagtcatggtgatcctgttcaaaggcatccccttggaaagtaccgatggagagcggctcatgaaatccccacattgcacaaacccagcactttgtgtccagccacatcatatcacagtatcagttaaggagcttgatttgtttttggcatactacgtgcaggagcaagattctggacaatcaggaagtccaagccacaatgatcctgccaagaatcctccaggttaccttgaggatagttttgtaaaatctggagtcttcaatgtatcagaacttgtaagagtatccagaacgcccataacccagggaactggagtcaacttcccaattggagaaatcccaagccaaccatactatcatgacatgaactcgggggtcaatcttcagaggtctctgtcttctccaccaagcagcaaaagacccaaaactatatccatagatgaaaatatggaaccaagtcctacaggagacttttacccctctccaagttcaccagctgctggaagtcgaacatggcacgaaagagatcaagatatgtcttctccgactactatgaagaagcctgaaaagccattgttcagctctgcatctccacaggattcttccccaagactgagcactttcccccagcaccaccatcccggaatacctggagttgcacacagtgtcatctcaactcgaactccacctccaccttcaccgttgccatttccaacacaagctatccttcctccagccccatcgagctacttttctcatccaacaatcagatatcctccccacctgaatcctcaggatactctgaagaactatgtaccttcttatgacccatccagtccacaaaccagccagcctaacggcagtggtcaagtagtagggaaagtgcctggccatttcactcctgtcttggcaccctctccccatcccagtgcagtgcgacctgtgaccctgagcatgacagatactaaacccatcactacatccactgaaggtgaggcagcttcacctacagcaaccacctacacagcctcaggcacatctcaagccaatcgatatgtgggactaagcccaagagacccatccttcctacatcagcaacagctgaggatttgtgactggaccatgaatcaaaacggcaggcatttataccccagtaccagtgaggatacattgggaattacttggcaaagtcctggtacctgggctagcttggttcctttccaagtgtcaaataggacacccatcttaccggccaatgtccaaaattacggtttgaacataattggagaacctttccttcaagcagaaacaagcaactgagggaaaaagaaacacaacaatagtttaagaaattttttttttaaataaaaaaaaaggaaaagaggaagactggacaaaacaacacaaaggcagaaaggaaagaaactgaagaaagaagataatagaccagcaattgcagcacttacaatcactaattcccttaaggttgaaactgtaatgacataaaaagggtcgatgatatttcactgatggtagatcgcagcccctgcaacgtagcctttgttacatgaagtccgctgggaaatagatgttctgtctctatgacaatatattttaactgactttctagatgccttaatatttgcatgataagctagttttattggtttagtattcttgttgtttacgcatggaatcactattcctggttatctcaccaacgaaggctaggaggcggcgtcagaggtgctgggtgacagagccatgagccagccattttataagcactctgatttctaaaagttaaaaaaaatatatgaaatctctgtagcctttagttatcagtacagatttattaaatttcggcccttaacccagccttttccagtgtgtaacccagtttgaaatcttaaaaaaagaaaaaatgaaaaaaaaaggaaaaaaagaaaaaaggaaaaaaacagtttgaacacaaaggctctatggaagaaatgcctctatgtaggtgaagtgttctctctgcatgcaacagtaaaaattaatataatattttccccacaaaagaaacacttaacagaggcaagtgcaatttataaatttatatctaaaggggaatcatgattataagtccttcagcccttggactctaaattgaggggattaaaaagaatttaaaataattttgaacgaatttattttcccctcagtttttgagggcattaaaaaggcattaaatcaagacaaatcatgtgcttgagaaaaataaaattaatgaaaacacagcacttatgttggtttagctgcagcctccttggaggtagaatttatttatttaaaattactggttgcatcaagaacccatagggtgtacaaaaggttctataaaatctgcattatagagacaaagaggcaggcaaatccatgtcacaagggtaaagcttacagtttacaaactgggaacgccagggtgtaggatataaaaacgcactcttgagaaaacaaatgtaatcagggtgctgaaaacttgcatggtgctttcagacattagccttgttcaacaaatttcttgtattgacagatccatagtgtgcatgggcagacacattttgcctctatgtctcttaaaattttaattaaaaatactctttccagtaatcctaatttgcacgaagatataatgtccacattacgtgccttgccttgaaatctaaaaaacaaaaaacaaaaaaaaaaaaacaaaaaaatacaacaaagtgacatcactacacttgttttgctgcatttattatcattttaaatctttaccatttttatgacaaaatattttgtactccagacgaagaaaaatgtgtgacatcatggattttttagacagttatacctttatctcacatttataaagcatatcatggctgtgtatagttgccgcttaaaaattgtaatcgaccagcaatattttcagtattttggtgtttttttctattaacctttcatgtttttcatcttccaattaatatttgggggggaggggtttcaaatttatacgaattatgcaataccaagttttgcctatgtaggtagtgcttttagctgtattggttattataggtaagtacacagattt

SEQ ID NO: 313153 - DNA, 3406 bp, Homo sapiens
tcccgcgcccccctccccgccttttttgaaaaagcattttaccaccaaccaccaccccaatccaacccacaccgaaccttcgcgcaccccctacaccccaacaacaacaacaactgcaaaatagaaaacaaatccccaaacccaggcgaaaagcagccaacaccggcggcggcggcggcctcggcaagcacggccagcgcgctcggactgcaagagggttaaaagtgtagattggatttcacccctggaactctagcacgccgagtgaacttgaatctttggctatttaaggaggactgggtttgttgtgaagttgcggtgatccagcgcagagccccgtcctgattgatcgcatcgcggggctcagatgactgtaaaatgaatagatgaaattcttgcttctcgaagattttcttgggcatctcccggaaagtgcgttttaaggcgaagtcatgatgtattctcccatctgtctcactcaggatgaatttcacccattcatcgaggcacttcttccacatgtccgtgcaattgcctatacttggttcaacctgcaggctcgaaaacgcaagtactttaaaaagcatgagaagcgaatgtcaaaggatgaagaaagagcagtcaaagatgagcttctcagtgaaaagcctgaaatcaaacagaagtgggcatccaggctccttgccaaactgcgcaaagatattcgccaggagtatcgagaggactttgtgctcaccgtgactggcaagaagcacccgtgctgtgtcttatccaatcccgaccagaaggattctggacaatcaggaagtccaagccacaatgatcctgccaagaatcctccaggttaccttgaggatagttttgtaaaatctggagtcttcaatgtatcagaacttgtaagagtatccagaacgcccataacccagggaactggagtcaacttcccaattggagaaatcccaagccaaccatactatcatgacatgaactcgggggtcaatcttcagaggtctctgtcttctccaccaagcagcaaaagacccaaaactatatccatagatgaaaatatggaaccaagtcctacaggagacttttacccctctccaagttcaccagctgctggaagtcgaacatggcacgaaagagatcaagatatgtcttctccgactactatgaagaagcctgaaaagccattgttcagctctgcatctccacaggattcttccccaagactgagcactttcccccagcaccaccatcccggaatacctggagttgcacacagtgtcatctcaactcgaactccacctccaccttcaccgttgccatttccaacacaagctatccttcctccagccccatcgagctacttttctcatccaacaatcagatatcctccccacctgaatcctcaggatactctgaagaactatgtaccttcttatgacccatccagtccacaaaccagccagtcctggtacctgggctagcttggttcctttccaagtgtcaaataggacacccatcttaccggccaatgtccaaaattacggtttgaacataattggagaacctttccttcaagcagaaacaagcaactgagggaaaaagaaacacaacaatagtttaagaaattttttttttaaataaaaaaaaaggaaaagaggaagactggacaaaacaacacaaaggcagaaaggaaagaaactgaagaaagaagataatagaccagcaattgcagcacttacaatcactaattcccttaaggttgaaactgtaatgacataaaaagggtcgatgatatttcactgatggtagatcgcagcccctgcaacgtagcctttgttacatgaagtccgctgggaaatagatgttctgtctctatgacaatatattttaactgactttctagatgccttaatatttgcatgataagctagttttattggtttagtattcttgttgtttacgcatggaatcactattcctggttatctcaccaacgaaggctaggaggcggcgtcagaggtgctgggtgacagagccatgagccagccattttataagcactctgatttctaaaagttaaaaaaaatatatgaaatctctgtagcctttagttatcagtacagatttattaaatttcggcccttaacccagccttttccagtgtgtaacccagtttgaaatcttaaaaaaagaaaaaatgaaaaaaaaaggaaaaaaagaaaaaaggaaaaaaacagtttgaacacaaaggctctatggaagaaatgcctctatgtaggtgaagtgttctctctgcatgcaacagtaaaaattaatataatattttccccacaaaagaaacacttaacagaggcaagtgcaatttataaatttatatctaaaggggaatcatgattataagtccttcagcccttggactctaaattgaggggattaaaaagaatttaaaataattttgaacgaatttattttcccctcagtttttgagggcattaaaaaggcattaaatcaagacaaatcatgtgcttgagaaaaataaaattaatgaaaacacagcacttatgttggtttagctgcagcctccttggaggtagaatttatttatttaaaattactggttgcatcaagaacccatagggtgtacaaaaggttctataaaatctgcattatagagacaaagaggcaggcaaatccatgtcacaagggtaaagcttacagtttacaaactgggaacgccagggtgtaggatataaaaacgcactcttgagaaaacaaatgtaatcagggtgctgaaaacttgcatggtgctttcagacattagccttgttcaacaaatttcttgtattgacagatccatagtgtgcatgggcagacacattttgcctctatgtctcttaaaattttaattaaaaatactctttccagtaatcctaatttgcacgaagatataatgtccacattacgtgccttgccttgaaatctaaaaaacaaaaaacaaaaaaaaaaaaacaaaaaaatacaacaaagtgacatcactacacttgttttgctgcatttattatcattttaaatctttaccatttttatgacaaaatattttgtactccagacgaagaaaaatgtgtgacatcatggattttttagacagttatacctttatctcacatttataaagcatatcatggctgtgtatagttgccgcttaaaaattgtaatcgaccagcaatattttcagtattttggtgtttttttctattaacctttcatgtttttcatcttccaattaatatttgggggggaggggtttcaaatttatacgaattatgcaataccaagttttgcctatgtaggtagtgcttttagctgtattggttattataggtaagtacacagattt

SEQ ID NO: 313154 - DNA, 3942 bp, Homo sapiens
tcccgcgcccccctccccgccttttttgaaaaagcattttaccaccaaccaccaccccaatccaacccacaccgaaccttcgcgcaccccctacaccccaacaacaacaacaactgcaaaatagaaaacaaatccccaaacccaggcgaaaagcagccaacaccggcggcggcggcggcctcggcaagcacggccagcgcgctcggactgcaagagggttaaaagtgtagattggatttcacccctggaactctagcacgccgagtgaacttgaatctttggctatttaaggaggactgggtttgttgtgaagttgcggtgatccagcgcagagccccgtcctgattgatcgcatcgcggggctcagatgactgtaaaatgaatagatgaaattcttgcttctcgaagattttcttgggcatctcccggaaagtgcgttttaaggcgaagtcatgatgtattctcccatctgtctcactcaggatgaatttcacccattcatcgaggcacttcttccacatgtccgtgcaattgcctatacttggttcaacctgcaggctcgaaaacgcaagtactttaaaaagcatgagaagcgaatgtcaaaggatgaagaaagagcagtcaaagatgagcttctcagtgaaaagcctgaaatcaaacagaagtgggcatccaggctccttgccaaactgcgcaaagatattcgccaggagtatcgagaggactttgtgctcaccgtgactggcaagaagcacccgtgctgtgtcttatccaatcccgaccagaagggtaagattaggagaatcgactgcctgcgacaggcagacaaagtctggcgtctggatctagtcatggtgatcctgttcaaaggcatccccttggaaagtaccgatggagagcggctcatgaaatccccacattgcacaaacccagcactttgtgtccagccacatcatatcacagtatcagttaaggagcttgatttgtttttggcatactacgtgcaggagcaagattctggacaatcaggaagtccaagccacaatgatcctgccaagaatcctccaggttaccttgaggatagttttgtaaaatctggagtcttcaatgtatcagaacttgtaagagtatccagaacgcccataacccagggaactggagtcaacttcccaattggagaaatcccaagccaaccatactatcatgacatgaactcgggggtcaatcttcagaggtctctgtcttctccaccaagcagcaaaagacccaaaactatatccatagatgaaaatatggaaccaagtcctacaggagacttttacccctctccaagttcaccagctgctggaagtcgaacatggcacgaaagagatcaagatatgtcttctccgactactatgaagaagcctgaaaagccattgttcagctctgcatctccacaggattcttccccaagactgagcactttcccccagcaccaccatcccggaatacctggagttgcacacagtgtcatctcaactcgaactccacctccaccttcaccgttgccatttccaacacaagctatccttcctccagccccatcgagctacttttctcatccaacaatcagatatcctccccacctgaatcctcaggatactctgaagaactatgtaccttcttatgacccatccagtccacaaaccagccagcctaacggcagtggtcaagtagtagggaaagtgcctggccatttcactcctgtcttggcaccctctccccatcccagtgcagtgcgacctgtgaccctgagcatgacagatactaaacccatcactacatccactgaagcctacacagcctcaggcacatctcaagccaatcgatatgtgggactaagcccaagagacccatccttcctacatcagcaacagctgaggatttgtgactggaccatgaatcaaaacggcaggcatttataccccagtaccagtgaggatacattgggaattacttggcaaagtcctggtacctgggctagcttggttcctttccaagtgtcaaataggacacccatcttaccggccaatgtccaaaattacggtttgaacataattggagaacctttccttcaagcagaaacaagcaactgagggaaaaagaaacacaacaatagtttaagaaattttttttttaaataaaaaaaaaggaaaagaggaagactggacaaaacaacacaaaggcagaaaggaaagaaactgaagaaagaagataatagaccagcaattgcagcacttacaatcactaattcccttaaggttgaaactgtaatgacataaaaagggtcgatgatatttcactgatggtagatcgcagcccctgcaacgtagcctttgttacatgaagtccgctgggaaatagatgttctgtctctatgacaatatattttaactgactttctagatgccttaatatttgcatgataagctagttttattggtttagtattcttgttgtttacgcatggaatcactattcctggttatctcaccaacgaaggctaggaggcggcgtcagaggtgctgggtgacagagccatgagccagccattttataagcactctgatttctaaaagttaaaaaaaatatatgaaatctctgtagcctttagttatcagtacagatttattaaatttcggcccttaacccagccttttccagtgtgtaacccagtttgaaatcttaaaaaaagaaaaaatgaaaaaaaaaggaaaaaaagaaaaaaggaaaaaaacagtttgaacacaaaggctctatggaagaaatgcctctatgtaggtgaagtgttctctctgcatgcaacagtaaaaattaatataatattttccccacaaaagaaacacttaacagaggcaagtgcaatttataaatttatatctaaaggggaatcatgattataagtccttcagcccttggactctaaattgaggggattaaaaagaatttaaaataattttgaacgaatttattttcccctcagtttttgagggcattaaaaaggcattaaatcaagacaaatcatgtgcttgagaaaaataaaattaatgaaaacacagcacttatgttggtttagctgcagcctccttggaggtagaatttatttatttaaaattactggttgcatcaagaacccatagggtgtacaaaaggttctataaaatctgcattatagagacaaagaggcaggcaaatccatgtcacaagggtaaagcttacagtttacaaactgggaacgccagggtgtaggatataaaaacgcactcttgagaaaacaaatgtaatcagggtgctgaaaacttgcatggtgctttcagacattagccttgttcaacaaatttcttgtattgacagatccatagtgtgcatgggcagacacattttgcctctatgtctcttaaaattttaattaaaaatactctttccagtaatcctaatttgcacgaagatataatgtccacattacgtgccttgccttgaaatctaaaaaacaaaaaacaaaaaaaaaaaaacaaaaaaatacaacaaagtgacatcactacacttgttttgctgcatttattatcattttaaatctttaccatttttatgacaaaatattttgtactccagacgaagaaaaatgtgtgacatcatggattttttagacagttatacctttatctcacatttataaagcatatcatggctgtgtatagttgccgcttaaaaattgtaatcgaccagcaatattttcagtattttggtgtttttttctattaacctttcatgtttttcatcttccaattaatatttgggggggaggggtttcaaatttatacgaattatgcaataccaagttttgcctatgtaggtagtgcttttagctgtattggttattataggtaagtacacagattt

SEQ ID NO: 313155 - DNA, 3720 bp, Homo sapiens
tcccgcgcccccctccccgccttttttgaaaaagcattttaccaccaaccaccaccccaatccaacccacaccgaaccttcgcgcaccccctacaccccaacaacaacaacaactgcaaaatagaaaacaaatccccaaacccaggcgaaaagcagccaacaccggcggcggcggcggcctcggcaagcacggccagcgcgctcggactgcaagagggttaaaagtgtagattggatttcacccctggaactctagcacgccgagtgaacttgaatctttggctatttaaggaggactgggtttgttgtgaagttgcggtgatccagcgcagagccccgtcctgattgatcgcatcgcggggctcagatgactgtaaaatgaatagatgaaattcttgcttctcgaagattttcttgggcatctcccggaaagtgcgttttaaggcgaagtcatgatgtattctcccatctgtctcactcaggatgaatttcacccattcatcgaggcacttcttccacatgtccgtgcaattgcctatacttggttcaacctgcaggctcgaaaacgcaagtactttaaaaagcatgagaagcgaatgtcaaaggatgaagaaagagcagtcaaagatgagcttctcagtgaaaagcctgaaatcaaacagaagtgggcatccaggctccttgccaaactgcgcaaagatattcgccaggagtatcgagaggactttgtgctcaccgtgactggcaagaagcacccgtgctgtgtcttatccaatcccgaccagaagggtaagattaggagaatcgactgcctgcgacaggcagacaaagtctggcgtctggatctagtcatggtgatcctgttcaaaggcatccccttggaaagtaccgatggagagcggctcatgaaatccccacattgcacaaacccagcactttgtgtccagccacatcatatcacagtatcagttaaggagcttgatttgtttttggcatactacgtgcaggagcaagattctggacaatcaggaagtccaagccacaatgatcctgccaagaatcctccaggttaccttgaggatagttttgtaaaatctggagtcttcaatgtatcagaacttgtaagagtatccagaacgcccataacccagggaactggagtcaacttcccaattggagaaatcccaagccaaccatactatcatgacatgaactcgggggtcaatcttcagaggtctctgtcttctccaccaagcagcaaaagacccaaaactatatccatagatgaaaatatggaaccaagtcctacaggagacttttacccctctccaagttcaccagctgctggaagtcgaacatggcacgaaagagatcaagatatgtcttctccgactactatgaagaagcctgaaaagccattgttcagctctgcatctccacaggattcttccccaagactgagcactttcccccagcaccaccatcccggaatacctggagttgcacacagtgtcatctcaactcgaactccacctccaccttcaccgttgccatttccaacacaagctatccttcctccagccccatcgagctacttttctcatccaacaatcagatatcctccccacctgaatcctcaggatactctgaagaactatgtaccttcttatgacccatccagtccacaaaccagccagctgaggatttgtgactggaccatgaatcaaaacggcaggcatttataccccagtaccagtgaggatacattgggaattacttggcaaagtcctggtacctgggctagcttggttcctttccaagtgtcaaataggacacccatcttaccggccaatgtccaaaattacggtttgaacataattggagaacctttccttcaagcagaaacaagcaactgagggaaaaagaaacacaacaatagtttaagaaattttttttttaaataaaaaaaaaggaaaagaggaagactggacaaaacaacacaaaggcagaaaggaaagaaactgaagaaagaagataatagaccagcaattgcagcacttacaatcactaattcccttaaggttgaaactgtaatgacataaaaagggtcgatgatatttcactgatggtagatcgcagcccctgcaacgtagcctttgttacatgaagtccgctgggaaatagatgttctgtctctatgacaatatattttaactgactttctagatgccttaatatttgcatgataagctagttttattggtttagtattcttgttgtttacgcatggaatcactattcctggttatctcaccaacgaaggctaggaggcggcgtcagaggtgctgggtgacagagccatgagccagccattttataagcactctgatttctaaaagttaaaaaaaatatatgaaatctctgtagcctttagttatcagtacagatttattaaatttcggcccttaacccagccttttccagtgtgtaacccagtttgaaatcttaaaaaaagaaaaaatgaaaaaaaaaggaaaaaaagaaaaaaggaaaaaaacagtttgaacacaaaggctctatggaagaaatgcctctatgtaggtgaagtgttctctctgcatgcaacagtaaaaattaatataatattttccccacaaaagaaacacttaacagaggcaagtgcaatttataaatttatatctaaaggggaatcatgattataagtccttcagcccttggactctaaattgaggggattaaaaagaatttaaaataattttgaacgaatttattttcccctcagtttttgagggcattaaaaaggcattaaatcaagacaaatcatgtgcttgagaaaaataaaattaatgaaaacacagcacttatgttggtttagctgcagcctccttggaggtagaatttatttatttaaaattactggttgcatcaagaacccatagggtgtacaaaaggttctataaaatctgcattatagagacaaagaggcaggcaaatccatgtcacaagggtaaagcttacagtttacaaactgggaacgccagggtgtaggatataaaaacgcactcttgagaaaacaaatgtaatcagggtgctgaaaacttgcatggtgctttcagacattagccttgttcaacaaatttcttgtattgacagatccatagtgtgcatgggcagacacattttgcctctatgtctcttaaaattttaattaaaaatactctttccagtaatcctaatttgcacgaagatataatgtccacattacgtgccttgccttgaaatctaaaaaacaaaaaacaaaaaaaaaaaaacaaaaaaatacaacaaagtgacatcactacacttgttttgctgcatttattatcattttaaatctttaccatttttatgacaaaatattttgtactccagacgaagaaaaatgtgtgacatcatggattttttagacagttatacctttatctcacatttataaagcatatcatggctgtgtatagttgccgcttaaaaattgtaatcgaccagcaatattttcagtattttggtgtttttttctattaacctttcatgtttttcatcttccaattaatatttgggggggaggggtttcaaatttatacgaattatgcaataccaagttttgcctatgtaggtagtgcttttagctgtattggttattataggtaagtacacagattt

SEQ ID NO: 313156 - DNA, 2751 bp, Homo sapiens
atgaacagcacactgaggaggacacaaaagaagtagacagaatctctgcctctgcttaggagtatgcaatttagttggggcgacaaaacttaaatgctagaaccaataaaagaagattacaaagcaactcgcaaattctggacaatcaggaagtccaagccacaatgatcctgccaagaatcctccaggttaccttgaggatagttttgtaaaatctggagtcttcaatgtatcagaacttgtaagagtatccagaacgcccataacccagggaactggagtcaacttcccaattggagaaatcccaagccaaccatactatcatgacatgaactcgggggtcaatcttcagaggtctctgtcttctccaccaagcagcaaaagacccaaaactatatccatagatgaaaatatggaaccaagtcctacaggagacttttacccctctccaagttcaccagctgctggaagtcgaacatggcacgaaagagatcaagatatgtcttctccgactactatgaagaagcctgaaaagccattgttcagctctgcatctccacaggattcttccccaagactgagcactttcccccagcaccaccatcccggaatacctggagttgcacacagtgtcatctcaactcgaactccacctccaccttcaccgttgccatttccaacacaagctatccttcctccagccccatcgagctacttttctcatccaacaatcagatatcctccccacctgaatcctcaggatactctgaagaactatgtaccttcttatgacccatccagtccacaaaccagccagtcctggtacctgggctagcttggttcctttccaagtgtcaaataggacacccatcttaccggccaatgtccaaaattacggtttgaacataattggagaacctttccttcaagcagaaacaagcaactgagggaaaaagaaacacaacaatagtttaagaaattttttttttaaataaaaaaaaaggaaaagaggaagactggacaaaacaacacaaaggcagaaaggaaagaaactgaagaaagaagataatagaccagcaattgcagcacttacaatcactaattcccttaaggttgaaactgtaatgacataaaaagggtcgatgatatttcactgatggtagatcgcagcccctgcaacgtagcctttgttacatgaagtccgctgggaaatagatgttctgtctctatgacaatatattttaactgactttctagatgccttaatatttgcatgataagctagttttattggtttagtattcttgttgtttacgcatggaatcactattcctggttatctcaccaacgaaggctaggaggcggcgtcagaggtgctgggtgacagagccatgagccagccattttataagcactctgatttctaaaagttaaaaaaaatatatgaaatctctgtagcctttagttatcagtacagatttattaaatttcggcccttaacccagccttttccagtgtgtaacccagtttgaaatcttaaaaaaagaaaaaatgaaaaaaaaaggaaaaaaagaaaaaaggaaaaaaacagtttgaacacaaaggctctatggaagaaatgcctctatgtaggtgaagtgttctctctgcatgcaacagtaaaaattaatataatattttccccacaaaagaaacacttaacagaggcaagtgcaatttataaatttatatctaaaggggaatcatgattataagtccttcagcccttggactctaaattgaggggattaaaaagaatttaaaataattttgaacgaatttattttcccctcagtttttgagggcattaaaaaggcattaaatcaagacaaatcatgtgcttgagaaaaataaaattaatgaaaacacagcacttatgttggtttagctgcagcctccttggaggtagaatttatttatttaaaattactggttgcatcaagaacccatagggtgtacaaaaggttctataaaatctgcattatagagacaaagaggcaggcaaatccatgtcacaagggtaaagcttacagtttacaaactgggaacgccagggtgtaggatataaaaacgcactcttgagaaaacaaatgtaatcagggtgctgaaaacttgcatggtgctttcagacattagccttgttcaacaaatttcttgtattgacagatccatagtgtgcatgggcagacacattttgcctctatgtctcttaaaattttaattaaaaatactctttccagtaatcctaatttgcacgaagatataatgtccacattacgtgccttgccttgaaatctaaaaaacaaaaaacaaaaaaaaaaaaacaaaaaaatacaacaaagtgacatcactacacttgttttgctgcatttattatcattttaaatctttaccatttttatgacaaaatattttgtactccagacgaagaaaaatgtgtgacatcatggattttttagacagttatacctttatctcacatttataaagcatatcatggctgtgtatagttgccgcttaaaaattgtaatcgaccagcaatattttcagtattttggtgtttttttctattaacctttcatgtttttcatcttccaattaatatttgggggggaggggtttcaaatttatacgaattatgcaataccaagttttgcctatgtaggtagtgcttttagctgtattggttattataggtaagtacacagattt

SEQ ID NO: 313157 - DNA, 2205 bp, Homo sapiens
ggttagaattcaataattgtttatatatcttactctggatttttctgcctcactttagtcttaattttcatttaaaaaatagactatagagtttagataggtgtaacatgtataatttggcacatttatctcatattagactgtaattttgaaaatagggatagcaataatttgatgcatctggaatttatatttctcatattgttgtagattttaacattgtatttttttcttttttcttccctccctgctgcctctctcctctcaacagtcctggtacctgggctagcttggttcctttccaagtgtcaaataggacacccatcttaccggccaatgtccaaaattacggtttgaacataattggagaacctttccttcaagcagaaacaagcaactgagggaaaaagaaacacaacaatagtttaagaaattttttttttaaataaaaaaaaaggaaaagaggaagactggacaaaacaacacaaaggcagaaaggaaagaaactgaagaaagaagataatagaccagcaattgcagcacttacaatcactaattcccttaaggttgaaactgtaatgacataaaaagggtcgatgatatttcactgatggtagatcgcagcccctgcaacgtagcctttgttacatgaagtccgctgggaaatagatgttctgtctctatgacaatatattttaactgactttctagatgccttaatatttgcatgataagctagttttattggtttagtattcttgttgtttacgcatggaatcactattcctggttatctcaccaacgaaggctaggaggcggcgtcagaggtgctgggtgacagagccatgagccagccattttataagcactctgatttctaaaagttaaaaaaaatatatgaaatctctgtagcctttagttatcagtacagatttattaaatttcggcccttaacccagccttttccagtgtgtaacccagtttgaaatcttaaaaaaagaaaaaatgaaaaaaaaaggaaaaaaagaaaaaaggaaaaaaacagtttgaacacaaaggctctatggaagaaatgcctctatgtaggtgaagtgttctctctgcatgcaacagtaaaaattaatataatattttccccacaaaagaaacacttaacagaggcaagtgcaatttataaatttatatctaaaggggaatcatgattataagtccttcagcccttggactctaaattgaggggattaaaaagaatttaaaataattttgaacgaatttattttcccctcagtttttgagggcattaaaaaggcattaaatcaagacaaatcatgtgcttgagaaaaataaaattaatgaaaacacagcacttatgttggtttagctgcagcctccttggaggtagaatttatttatttaaaattactggttgcatcaagaacccatagggtgtacaaaaggttctataaaatctgcattatagagacaaagaggcaggcaaatccatgtcacaagggtaaagcttacagtttacaaactgggaacgccagggtgtaggatataaaaacgcactcttgagaaaacaaatgtaatcagggtgctgaaaacttgcatggtgctttcagacattagccttgttcaacaaatttcttgtattgacagatccatagtgtgcatgggcagacacattttgcctctatgtctcttaaaattttaattaaaaatactctttccagtaatcctaatttgcacgaagatataatgtccacattacgtgccttgccttgaaatctaaaaaacaaaaaacaaaaaaaaaaaaacaaaaaaatacaacaaagtgacatcactacacttgttttgctgcatttattatcattttaaatctttaccatttttatgacaaaatattttgtactccagacgaagaaaaatgtgtgacatcatggattttttagacagttatacctttatctcacatttataaagcatatcatggctgtgtatagttgccgcttaaaaattgtaatcgaccagcaatattttcagtattttggtgtttttttctattaacctttcatgtttttcatcttccaattaatatttgggggggaggggtttcaaatttatacgaattatgcaataccaagttttgcctatgtaggtagtgcttttagctgtattggttattataggtaagtacacagattt

SEQ ID NO: 313158 - DNA, 2142 bp, Homo sapiens
tgcctcttgggaaagtaaggttaatgccatgtacagtactagtttgcatgtgttcatttaaatactaaaaactgtagtactgctcgatccatatctgactgctaggtttcaattgacagctgaggatttgtgactggaccatgaatcaaaacggcaggcatttataccccagtaccagtgaggatacattgggaattacttggcaaagtcctggtacctgggctagcttggttcctttccaagtgtcaaataggacacccatcttaccggccaatgtccaaaattacggtttgaacataattggagaacctttccttcaagcagaaacaagcaactgagggaaaaagaaacacaacaatagtttaagaaattttttttttaaataaaaaaaaaggaaaagaggaagactggacaaaacaacacaaaggcagaaaggaaagaaactgaagaaagaagataatagaccagcaattgcagcacttacaatcactaattcccttaaggttgaaactgtaatgacataaaaagggtcgatgatatttcactgatggtagatcgcagcccctgcaacgtagcctttgttacatgaagtccgctgggaaatagatgttctgtctctatgacaatatattttaactgactttctagatgccttaatatttgcatgataagctagttttattggtttagtattcttgttgtttacgcatggaatcactattcctggttatctcaccaacgaaggctaggaggcggcgtcagaggtgctgggtgacagagccatgagccagccattttataagcactctgatttctaaaagttaaaaaaaatatatgaaatctctgtagcctttagttatcagtacagatttattaaatttcggcccttaacccagccttttccagtgtgtaacccagtttgaaatcttaaaaaaagaaaaaatgaaaaaaaaaggaaaaaaagaaaaaaggaaaaaaacagtttgaacacaaaggctctatggaagaaatgcctctatgtaggtgaagtgttctctctgcatgcaacagtaaaaattaatataatattttccccacaaaagaaacacttaacagaggcaagtgcaatttataaatttatatctaaaggggaatcatgattataagtccttcagcccttggactctaaattgaggggattaaaaagaatttaaaataattttgaacgaatttattttcccctcagtttttgagggcattaaaaaggcattaaatcaagacaaatcatgtgcttgagaaaaataaaattaatgaaaacacagcacttatgttggtttagctgcagcctccttggaggtagaatttatttatttaaaattactggttgcatcaagaacccatagggtgtacaaaaggttctataaaatctgcattatagagacaaagaggcaggcaaatccatgtcacaagggtaaagcttacagtttacaaactgggaacgccagggtgtaggatataaaaacgcactcttgagaaaacaaatgtaatcagggtgctgaaaacttgcatggtgctttcagacattagccttgttcaacaaatttcttgtattgacagatccatagtgtgcatgggcagacacattttgcctctatgtctcttaaaattttaattaaaaatactctttccagtaatcctaatttgcacgaagatataatgtccacattacgtgccttgccttgaaatctaaaaaacaaaaaacaaaaaaaaaaaaacaaaaaaatacaacaaagtgacatcactacacttgttttgctgcatttattatcattttaaatctttaccatttttatgacaaaatattttgtactccagacgaagaaaaatgtgtgacatcatggattttttagacagttatacctttatctcacatttataaagcatatcatggctgtgtatagttgccgcttaaaaattgtaatcgaccagcaatattttcagtattttggtgtttttttctattaacctttcatgtttttcatcttccaattaatatttgggggggaggggtttcaaatttatacgaattatgcaataccaagttttgcctatgtaggtagtgcttttagctgtattggttattataggtaagtacacagattt

SEQ ID NO: 313159 - DNA, 1876 bp, Homo sapiens
agctcgcccagcttaatctgctcttatcacttatcgtaaaaatgtactggaggtcctattcagtgcaactgagggaaaaagaaacacaacaatagtttaagaaattttttttttaaataaaaaaaaaggaaaagaggaagactggacaaaacaacacaaaggcagaaaggaaagaaactgaagaaagaagataatagaccagcaattgcagcacttacaatcactaattcccttaaggttgaaactgtaatgacataaaaagggtcgatgatatttcactgatggtagatcgcagcccctgcaacgtagcctttgttacatgaagtccgctgggaaatagatgttctgtctctatgacaatatattttaactgactttctagatgccttaatatttgcatgataagctagttttattggtttagtattcttgttgtttacgcatggaatcactattcctggttatctcaccaacgaaggctaggaggcggcgtcagaggtgctgggtgacagagccatgagccagccattttataagcactctgatttctaaaagttaaaaaaaatatatgaaatctctgtagcctttagttatcagtacagatttattaaatttcggcccttaacccagccttttccagtgtgtaacccagtttgaaatcttaaaaaaagaaaaaatgaaaaaaaaaggaaaaaaagaaaaaaggaaaaaaacagtttgaacacaaaggctctatggaagaaatgcctctatgtaggtgaagtgttctctctgcatgcaacagtaaaaattaatataatattttccccacaaaagaaacacttaacagaggcaagtgcaatttataaatttatatctaaaggggaatcatgattataagtccttcagcccttggactctaaattgaggggattaaaaagaatttaaaataattttgaacgaatttattttcccctcagtttttgagggcattaaaaaggcattaaatcaagacaaatcatgtgcttgagaaaaataaaattaatgaaaacacagcacttatgttggtttagctgcagcctccttggaggtagaatttatttatttaaaattactggttgcatcaagaacccatagggtgtacaaaaggttctataaaatctgcattatagagacaaagaggcaggcaaatccatgtcacaagggtaaagcttacagtttacaaactgggaacgccagggtgtaggatataaaaacgcactcttgagaaaacaaatgtaatcagggtgctgaaaacttgcatggtgctttcagacattagccttgttcaacaaatttcttgtattgacagatccatagtgtgcatgggcagacacattttgcctctatgtctcttaaaattttaattaaaaatactctttccagtaatcctaatttgcacgaagatataatgtccacattacgtgccttgccttgaaatctaaaaaacaaaaaacaaaaaaaaaaaaacaaaaaaatacaacaaagtgacatcactacacttgttttgctgcatttattatcattttaaatctttaccatttttatgacaaaatattttgtactccagacgaagaaaaatgtgtgacatcatggattttttagacagttatacctttatctcacatttataaagcatatcatggctgtgtatagttgccgcttaaaaattgtaatcgaccagcaatattttcagtattttggtgtttttttctattaacctttcatgtttttcatcttccaattaatatttgggggggaggggtttcaaatttatacgaattatgcaataccaagttttgcctatgtaggtagtgcttttagctgtattggttattataggtaagtacacagattt

SEQ ID NO: 313160 - DNA, 1821 bp, Homo sapiens
tgtcggctcttcctatcattgtgattgcagaattcaccaagcgtttgatgaagggtttgatgagtcatcaaaccctaagaggaagactggacaaaacaacacaaaggcagaaaggaaagaaactgaagaaagaagataatagaccagcaattgcagcacttacaatcactaattcccttaaggttgaaactgtaatgacataaaaagggtcgatgatatttcactgatggtagatcgcagcccctgcaacgtagcctttgttacatgaagtccgctgggaaatagatgttctgtctctatgacaatatattttaactgactttctagatgccttaatatttgcatgataagctagttttattggtttagtattcttgttgtttacgcatggaatcactattcctggttatctcaccaacgaaggctaggaggcggcgtcagaggtgctgggtgacagagccatgagccagccattttataagcactctgatttctaaaagttaaaaaaaatatatgaaatctctgtagcctttagttatcagtacagatttattaaatttcggcccttaacccagccttttccagtgtgtaacccagtttgaaatcttaaaaaaagaaaaaatgaaaaaaaaaggaaaaaaagaaaaaaggaaaaaaacagtttgaacacaaaggctctatggaagaaatgcctctatgtaggtgaagtgttctctctgcatgcaacagtaaaaattaatataatattttccccacaaaagaaacacttaacagaggcaagtgcaatttataaatttatatctaaaggggaatcatgattataagtccttcagcccttggactctaaattgaggggattaaaaagaatttaaaataattttgaacgaatttattttcccctcagtttttgagggcattaaaaaggcattaaatcaagacaaatcatgtgcttgagaaaaataaaattaatgaaaacacagcacttatgttggtttagctgcagcctccttggaggtagaatttatttatttaaaattactggttgcatcaagaacccatagggtgtacaaaaggttctataaaatctgcattatagagacaaagaggcaggcaaatccatgtcacaagggtaaagcttacagtttacaaactgggaacgccagggtgtaggatataaaaacgcactcttgagaaaacaaatgtaatcagggtgctgaaaacttgcatggtgctttcagacattagccttgttcaacaaatttcttgtattgacagatccatagtgtgcatgggcagacacattttgcctctatgtctcttaaaattttaattaaaaatactctttccagtaatcctaatttgcacgaagatataatgtccacattacgtgccttgccttgaaatctaaaaaacaaaaaacaaaaaaaaaaaaacaaaaaaatacaacaaagtgacatcactacacttgttttgctgcatttattatcattttaaatctttaccatttttatgacaaaatattttgtactccagacgaagaaaaatgtgtgacatcatggattttttagacagttatacctttatctcacatttataaagcatatcatggctgtgtatagttgccgcttaaaaattgtaatcgaccagcaatattttcagtattttggtgtttttttctattaacctttcatgtttttcatcttccaattaatatttgggggggaggggtttcaaatttatacgaattatgcaataccaagttttgcctatgtaggtagtgcttttagctgtattggttattataggtaagtacacagattt

SEQ ID NO: 313161 - DNA, 2275 bp, Homo sapiens
tcccgcgcccccctccccgccttttttgaaaaagcattttaccaccaaccaccaccccaatccaacccacaccgaaccttcgcgcaccccctacaccccaacaacaacaacaactgcaaaatagaaaacaaatccccaaacccaggcgaaaagcagccaacaccggcggcggcggcggcctcggcaagcacggccagcgcgctcggactgcaagagggttaaaagtgtagattggatttcacccctggaactctagcacgccgagtgaacttgaatctttggctatttaaggaggactgggtttgttgtgaagttgcggtgatccagcgcagagccccgtcctgattgatcgcatcgcggggctcagatgactgtaaaatgaatagatgaaattcttgcttctcgaagattttcttgggcatctcccggaaagtgcgttttaaggcgaagtcatgatgtattctcccatctgtctcactcaggatgaatttcacccattcatcgaggcacttcttccacatgtccgtgcaattgcctatacttggttcaacctgcaggctcgaaaacgcaagtactttaaaaagcatgagaagcgaatgtcaaaggatgaagaaagagcagtcaaagatgagcttctcagtgaaaagcctgaaatcaaacagaagtgggcatccaggctccttgccaaactgcgcaaagatattcgccaggagtatcgagaggactttgtgctcaccgtgactggcaagaagcacccgtgctgtgtcttatccaatcccgaccagaagggtaagattaggagaatcgactgcctgcgacaggcagacaaagtctggcgtctggatctagtcatggtgatcctgttcaaaggcatccccttggaaagtaccgatggagagcggctcatgaaatccccacattgcacaaacccagcactttgtgtccagccacatcatatcacagtatcagttaaggagcttgatttgtttttggcatactacgtgcaggagcaagattctggacaatcaggaagtccaagccacaatgatcctgccaagaatcctccaggttaccttgaggatagttttgtaaaatctggagtcttcaatgtatcagaacttgtaagagtatccagaacgcccataacccagggaactggagtcaacttcccaattggagaaatcccaagccaaccatactatcatgacatgaactcgggggtcaatcttcagaggtctctgtcttctccaccaagcagcaaaagacccaaaactatatccatagatgaaaatatggaaccaagtcctacaggagacttttacccctctccaagttcaccagctgctggaagtcgaacatggcacgaaagagatcaagatatgtcttctccgactactatgaagaagcctgaaaagccattgttcagctctgcatctccacaggattcttccccaagactgagcactttcccccagcaccaccatcccggaatacctggagttgcacacagtgtcatctcaactcgaactccacctccaccttcaccgttgccatttccaacacaagctatccttcctccagccccatcgagctacttttctcatccaacaatcagatatcctccccacctgaatcctcaggatactctgaagaactatgtaccttcttatgacccatccagtccacaaaccagccagtcctggtacctgggctagcttggttcctttccaagtgtcaaataggacacccatcttaccggccaatgtccaaaattacggtttgaacataattggagaacctttccttcaagcagaaacaagcaactgagggaaaaagaaacacaacaatagtttaagaaattttttttttaaataaaaaaaaaggaaaagaggaagactggacaaaacaacacaaaggcagaaaggaaagaaactgaagaaagaagataatagaccagcagcaaaagacccaaaactatatccatagatgaaaatatggaaccaagtcctacaggagacttttacccctctccaagttcaccagctgctggaagtcgaacatggcacgaaagagatcaagatatgtcttctccgactactatgaagaagcctgaaaagccattgttcagctctgcatctccacaggattcttccccaagactgagcactttcccccagcaccaccatcccggaatacctggagttgcacacagtgtcatctcaactcaaactccacctccaccttcaccgttgccatttccaaccaagcaacccct

SEQ ID NO: 313162 - DNA, 1655 bp, Homo sapiens
tcccgcgcccccctccccgccttttttgaaaaagcattttaccaccaaccaccaccccaatccaacccacaccgaaccttcgcgcaccccctacaccccaacaacaacaacaactgcaaaatagaaaacaaatccccaaacccaggcgaaaagcagccaacaccggcggcggcggcggcctcggcaagcacggccagcgcgctcggactgcaagagggttaaaagtgtagattggatttcacccctggaactctagcacgccgagtgaacttgaatctttggctatttaaggaggactgggtttgttgtgaagttgcggtgatccagcgcagagccccgtcctgattgatcgcatcgcggggctcagatgactgtaaaatgaatagatgaaattcttgcttctcgaagattttcttgggcatctcccggaaagtgcgttttaaggcgaagtcatgatgtattctcccatctgtctcactcaggatgaatttcacccattcatcgaggcacttcttccacatgtccgtgcaattgcctatacttggttcaacctgcaggctcgaaaacgcaagtactttaaaaagcatgagaagcgaatgtcaaaggatgaagaaagagcagtcaaagatgagcttctcagtgaaaagcctgaaatcaaacagaagtgggcatccaggctccttgccaaactgcgcaaagatattcgccaggagtatcgagaggactttgtgctcaccgtgactggcaagaagcacccgtgctgtgtcttatccaatcccgaccagaagggtaagattaggagaatcgactgcctgcgacaggcagacaaagtctggcgtctggatctagtcatggtgatcctgttcaaaggcatccccttggaaagtaccgatggagagcggctcatgaaatccccacattgcacaaacccagcactttgtgtccagccacatcatatcacagtatcagttaaggagcttgatttgtttttggcatactacgtgcaggagcaagattctggacaatcaggaagtccaagccacaatgatcctgccaagaatcctccaggttaccttgaggatagttttgtaaaatctggagtcttcaatgtatcagaacttgtaagagtatccagaacgcccataacccagggaactggagtcaacttcccaattggagaaatcccaagccaaccatactatcatgacatgaactcgggggtcaatcttcagaggtctctgtcttctccaccaagcagcaaaagacccaaaactatatccatagatgaaaatatggaaccaagtcctacaggagacttttacccctctccaagttcaccagctgctggaagtcgaacatggcacgaaagagatcaagatatgtcttctccgactactatgaagaagcctgaaaagccattgttcagctctgcatctccacaggattcttccccaagactgagcactttcccccagcaccaccatcccggaatacctggagttgcacacagtgtcatctcaactcgaactccacctccaccttcaccgttgccatttccaacacaagctatccttcctccagcccctggcaaccattcatcacttctccatttctaaaattgtcatttaaaaatgttatataaggagtttccatct

SEQ ID NO: 313163 - DNA, 1273 bp, Homo sapiens
  misc_feature (1056)..(1056): n is a, c, g, or t
  misc_feature (1125)..(1125): n is a, c, g, or t
tcccgcgcccccctccccgccttttttgaaaaagcattttaccaccaaccaccaccccaatccaacccacaccgaaccttcgcgcaccccctacaccccaacaacaacaacaactgcaaaatagaaaacaaatccccaaacccaggcgaaaagcagccaacaccggcggcggcggcggcctcggcaagcacggccagcgcgctcggactgcaagagggttaaaagtgtagattggatttcacccctggaactctagcacgccgagtgaacttgaatctttggctatttaaggaggactgggtttgttgtgaagttgcggtgatccagcgcagagccccgtcctgattgatcgcatcgcggggctcagatgactgtaaaatgaatagatgaaattcttgcttctcgaagattttcttgggcatctcccggaaagtgcgttttaaggcgaagtcatgatgtattctcccatctgtctcactcaggatgaatttcacccattcatcgaggcacttcttccacatgtccgtgcaattgcctatacttggttcaacctgcaggctcgaaaacgcaagtactttaaaaagcatgagaagcgaatgtcaaaggatgaagaaagagcagtcaaagatgagcttctcagtgaaaagcctgaaatcaaacagaagtgggcatccaggctccttgccaaactgcgcaaagatattcgccaggagtatcgagaggactttgtgctcaccgtgactggcaagaagcacccgtgctgtgtcttatccaatcccgaccagaagggtaagattaggagaatcgactgcctgcgacaggcagacaaagtctggcgtctggatctagtcatggtgatcctgttcaaaggcatccccttggaaagtaccgatggagagcggctcatgaaatccccacattgcacaaacccagcactttgtgtccagccacatcatatcacagtatcagttaaggagcttgatttgtttttggcatactacgtgcaggagcaaggtaagaatttcttttcttcaaataaatgcatcaagatatagntgtccttgcattaccaacaatccatagtaaaacaatcattttacaaagccgcataccaaaagtagactnaagtttgagctgtcacagatggtaggtcatttccaaacttggcctggtgggaggaaaaatggcctgcagatagccaggtgacagactgttacctgaggtttgttatataaatgtgggacttaataaactgctatgagctttattattc

SEQ ID NO: 313164 - DNA, 3631 bp, Homo sapiens
tcccgcgcccccctccccgccttttttgaaaaagcattttaccaccaaccaccaccccaatccaacccacaccgaaccttcgcgcaccccctacaccccaacaacaacaacaactgcaaaatagaaaacaaatccccaaacccaggcgaaaagcagccaacaccggcggcggcggcggcctcggcaagcacggccagcgcgctcggactgcaagagggttaaaagtgtagattggatttcacccctggaactctagcacgccgagtgaacttgaatctttggctatttaaggaggactgggtttgttgtgaagttgcggtgatccagcgcagagccccgtcctgattgatcgcatcgcggggctcagatgactgtaaaatgaatagatgaaattcttgcttctcgaagattttcttgggcatctcccggaaagtgcgttttaaggcgaagtcatgatgtattctcccatctgtctcactcaggatgaatttcacccattcatcgaggcacttcttccacatgtccgtgcaattgcctatacttggttcaacctgcaggctcgaaaacgcaagtactttaaaaagcatgagaagcgaatgtcaaaggatgaagaaagagcagtcaaagatgagcttctcagtgaaaagcctgaaatcaaacagaagtgggcatccaggctccttgccaaactgcgcaaagatattcgccaggagtatcgagaggactttgtgctcaccgtgactggcaagaagcacccgtgctgtgtcttatccaatcccgaccagaagggtaagattaggagaatcgactgcctgcgacaggcagacaaagtctggcgtctggatctagtcatggtgatcctgttcaaaggcatccccttggaaagtaccgatggagagcggctcatgaaatccccacattgcacaaacccagcactttgtgtccagccacatcatatcacagtatcagttaaggagcttgatttgtttttggcatactacgtgcaggagcaagattctggacaatcaggaagtccaagccacaatgatcctgccaagaatcctccaggttaccttgaggatagttttgtaaaatctggagtcttcaatgtatcagaacttgtaagagtatccagaacgcccataacccagggaactggagtcaacttcccaattggagaaatcccaagccaaccatactatcatgacatgaactcgggggtcaatcttcagaggtctctgtcttctccaccaagcagcaaaagacccaaaactatatccatagatgaaaatatggaaccaagtcctacaggagacttttacccctctccaagttcaccagctgctggaagtcgaacatggcacgaaagagatcaagatatgtcttctccgactactatgaagaagcctgaaaagccattgttcagctctgcatctccacaggattcttccccaagactgagcactttcccccagcaccaccatcccggaatacctggagttgcacacagtgtcatctcaactcgaactccacctccaccttcaccgttgccatttccaacacaagctatccttcctccagccccatcgagctacttttctcatccaacaatcagatatcctccccacctgaatcctcaggatactctgaagaactatgtaccttcttatgacccatccagtccacaaaccagccagtcctggtacctgggctagcttggttcctttccaagtgtcaaataggacacccatcttaccggccaatgtccaaaattacggtttgaacataattggagaacctttccttcaagcagaaacaagcaactgagggaaaaagaaacacaacaatagtttaagaaattttttttttaaataaaaaaaaaggaaaagaggaagactggacaaaacaacacaaaggcagaaaggaaagaaactgaagaaagaagataatagaccagcaattgcagcacttacaatcactaattcccttaaggttgaaactgtaatgacataaaaagggtcgatgatatttcactgatggtagatcgcagcccctgcaacgtagcctttgttacatgaagtccgctgggaaatagatgttctgtctctatgacaatatattttaactgactttctagatgccttaatatttgcatgataagctagttttattggtttagtattcttgttgtttacgcatggaatcactattcctggttatctcaccaacgaaggctaggaggcggcgtcagaggtgctgggtgacagagccatgagccagccattttataagcactctgatttctaaaagttaaaaaaaatatatgaaatctctgtagcctttagttatcagtacagatttattaaatttcggcccttaacccagccttttccagtgtgtaacccagtttgaaatcttaaaaaaagaaaaaatgaaaaaaaaaggaaaaaaagaaaaaaggaaaaaaacagtttgaacacaaaggctctatggaagaaatgcctctatgtaggtgaagtgttctctctgcatgcaacagtaaaaattaatataatattttccccacaaaagaaacacttaacagaggcaagtgcaatttataaatttatatctaaaggggaatcatgattataagtccttcagcccttggactctaaattgaggggattaaaaagaatttaaaataattttgaacgaatttattttcccctcagtttttgagggcattaaaaaggcattaaatcaagacaaatcatgtgcttgagaaaaataaaattaatgaaaacacagcacttatgttggtttagctgcagcctccttggaggtagaatttatttatttaaaattactggttgcatcaagaacccatagggtgtacaaaaggttctataaaatctgcattatagagacaaagaggcaggcaaatccatgtcacaagggtaaagcttacagtttacaaactgggaacgccagggtgtaggatataaaaacgcactcttgagaaaacaaatgtaatcagggtgctgaaaacttgcatggtgctttcagacattagccttgttcaacaaatttcttgtattgacagatccatagtgtgcatgggcagacacattttgcctctatgtctcttaaaattttaattaaaaatactctttccagtaatcctaatttgcacgaagatataatgtccacattacgtgccttgccttgaaatctaaaaaacaaaaaacaaaaaaaaaaaaacaaaaaaatacaacaaagtgacatcactacacttgttttgctgcatttattatcattttaaatctttaccatttttatgacaaaatattttgtactccagacgaagaaaaatgtgtgacatcatggattttttagacagttatacctttatctcacatttataaagcatatcatggctgtgtatagttgccgcttaaaaattgtaatcgaccagcaatattttcagtattttggtgtttttttctattaacctttcatgtttttcatcttccaattaatatttgggggggaggggtttcaaatttatacgaattatgcaataccaagttttgcctatgtaggtagtgcttttagctgtattggttattataggtaagtacacagattt

SEQ ID NO: 313165 - DNA, 3400 bp, Homo sapiens
cttgtctttctatctgtgaggttgcagttcctcctgctaataaaggagctttctcccatgatgcagtgtgataaggattggcctacatgtagtccagcaagccaccgctgatgttttcttgattaggtgtcttatcttccattgagctgcatctgatgaaggttgctgacagcataatggctgggaaaacgtcggacagctccataaaatggcagctatgttatgacatgtcagccaggacctggtggatggatgaatttcacccattcatcgaggcacttcttccacatgtccgtgcaattgcctatacttggttcaacctgcaggctcgaaaacgcaagtactttaaaaagcatgagaagcgaatgtcaaaggatgaagaaagagcagtcaaagatgagcttctcagtgaaaagcctgaaatcaaacagaagtgggcatccaggctccttgccaaactgcgcaaagatattcgccaggagtatcgagaggactttgtgctcaccgtgactggcaagaagcacccgtgctgtgtcttatccaatcccgaccagaagggtaagattaggagaatcgactgcctgcgacaggcagacaaagtctggcgtctggatctagtcatggtgatcctgttcaaaggcatccccttggaaagtaccgatggagagcggctcatgaaatccccacattgcacaaacccagcactttgtgtccagccacatcatatcacagtatcagttaaggagcttgatttgtttttggcatactacgtgcaggagcaagattctggacaatcaggaagtccaagccacaatgatcctgccaagaatcctccaggttaccttgaggatagttttgtaaaatctggagtcttcaatgtatcagaacttgtaagagtatccagaacgcccataacccagggaactggagtcaacttcccaattggagaaatcccaagccaaccatactatcatgacatgaactcgggggtcaatcttcagaggtctctgtcttctccaccaagcagcaaaagacccaaaactatatccatagatgaaaatatggaaccaagtcctacaggagacttttacccctctccaagttcaccagctgctggaagtcgaacatggcacgaaagagatcaagatatgtcttctccgactactatgaagaagcctgaaaagccattgttcagctctgcatctccacaggattcttccccaagactgagcactttcccccagcaccaccatcccggaatacctggagttgcacacagtgtcatctcaactcgaactccacctccaccttcaccgttgccatttccaacacaagctatccttcctccagccccatcgagctacttttctcatccaacaatcagatatcctccccacctgaatcctcaggatactctgaagaactatgtaccttcttatgacccatccagtccacaaaccagccagtcctggtacctgggctagcttggttcctttccaagtgtcaaataggacacccatcttaccggccaatgtccaaaattacggtttgaacataattggagaacctttccttcaagcagaaacaagcaactgagggaaaaagaaacacaacaatagtttaagaaattttttttttaaataaaaaaaaaggaaaagaggaagactggacaaaacaacacaaaggcagaaaggaaagaaactgaagaaagaagataatagaccagcaattgcagcacttacaatcactaattcccttaaggttgaaactgtaatgacataaaaagggtcgatgatatttcactgatggtagatcgcagcccctgcaacgtagcctttgttacatgaagtccgctgggaaatagatgttctgtctctatgacaatatattttaactgactttctagatgccttaatatttgcatgataagctagttttattggtttagtattcttgttgtttacgcatggaatcactattcctggttatctcaccaacgaaggctaggaggcggcgtcagaggtgctgggtgacagagccatgagccagccattttataagcactctgatttctaaaagttaaaaaaaatatatgaaatctctgtagcctttagttatcagtacagatttattaaatttcggcccttaacccagccttttccagtgtgtaacccagtttgaaatcttaaaaaaagaaaaaatgaaaaaaaaaggaaaaaaagaaaaaaggaaaaaaacagtttgaacacaaaggctctatggaagaaatgcctctatgtaggtgaagtgttctctctgcatgcaacagtaaaaattaatataatattttccccacaaaagaaacacttaacagaggcaagtgcaatttataaatttatatctaaaggggaatcatgattataagtccttcagcccttggactctaaattgaggggattaaaaagaatttaaaataattttgaacgaatttattttcccctcagtttttgagggcattaaaaaggcattaaatcaagacaaatcatgtgcttgagaaaaataaaattaatgaaaacacagcacttatgttggtttagctgcagcctccttggaggtagaatttatttatttaaaattactggttgcatcaagaacccatagggtgtacaaaaggttctataaaatctgcattatagagacaaagaggcaggcaaatccatgtcacaagggtaaagcttacagtttacaaactgggaacgccagggtgtaggatataaaaacgcactcttgagaaaacaaatgtaatcagggtgctgaaaacttgcatggtgctttcagacattagccttgttcaacaaatttcttgtattgacagatccatagtgtgcatgggcagacacattttgcctctatgtctcttaaaattttaattaaaaatactctttccagtaatcctaatttgcacgaagatataatgtccacattacgtgccttgccttgaaatctaaaaaacaaaaaacaaaaaaaaaaaaacaaaaaaatacaacaaagtgacatcactacacttgttttgctgcatttattatcattttaaatctttaccatttttatgacaaaatattttgtactccagacgaagaaaaatgtgtgacatcatggattttttagacagttatacctttatctcacatttataaagcatatcatggctgtgtatagttgccgcttaaaaattgtaatcgaccagcaatattttcagtattttggtgtttttttctattaacctttcatgtttttcatcttccaattaatatttgggggggaggggtttcaaatttatacgaattatgcaataccaagttttgcctatgtaggtagtgcttttagctgtattggttattataggtaagtacacagattt

SEQ ID NO: 313166 - DNA, 3257 bp, Homo sapiens
acagagaagagaaatgaactgtggcatcgctcctgccttctgaacagctctactccgattaaaaaaaaaaaatctcactgtgttctttgtaaaatggtactgcatagtgatgaatttcacccattcatcgaggcacttcttccacatgtccgtgcaattgcctatacttggttcaacctgcaggctcgaaaacgcaagtactttaaaaagcatgagaagcgaatgtcaaaggatgaagaaagagcagtcaaagatgagcttctcagtgaaaagcctgaaatcaaacagaagtgggcatccaggctccttgccaaactgcgcaaagatattcgccaggagtatcgagaggactttgtgctcaccgtgactggcaagaagcacccgtgctgtgtcttatccaatcccgaccagaagggtaagattaggagaatcgactgcctgcgacaggcagacaaagtctggcgtctggatctagtcatggtgatcctgttcaaaggcatccccttggaaagtaccgatggagagcggctcatgaaatccccacattgcacaaacccagcactttgtgtccagccacatcatatcacagtatcagttaaggagcttgatttgtttttggcatactacgtgcaggagcaagattctggacaatcaggaagtccaagccacaatgatcctgccaagaatcctccaggttaccttgaggatagttttgtaaaatctggagtcttcaatgtatcagaacttgtaagagtatccagaacgcccataacccagggaactggagtcaacttcccaattggagaaatcccaagccaaccatactatcatgacatgaactcgggggtcaatcttcagaggtctctgtcttctccaccaagcagcaaaagacccaaaactatatccatagatgaaaatatggaaccaagtcctacaggagacttttacccctctccaagttcaccagctgctggaagtcgaacatggcacgaaagagatcaagatatgtcttctccgactactatgaagaagcctgaaaagccattgttcagctctgcatctccacaggattcttccccaagactgagcactttcccccagcaccaccatcccggaatacctggagttgcacacagtgtcatctcaactcgaactccacctccaccttcaccgttgccatttccaacacaagctatccttcctccagccccatcgagctacttttctcatccaacaatcagatatcctccccacctgaatcctcaggatactctgaagaactatgtaccttcttatgacccatccagtccacaaaccagccagtcctggtacctgggctagcttggttcctttccaagtgtcaaataggacacccatcttaccggccaatgtccaaaattacggtttgaacataattggagaacctttccttcaagcagaaacaagcaactgagggaaaaagaaacacaacaatagtttaagaaattttttttttaaataaaaaaaaaggaaaagaggaagactggacaaaacaacacaaaggcagaaaggaaagaaactgaagaaagaagataatagaccagcaattgcagcacttacaatcactaattcccttaaggttgaaactgtaatgacataaaaagggtcgatgatatttcactgatggtagatcgcagcccctgcaacgtagcctttgttacatgaagtccgctgggaaatagatgttctgtctctatgacaatatattttaactgactttctagatgccttaatatttgcatgataagctagttttattggtttagtattcttgttgtttacgcatggaatcactattcctggttatctcaccaacgaaggctaggaggcggcgtcagaggtgctgggtgacagagccatgagccagccattttataagcactctgatttctaaaagttaaaaaaaatatatgaaatctctgtagcctttagttatcagtacagatttattaaatttcggcccttaacccagccttttccagtgtgtaacccagtttgaaatcttaaaaaaagaaaaaatgaaaaaaaaaggaaaaaaagaaaaaaggaaaaaaacagtttgaacacaaaggctctatggaagaaatgcctctatgtaggtgaagtgttctctctgcatgcaacagtaaaaattaatataatattttccccacaaaagaaacacttaacagaggcaagtgcaatttataaatttatatctaaaggggaatcatgattataagtccttcagcccttggactctaaattgaggggattaaaaagaatttaaaataattttgaacgaatttattttcccctcagtttttgagggcattaaaaaggcattaaatcaagacaaatcatgtgcttgagaaaaataaaattaatgaaaacacagcacttatgttggtttagctgcagcctccttggaggtagaatttatttatttaaaattactggttgcatcaagaacccatagggtgtacaaaaggttctataaaatctgcattatagagacaaagaggcaggcaaatccatgtcacaagggtaaagcttacagtttacaaactgggaacgccagggtgtaggatataaaaacgcactcttgagaaaacaaatgtaatcagggtgctgaaaacttgcatggtgctttcagacattagccttgttcaacaaatttcttgtattgacagatccatagtgtgcatgggcagacacattttgcctctatgtctcttaaaattttaattaaaaatactctttccagtaatcctaatttgcacgaagatataatgtccacattacgtgccttgccttgaaatctaaaaaacaaaaaacaaaaaaaaaaaaacaaaaaaatacaacaaagtgacatcactacacttgttttgctgcatttattatcattttaaatctttaccatttttatgacaaaatattttgtactccagacgaagaaaaatgtgtgacatcatggattttttagacagttatacctttatctcacatttataaagcatatcatggctgtgtatagttgccgcttaaaaattgtaatcgaccagcaatattttcagtattttggtgtttttttctattaacctttcatgtttttcatcttccaattaatatttgggggggaggggtttcaaatttatacgaattatgcaataccaagttttgcctatgtaggtagtgcttttagctgtattggttattataggtaagtacacagattt

SEQ ID NO: 313167 - DNA, 2647 bp, Homo sapiens
gtcagacggtttcggtgcttctcccactcggatgttcccgcggcttaaaagagtccgcagcgagcaccgaaatacctcttccaggttaccttgaggatagttttgtaaaatctggagtcttcaatgtatcagaacttgtaagagtatccagaacgcccataacccagggaactggagtcaacttcccaattggagaaatcccaagccaaccatactatcatgacatgaactcgggggtcaatcttcagaggtctctgtcttctccaccaagcagcaaaagacccaaaactatatccatagatgaaaatatggaaccaagtcctacaggagacttttacccctctccaagttcaccagctgctggaagtcgaacatggcacgaaagagatcaagatatgtcttctccgactactatgaagaagcctgaaaagccattgttcagctctgcatctccacaggattcttccccaagactgagcactttcccccagcaccaccatcccggaatacctggagttgcacacagtgtcatctcaactcgaactccacctccaccttcaccgttgccatttccaacacaagctatccttcctccagccccatcgagctacttttctcatccaacaatcagatatcctccccacctgaatcctcaggatactctgaagaactatgtaccttcttatgacccatccagtccacaaaccagccagtcctggtacctgggctagcttggttcctttccaagtgtcaaataggacacccatcttaccggccaatgtccaaaattacggtttgaacataattggagaacctttccttcaagcagaaacaagcaactgagggaaaaagaaacacaacaatagtttaagaaattttttttttaaataaaaaaaaaggaaaagaggaagactggacaaaacaacacaaaggcagaaaggaaagaaactgaagaaagaagataatagaccagcaattgcagcacttacaatcactaattcccttaaggttgaaactgtaatgacataaaaagggtcgatgatatttcactgatggtagatcgcagcccctgcaacgtagcctttgttacatgaagtccgctgggaaatagatgttctgtctctatgacaatatattttaactgactttctagatgccttaatatttgcatgataagctagttttattggtttagtattcttgttgtttacgcatggaatcactattcctggttatctcaccaacgaaggctaggaggcggcgtcagaggtgctgggtgacagagccatgagccagccattttataagcactctgatttctaaaagttaaaaaaaatatatgaaatctctgtagcctttagttatcagtacagatttattaaatttcggcccttaacccagccttttccagtgtgtaacccagtttgaaatcttaaaaaaagaaaaaatgaaaaaaaaaggaaaaaaagaaaaaaggaaaaaaacagtttgaacacaaaggctctatggaagaaatgcctctatgtaggtgaagtgttctctctgcatgcaacagtaaaaattaatataatattttccccacaaaagaaacacttaacagaggcaagtgcaatttataaatttatatctaaaggggaatcatgattataagtccttcagcccttggactctaaattgaggggattaaaaagaatttaaaataattttgaacgaatttattttcccctcagtttttgagggcattaaaaaggcattaaatcaagacaaatcatgtgcttgagaaaaataaaattaatgaaaacacagcacttatgttggtttagctgcagcctccttggaggtagaatttatttatttaaaattactggttgcatcaagaacccatagggtgtacaaaaggttctataaaatctgcattatagagacaaagaggcaggcaaatccatgtcacaagggtaaagcttacagtttacaaactgggaacgccagggtgtaggatataaaaacgcactcttgagaaaacaaatgtaatcagggtgctgaaaacttgcatggtgctttcagacattagccttgttcaacaaatttcttgtattgacagatccatagtgtgcatgggcagacacattttgcctctatgtctcttaaaattttaattaaaaatactctttccagtaatcctaatttgcacgaagatataatgtccacattacgtgccttgccttgaaatctaaaaaacaaaaaacaaaaaaaaaaaaacaaaaaaatacaacaaagtgacatcactacacttgttttgctgcatttattatcattttaaatctttaccatttttatgacaaaatattttgtactccagacgaagaaaaatgtgtgacatcatggattttttagacagttatacctttatctcacatttataaagcatatcatggctgtgtatagttgccgcttaaaaattgtaatcgaccagcaatattttcagtattttggtgtttttttctattaacctttcatgtttttcatcttccaattaatatttgggggggaggggtttcaaatttatacgaattatgcaataccaagttttgcctatgtaggtagtgcttttagctgtattggttattataggtaagtacacagattt

SEQ ID NO: 313168 - DNA, 2985 bp, Homo sapiens
gtcagacggtttcggtgcttctcccactcggatgttcccgcggcttaaaagagtccgcagcgagcaccgaaatacctcttccaggttaccttgaggatagttttgtaaaatctggagtcttcaatgtatcagaacttgtaagagtatccagaacgcccataacccagggaactggagtcaacttcccaattggagaaatcccaagccaaccatactatcatgacatgaactcgggggtcaatcttcagaggtctctgtcttctccaccaagcagcaaaagacccaaaactatatccatagatgaaaatatggaaccaagtcctacaggagacttttacccctctccaagttcaccagctgctggaagtcgaacatggcacgaaagagatcaagatatgtcttctccgactactatgaagaagcctgaaaagccattgttcagctctgcatctccacaggattcttccccaagactgagcactttcccccagcaccaccatcccggaatacctggagttgcacacagtgtcatctcaactcgaactccacctccaccttcaccgttgccatttccaacacaagctatccttcctccagccccatcgagctacttttctcatccaacaatcagatatcctccccacctgaatcctcaggatactctgaagaactatgtaccttcttatgacccatccagtccacaaaccagccagcctaacggcagtggtcaagtagtagggaaagtgcctggccatttcactcctgtcttggcaccctctccccatcccagtgcagtgcgacctgtgaccctgagcatgacagatactaaacccatcactacatccactgaaggtgaggcagcttcacctacagcaaccacctacacagcctcaggcacatctcaagccaatcgatatgtgggactaagcccaagagacccatccttcctacatcagcaacagctgaggatttgtgactggaccatgaatcaaaacggcaggcatttataccccagtaccagtgaggatacattgggaattacttggcaaagtcctggtacctgggctagcttggttcctttccaagtgtcaaataggacacccatcttaccggccaatgtccaaaattacggtttgaacataattggagaacctttccttcaagcagaaacaagcaactgagggaaaaagaaacacaacaatagtttaagaaattttttttttaaataaaaaaaaaggaaaagaggaagactggacaaaacaacacaaaggcagaaaggaaagaaactgaagaaagaagataatagaccagcaattgcagcacttacaatcactaattcccttaaggttgaaactgtaatgacataaaaagggtcgatgatatttcactgatggtagatcgcagcccctgcaacgtagcctttgttacatgaagtccgctgggaaatagatgttctgtctctatgacaatatattttaactgactttctagatgccttaatatttgcatgataagctagttttattggtttagtattcttgttgtttacgcatggaatcactattcctggttatctcaccaacgaaggctaggaggcggcgtcagaggtgctgggtgacagagccatgagccagccattttataagcactctgatttctaaaagttaaaaaaaatatatgaaatctctgtagcctttagttatcagtacagatttattaaatttcggcccttaacccagccttttccagtgtgtaacccagtttgaaatcttaaaaaaagaaaaaatgaaaaaaaaaggaaaaaaagaaaaaaggaaaaaaacagtttgaacacaaaggctctatggaagaaatgcctctatgtaggtgaagtgttctctctgcatgcaacagtaaaaattaatataatattttccccacaaaagaaacacttaacagaggcaagtgcaatttataaatttatatctaaaggggaatcatgattataagtccttcagcccttggactctaaattgaggggattaaaaagaatttaaaataattttgaacgaatttattttcccctcagtttttgagggcattaaaaaggcattaaatcaagacaaatcatgtgcttgagaaaaataaaattaatgaaaacacagcacttatgttggtttagctgcagcctccttggaggtagaatttatttatttaaaattactggttgcatcaagaacccatagggtgtacaaaaggttctataaaatctgcattatagagacaaagaggcaggcaaatccatgtcacaagggtaaagcttacagtttacaaactgggaacgccagggtgtaggatataaaaacgcactcttgagaaaacaaatgtaatcagggtgctgaaaacttgcatggtgctttcagacattagccttgttcaacaaatttcttgtattgacagatccatagtgtgcatgggcagacacattttgcctctatgtctcttaaaattttaattaaaaatactctttccagtaatcctaatttgcacgaagatataatgtccacattacgtgccttgccttgaaatctaaaaaacaaaaaacaaaaaaaaaaaaacaaaaaaatacaacaaagtgacatcactacacttgttttgctgcatttattatcattttaaatctttaccatttttatgacaaaatattttgtactccagacgaagaaaaatgtgtgacatcatggattttttagacagttatacctttatctcacatttataaagcatatcatggctgtgtatagttgccgcttaaaaattgtaatcgaccagcaatattttcagtattttggtgtttttttctattaacctttcatgtttttcatcttccaattaatatttgggggggaggggtttcaaatttatacgaattatgcaataccaagttttgcctatgtaggtagtgcttttagctgtattggttattataggtaagtacacagattt

SEQ ID NO: 313169 - DNA, 2935 bp, Homo sapiens
tcccgcgcccccctccccgccttttttgaaaaagcattttaccaccaaccaccaccccaatccaacccacaccgaaccttcgcgcaccccctacaccccaacaacaacaacaactgcaaaatagaaaacaaatccccaaacccaggcgaaaagcagccaacaccggcggcggcggcggcctcggcaagcacggccagcgcgctcggactgcaagagggttaaaagtgtagattggatttcacccctggaactctagcacgccgagtgaacttgaatctttggctatttaaggaggactgggtttgttgtgaagttgcggtgatccagcgcagagccccgtcctgattgatcgcatcgcggggctcagatgactgtaaaatgaatagatgaaattcttgcttctcgaagattttcttgggcatctcccggaaagtgcgttttaaggcgaagtcatgatgtattctcccatctgtctcactcaggatgaatttcacccattcatcgaggcacttcttccacatgtccgtgcaattgcctatacttggttcaacctgcaggctcgaaaacgcaagtactttaaaaagcatgagaagcgaatgtcaaaggatgaagaaagagcagtcaaagatgagcttctcagtgaaaagcctgaaatcaaacagaagtgggcatccaggctccttgccaaactgcgcaaagatattcgccaggagtatcgagaggactttgtgctcaccgtgactggcaagaagcacccgtgctgtgtcttatccaatcccgaccagaagggtaagattaggagaatcgactgcctgcgacaggcagacaaagtctggcgtctggatctagtcatggtgatcctgttcaaaggcatccccttggaaagtaccgatggagagcggctcatgaaatccccacattgcacaaacccagcactttgtgtccagccacatcatatcacagtatcagttaaggagcttgatttgtttttggcatactacgtgcaggagcaagattctggacaatcaggaagtccaagccacaatgatcctgccaagaatcctccaggttaccttgaggatagttttgtaaaatctggagtcttcaatgtatcagaacttgtaagagtatccagaacgcccataacccagggaactggagtcaacttcccaattggagaaatcccaagccaaccatactatcatgacatgaactcgggggtcaatcttcagaggtctctgtcttctccaccaagcagcaaaagacccaaaactatatccatagatgaaaatatggaaccaagtcctacaggagacttttacccctctccaagttcaccagctgctggaagtcgaacatggcacgaaagagatcaagatatgtcttctccgactactatgaagaagcctgaaaagccattgttcagctctgcatctccacaggattcttccccaagactgagcactttcccccagcaccaccatcccggaatacctggagttgcacacagtgtcatctcaactcgaactccacctccaccttcaccgttgccatttccaacacaagctatccttcctccagccccatcgagctacttttctcatccaacaatcagatatcctccccacctgaatcctcaggatactctgaagaactatgtaccttcttatgacccatccagtccacaaaccagccagtcctggtacctgggctagcttggttcctttccaagtgtcaaataggacacccatcttaccggccaatgtccaaaattacggtttgaacataattggagaacctttccttcaagcagaaacaagcaactgagggaaaaagaaacacaacaatagtttaagaaattttttttttaaataaaaaaaaaggaaaagaggaagactggacaaaacaacacaaaggcagaaaggaaagaaactgaagaaagaagataatagaccagcaattgcagcacttacaatcactaattcccttaaggttgaaactgtaatgacataaaaagggtcgatgatatttcactgatggtagatcgcagcccctgcaacgtagcctttgttacatgaagtccgctgggaaatagatgttctgtctctatgacaatatattttaactgactttctagatgccttaatatttgcatgataagctagttttattggtttagtattcttgttgtttacgcatggaatcactattcctggttatctcaccaacgaaggctaggaggcggcgtcagaggtgctgggtgacagagccatgagccagccattttataaaaacgcactcttgagaaaacaaatgtaatcagggtgctgaaaacttgcatggtgctttcagacattagccttgttcaacaaatttcttgtattgacagatccatagtgtgcatgggcagacacattttgcctctatgtctcttaaaattttaattaaaaatactctttccagtaatcctaatttgcacgaagatataatgtccacattacgtgccttgccttgaaatctaaaaaacaaaaaacaaaaaaaaaaaaacaaaaaaatacaacaaagtgacatcactacacttgttttgctgcatttattatcattttaaatctttaccatttttatgacaaaatattttgtactccagacgaagaaaaatgtgtgacatcatggattttttagacagttatacctttatctcacatttataaagcatatcatggctgtgtatagttgccgcttaaaaattgtaatcgaccagcaatattttcagtattttggtgtttttttctattaacctttcatgtttttcatcttccaattaatatttgggggggaggggtttcaaatttatacgaattatgcaataccaagttttgcctatgtaggtagtgcttttagctgtattggttattataggtaagtacacagattt

SEQ ID NO: 313170 - DNA, 1850 bp, Homo sapiens
tcccgcgcccccctccccgccttttttgaaaaagcattttaccaccaaccaccaccccaatccaacccacaccgaaccttcgcgcaccccctacaccccaacaacaacaacaactgcaaaatagaaaacaaatccccaaacccaggcgaaaagcagccaacaccggcggcggcggcggcctcggcaagcacggccagcgcgctcggactgcaagagggttaaaagtgtagattggatttcacccctggaactctagcacgccgagtgaacttgaatctttggctatttaaggaggactgggtttgttgtgaagttgcggtgatccagcgcagagccccgtcctgattgatcgcatcgcggggctcagatgactgtaaaatgaatagatgaaattcttgcttctcgaagattttcttgggcatctcccggaaagtgcgttttaaggcgaagtcatgatgtattctcccatctgtctcactcaggatgaatttcacccattcatcgaggcacttcttccacatgtccgtgcaattgcctatacttggttcaacctgcaggctcgaaaacgcaagtactttaaaaagcatgagaagcgaatgtcaaaggatgaagaaagagcagtcaaagatgagcttctcagtgaaaagcctgaaatcaaacagaagtgggcatccaggctccttgccaaactgcgcaaagatattcgccaggagtatcgagaggactttgtgctcaccgtgactggcaagaagcacccgtgctgtgtcttatccaatcccgaccagaagggtaagattaggagaatcgactgcctgcgacaggcagacaaagtctggcgtctggatctagtcatggtgatcctgttcaaaggcatccccttggaaagtaccgatggagagcggctcatgaaatccccacattgcacaaacccagcactttgtgtccagccacatcatatcacagtatcagttaaggagcttgatttgtttttggcatactacgtgcaggagcaagattctggacaatcaggaagtccaagccacaatgatcctgccaagaatcctccaggttaccttgaggatagttttgtaaaatctggagtcttcaatgtatcagaacttgtaagagtatccagaacgcccataacccagggaactggagtcaacttcccaattggagaaatcccaagccaaccatactatcatgacatgaactcgggggtcaatcttcagaggtctctgtcttctccaccaagcagcaaaagacccaaaactatatccatagatgaaaatatggaaccaagtcctacaggagacttttacccctctccaagttcaccagctgctggaagtcgaacatggcacgaaagagatcaagatatgtcttctccgactactatgaagaagcctgaaaagccattgttcagctctgcatctccacaggattcttccccaagactgagcactttcccccagcaccaccatcccggaatacctggagttgcacacagtgtcatctcaactcgaactccacctccaccttcaccgttgccatttccaacacaagctatccttcctccagccccatcgagctacttttctcatccaacaatcagatatcctccccacctgaatcctcaggatactctgaagaactatgtaccttcttatgacccatccagtccacaaaccagccagtcctgggtacctgggtagctggggcctttcccagtgtcgaaagggaacccctttttacggacagtccaaatccggttgacctatggggaacttccttagagaaaagcactggggaagacacccagttgaaatttttcaaacacaaaggaggag

SEQ ID NO: 313171 - DNA, 1226 bp, Homo sapiens
ctagtcattatttgctgtcgggtttccagtttcaccgtgtgttagggtgagggatgattgtaaaattgctcctcaaaggaatcaggccagactcaattttggagggcaagacagggaggaggccgcttcatcccagactctcttctagggcttcccaccatcagcccctcccacttgagactggtctttgggaggcaataggccaccatgcctggtcagcaccaattcaagccatgccaggaatctgcctacctgccaggttcagttcttttaaggtgcctcttcagggacacagtgtgtctctctgattgggcttctaaatcaaaagcctgatgttcgtgtccctctcatagggggagctttggacacaggaccagtttggaaaagggtcaggtaagggtttccactctgcacattgtagagggaacactctgtaggcccatgggtcccttactagagaggttgagtgaatttgccttcagttaacatgggaccttctgtttagcttcctcttgcttcccaaagattttaagcattttgtaaatgtataaactcacctctggtaacagtggcccagacgctgctttgtgctaaaagcatgggaaatgtaaaggcagtctttctctgggaaatggatgctattctattctgctgcccctacctgttcctgaggcctcatttagaaagaaaatcccctcagaaggctgtctggcacccagtgtcctagccaggccaagtatatgagaaaggtaagtccattttccccttcaggtcctcagtggattacttaaccactgctgtccctcggtccctttttcctaaacgggtttagttctgtcttttttctccttttttctaaatgctggtaaatatttacattcagccagggaagaggaggccagaggtcgggccagctgccccattcttttaacgttgtagggcctgcccatggagcggaccctcctctttgggcctcgtgagcttttttgcttatcatgttccatttcgtgccgctttcccccttcaagatgccatttggagggtaggggatctgcttcccactgtgactgggctatgggattctgactaccttgcttacagattcatggtttgataaatttgttgtattcaaaaacttgaaatgcaggacgccattaagtgtctgtttatatttttggaatatttgtattacttacaattaattaataaaagtgggtttaaaaaac

SEQ ID NO: 313172 - DNA, 1247 bp, Homo sapiens
ctagtcattatttgctgtcgggtttccagtttcaccgtgtgttagggtgagggatgattgtaaaattgctcctcaaaggaatcaggccagactcaattttggagggcaagacagggaggaggccgcttcatcccagactctcttctagggcttcccaccatcagcccctcccacttgagactggtctttgggaggcaataggccaccatgcctggtcagcaccaattcaagccatgccaggaatctgcctacctgccaggttcagttcttttaaggtgcctcttcagggacacagtgtgtctctctgattgggcttctaaatcaaaagcctgatgttcgtgtccctctcatagggggagctttggacacaggaccagtttggaaaagggtcaggtaagggtttccactctgcacattgtagagggaacactctgtaggcccatgggtcccttactagagaggttgagtgaatttgccttcagttaacatgggaccttctgtttagcttcctcttgcttcccaaagattttaagcattttgtaaatgtataaactcacctctggtaacagtggcccagacgctgctttgtgctaaaagcatgggaaatgtaaaggcagtctttctctgggaaatggatgctattctattctgctgcccctacctgttcctgaggcctcatttagaaagaaaatcccctcagaaggctgtctggcacccagtgtcctagccaggccaagtatatgagaaaggtaagtccattttccccttcaggtcctcagtggattacttaaccactgctgtccctcggtccctttttcctaaacgggtttagttctgtcttttttctccttttttctaaatgctggtaaatatttacattcagccagggaagaggaggccagaggtcgggccagctgccccattcttttaacgttgtagggcctgcccatggagcggaccctcctctttgggcctcgtgagcttttttgcttatcatgttccatttcgtgccgctttcccccttcaagatgccatttggagggtaggggatctgcttcccactgtgactgggctatgggattctgactaccttgcttacagattcatggtttgataaatttgttgtattcaaaaacttgaaatgcaggacgccattaagtgtctgtttatatttttggaatatttgtattacttacaattaattaataaaagtgggtttaaaaaacctttccaggaaaaaaaaaaaa

SEQ ID NO: 313173 - DNA, 447 bp, Homo sapiens
ataagtctgcttttcagggattctctgctggtgctggtgcaaggacttctgttccaaaggctgggaaaaactaagctgtcccagcccctcccatttcttgggcagggctcttttcctgttgtgtcttcccccaagctgccccattcttttaacgttgtagggcctgcccatggagcggaccctcctctttgggcctcgtgagcttttttgcttatcatgttccatttcgtgccgctttcccccttcaagatgccatttggagggtaggggatctgcttcccactgtgactgggctatgggattctgactaccttgcttacagattcatggtttgataaatttgttgtattcaaaaacttgaaatgcaggacgccattaagtgtctgtttatatttttggaatatttgtattacttacaattaattaataaaagtgggtttaaaaaac

SEQ ID NO: 313174 - DNA, 700 bp, Homo sapiens
gggacagcagtggttaagtaatccactgaggacctgaaggggaaaatggacttacctttctcatatacttggcctggctaggacactgggtgccagacagccttctgaggggattttctttctaaatgaggcctcaggaacaggtaggggcagcagaatagaatagcatccatttcccagagaaagactgcctttacatttagctgccccattcttttaacgttgtagggcctgcccatggagcggaccctcctctttgggcctcgtgagcttttttgcttatcatgttccatttcgtgccgctttcccccttcaagatgccatttggagggtaggggatctgcttcccactgtgactgggctatgggattctgactaccttgcttacagattcatggtttgataaatttgttgtattcaaaaacttgaaatgcaggacgccattaagtgtctgtttatatttttggaatatttgtattacttacaattaattaataaaagtgggtttaaaaaacaaaaaagaaaaacaaaaaagaaaaaaaaaataaagaaaaaagaaaaaacaaaaaagacaacaaacacagcagaggagggggggcggcccacaagtgacacccccgcgcggcccgcacgctgaagcgccgccagcgctttgtcgtgaacagagggcgcgcccaaagagggacgcgtagtaatacac

SEQ ID NO: 313175 - DNA, 334 bp, Homo sapiens
cctgcttccaagcgacggccatcccagtaggggactttcccacactgtgcctttacgatcagcgtgagcttttttgcttatcatgttccatttcgtgccgctttcccccttcaagatgccatttggagggtaggggatctgcttcccactgtgactgggctatgggattctgactaccttgcttacagattcatggtttgataaatttgttgtattcaaaaacttgaaatgcaggacgccattaagtgtctgtttatatttttggaatatttgtattacttacaattaattaataaaagtgggtttaaaaaacctttccaggaaaaaaaaaaaa

SEQ ID NO: 313176 - DNA, 760 bp, Homo sapiens
acgtagccagggtccattcatgtggaccagagcccgcctagtcattatttgctgtcgggtttccagtttcaccgtgtgttagggtgagggatgattgtaaaattgctcctcaaaggaatcaggccagactcaattttggagggcaagacagggaggaggccgcttcatcccagactctcttctagggcttcccaccatcagcccctcccacttgagactggtctttgggaggcaataggccaccatgcctggtcagcaccaattcaagccatgccaggaatctgcctacctgccaggttcagttcttttaaggtgcctcttcagggacacagtgtgtctctctgattgggcttctaaatcaaaagcctgatgttcgtgtccctctcatagggggagctttggacacaggaccagtttggaaaagggtcaggtaagggtttccactctgcacattgtagagggaacactctgtaggcccatgggtcccttactagagaggttgagtgaatttgccttcagttaacatgggaccttctgtttagcttcctcttgcttcccaaagattttaagcattttgtaaatgtataaactcacctctggtaacagtggcccagacgctgctttgtgctaaaagcatgggaaatgtaaaggcagtctttctctgggaaatggatgctattctattctgctgcccctacctgttcctgaggcctcatttagaaagaaaatcccctcagaaggctgtctggcacccagtgtc

SEQ ID NO: 313177 - DNA, 497 bp, Homo sapiens
  misc_feature (85)..(85): n is a, c, g, or t
gagctcgctgcgtataaggaggaagcaaacaccattgctaagtcggatctgctccagtgtctccagtaccagttctaccagatcncagggacctgcctgctcccagaggtgacagaggaagatcaaggaaggatctgtgtggtcattgacctcgatgaaacccttgtgcatagctcctttaagccaatcaacaatgctgacttcatagtgcctatagagattgagcggaccctcctctttgggcctcgtgagcttttttgcttatcatgttccatttcgtgccgctttcccccttcaagatgccatttggagggtaggggatctgcttcccactgtgactgggctatgggattctgactaccttgcttacagattcatggtttgataaatttgttgtattcaaaaacttgaaatgcaggacgccattaagtgtctgtttatatttttggaatatttgtattacttacaattaattaataaaagtgggtttaaaaaac

SEQ ID NO: 313178 - DNA, 7453 bp, Homo sapiens
tctgcggcgctcggagcctcccttgcgatcccacggccgggactgcccggagtgcatgggcgcgggccagggacgctgagcggtcgcgccatggagggcgccgagccccgcgcgcggcccgagcgcctggccgaggccgagacgcgggcggcggacggcgggcgcctggtggaggtgcagctgagcggcggcgccccgtggggcttcaccctgaagggcggccgcgagcacggcgagccgctggtcatcaccaagattgaagagggcagtaaagccgcggcggtcgacaagttactggctggagatgagatcgtcggcatcaatgacattggtctctcagggtttagacaggaagcgatttgcctggtgaaggggtcccataagaccctgaagctggtcgtcaaaaggaggagcgagctgggctggaggcctcactcctggcatgccaccaagttctctgacagccaccccgagctagcggcctccccattcacctccaccagcggctgtccttcctggtccggccgacaccacgcgagttcttcctcccacgacctgtccagttcctgggagcagacgaacctacagcgcaccttagatcacttcagctccttggggagcgttgacagcctggaccacccctccagtcgcctctcggtggccaagtccaacagcagcatcgaccacctgggcagccacagcaagcgcgactcggcctacggctccttctccaccagctctagcactcctgaccacaccttgtccaaagccgacacgtcctccgcagagaacatcctctacactgtgggcctctgggaggctcccaggcagggtggccggcaggcccaggccgcaggcgaccctcagggctcggaggagaagctcagttgtttcccgcccagggtccccggtgacagcggcaaaggccccaggccagagtacaatgccgagcccaagctggctgcccctgggaggtccaattttgggccagtctggtatgttcccgataagaagaaagcaccatcatccccacctcctccccctccccctctccgcagtgacagctttgctgccaccaagagccacgagaaggcccagggccctgtgttctcagaggcggctgcggcacagcactttacggccctggcccaggctcagcctcgtggtgaccggagaccagagctcaccgatcggccttggaggtcagcacacccggggagcctcgggaagggatcgggaggcccgggctgcccacaggaggcccacgcagacggcagctggccgccctccaaggatggagcttccagtaggctgcaggcctctctgtccagctcagatgtgcgcttccctcagtctcctcatagcggccgacaccctcccctatacagcgaccacagccccctctgtgctgacagccttgggcaggagccaggggctgccagcttccagaacgacagccctcctcaggtgagggggctcagcagctgtgaccagaagctggggagcggctggcagggtccccggccctgtgtgcagggagacctgcaagcagcacagctctgggcgggatgctggccttctgacacagcccttggagccctcgagagtcttcccccacccacggtgggccagagcccacgccatcacctacctcagcctgagggtcctccggatgcccgcgagacaggacggtgttacccgctggacaaaggggccgagggctgctccgcgggagcccaggagcctcccagggccagccgtgcagaaaaagccagccagaggctggcagccagcatcacgtgggcagatggggagagcagcaggatctgcccgcaggagacgcccctgttgcactccctgacccaggaggggaagcgccggcctgagagcagtccagaggacagcgccaccagaccgccaccgttcgacgcccacgtgggcaagcccacccgaagaagcgaccgctttgccaccaccctgcggaatgagatccagatgcatagagccaagctgcagaagagccggagcacagtggctctgactgcagcaggggaggcggaggatggcaccggccgctggagggccgggttgggaggtggcacccaggaaggacccctcgctggcacctataaagaccacctgaaagaggcccaagcccgggtcctgagggccacgtccttcaagcgccgcgacttggaccccaacccaggagacctatacccggagtcactggaacaccggatgggggatccagacactgtcccccacttctgggaggcaggcctggcccagccaccctcatctacaagtggcgggccccacccgccccgcatcggaggccggagacggttcacagctgagcagaaattgaagtcctactcggaacctgagaagatgaacgaggtgggcctcacgaggggctacagtcctcaccagcaccccaggacatctgaggatactgtgggcacgtttgctgacaggtggaagttttttgaggaaacgagcaaacctgttccccagaggcctgcccagaagcaagctcttcacggaatcccgagagacaagccagagaggccgcggacagcgggccgcacatgtgagggcacggagccctggtcgcgcaccacctcccttggggacagcctcaacgctcacagcgcagcggagaaggcagggacttcagacctgccgcggaggctcggcacctttgcagagtatcaggcctcttggaaggaacagaggaaacctctggaggccaggagctctgggcgctgccactcagcggatgacatcctggatgtgagcctggacccacaggagaggccgcagcacgttcatgggaggtcccggtcttcaccgtccacagaccactacaagcaggaagcttctgtcgaactgcgaaggcaggcaggggaccccggcgagcccagagaagagcttccctccgcagtccgggccgaggagggacagtccacgccgagacaagcagatgcccagtgtcgggaaggcagcccaggatcacagcagcacccaccgagtcagaaggcaccgaacccacccacattctctgaactatctcactgccggggagccccagagctgccccgggagggccggggccgagcgggaaccctacctcgagattatagatactcggaggagagcaccccagcagacttgggaccccgagcccagagccctggctcacccctgcatgctcgaggacaagactcgtggccagtgagctcagccctgctctccaagaggccagccccacagaggccaccgccacccaagcgcgagcccaggagatacagggccacagacggcgcacctgctgacgcccccgtgggcgtcctcggcaggcccttcccaacgccatcccctgcgtccctggatgtgtatgtggcccgcctgtccctctcccacagcccctctgtgttcagcagtgcccagccccaggacaccccgaaggccactgtctgtgagcgtggaagccagcatgtgagcggggacgcatcacgtcctctgccagaagcactgctccctcccaagcagcagcacctgcgcctgcagacggccaccatggagacctcgcgctccccctcgccccagttcgccccccagaaactgacggacaaacctcccctgctcatccaggatgaggattcaaccagaattgagcgggtgatggacaacaacaccacggtgaagatggtgcccatcaagatcgtgcactcggagagccagccagagaaggagagccgccagagcctggcatgccccgccgagccacctgccctgccccacgggctggagaaagaccagatcaagacgctgagcacatctgagcagttctactcgcgcttctgtctgtacacgcggcagggtgctgagcccgaggccccacatagggcccagccggctgagccccagcccctgggcacccaggtgccccccgagaaagaccgctgcacctcccctccagggctcagctacatgaaggccaaagagaagactgtggaagacctgaagtcggaggagctggccagggagatcgtggggaaggataagtccctggccgacatcctggatcccagtgtgaagatcaaaaccactatggacttgatggaaggcatcttccccaaagacgagcacctcctggaagaagcccagcaacggaggaagctgctccccaaaatcccctctcctagaagcacagaggagaggaaagaggagcccagcgtgcctgcggccgtgtccctggccaccaattctacctactacagcacgtcggcccccaaggcggagctgctgatcaagatgaaggacctgcaggagcagcaggagcacgaagaggattcgggaagcgacttggaccacgacctgtcggtgaagaagcaggagctcatcgagagcatcagccgcaagctgcaggtgctccgggaggcccgcgagagcctgctggaggacgtgcaggccaacaccgtgctgggggccgaggtggaggccatcgtgaaaggcgtctgcaagcccagcgagtttgacaagttccggatgttcattggagacctggacaaagtggtgaacctcctgctgtcgctgtcaggccgcctggcccgggtggagaatgccctcaataatttggacgacggcgcttctcccggtgatcggcaatcactgcttgagaagcagagagtcctgatccagcagcacgaggacgccaaggagctcaaggagaacctggaccgccgcgagcgcatcgtctttgacattttggccaactatctgagcgaggagagcctcgcggactatgagcacttcgtgaagatgaagtcggccctcatcatcgagcagcgggagctggaagataaaatccaccttggtgaagagcagctgaagtgcttattggacagccttcagcccgaaaggggcaaataagagaccagtccccggtggaggaggggcacggggcctccgagctccagctccgttcccaaggatactcgtgaagaccccatctgtgttcatggcctggaaagagacttctcccatagcaaagaggctgttataaaagcaataacttttgtgtttgtgtgggatgatttatttaattttttagtttcccctttgattgctgagagccattttcctttacacataactacacctgacaccaggctctgctggatgtgagtttccactgcatgggctgtgggctgggcctgtggtgcctgccgagtggtcactgtcagtgggaaacccgttgttcctcccgtcttcagatgctgagccaactgcttggacagcagccagcgcgtcatgacgtgcatgagagggggaccctggtgctcatcttctcttgtcattcatccaggcatgggctgccaggttttgtccctgctcgttcaacagtgtgagcatttgtctctgttatctaatgatgttctctgacccagcagaaatcatcatcatgatgatgataatttattaactttttggaagggtgaatagtttcctaatggttaaaaaccaactgtgaaaggaaccacctgtgtggttgggttcactcattctcagattaaattgccacttaaagaaataacgtgcatgctttaaaaaacacagtcacgcaccaagcaggcaaatagctttagtccttctcacctcacatcacagttgttctgcaaagtaaaattttttggttaagagcgtgtccagtagtaatgtgcttgttagctgtttctcaagaccaacagaagattttttcagttactttccccccatgtattttgtatgcatatgattgtccgtgataattggctacttttccattgtttcctccttaaatcgtttagcatggcatgagggccacattccatggacgggaagaccccttcctcttcagaggtcccgtggactacacagctcctgagcttgatctttttctgccatgaagtttaaagattctatgcccatttccttgattgaaatggcaggattctaaagagagcctggtttgttaaaagaaaacactgtcatgctgtcagttcccaattgacaagtcacagactgggagaaaatatttgcaaatcgtgtatctgacaaaaggtttgtgtccaggatgtacaaagaactctcaaaccggatagtaagaaaacaaacagcccaagtgaaaagcaggcaaaagacttgaatagacacttcaccaaagagcatacacgcgtggcaaacaagcacacgaaaagacgttcagccgccgatggcttggttataatttataacttacttatttttatctaataattgtagattcagtgtatttcttcaaaaaatgtttaattaaatgcatgttaatggtgagtgaatcccttgggtgacttcgtgtttaggtcgtattagggcatttgttggatcaacggatcattttaaccctgacttccccttattcccataaaagaagttttccagtggaatggagatttcattttgtcagcagcagtgaccacagccttaccaaagcagacgcgtgcgcgtgcacagatgcacacacacagatgtcttaaaagactagaatccacacttcctgagccagaggggccgtgttgacggtaatgcattctctatagagccaagtccaaactggcaagctcaatgatgcaggcaataaaccgcctttttggcagcctaccaatgccaaaaggataaatgtctttccaaaagtgtgtattcctgttaaattaagctcttgctaacttgaaaaatccctgttctgccagcgaagcttcctcctcctctccagctggtagtcacttgcgtgaatgctggtcagtctgaaaaggtgaagctggctgtgcacttacccccatctttctccctcggggagacgacccaaggaatttcagagtattttgtttggcagagcttttacctgttattctttgccctcaaatacagtattgtggtcattttgatgatatgtgtgtaaaatgtgaataatccaattggtgtctgtactcagccttttgatgtctttttaggactttctcttctacacagcaatacgtcgtgctcgagtatccttgtagcaaagcacatagagccagctgtcctgtcagttcccctgtttgcctctgaaacgtctggttagtggggacccaaagattctagtgagtcaacatccataactctgtatctagttgtattattcatagaaaatcaatctggtgctaatggttggccctggtgttgttgggtggcagctgctccttcgccctcttgtagtgtggctgtggagggctctgcctatggggggtggcctgtggcttgtatccttcagtccaccacagcaaatgtgtgtagatttcatgctcgacacttaccactcacctatcaacagatcatcctgcttgactgtaacaaaataaatagtgtctcttcaagtgaatggaga

SEQ ID NO: 313179 - DNA, 7399 bp, Homo sapiens
tctgcggcgctcggagcctcccttgcgatcccacggccgggactgcccggagtgcatgggcgcgggccagggacgctgagcggtcgcgccatggagggcgccgagccccgcgcgcggcccgagcgcctggccgaggccgagacgcgggcggcggacggcgggcgcctggtggaggtgcagctgagcggcggcgccccgtggggcttcaccctgaagggcggccgcgagcacggcgagccgctggtcatcaccaagattgaagagggcagtaaagccgcggcggtcgacaagttactggctggagatgagatcgtcggcatcaatgacattggtctctcagggtttagacaggaagcgatttgcctggtgaaggggtcccataagaccctgaagctggtcgtcaaaaggaggagcgagctgggctggaggcctcactcctggcatgccaccaagttctctgacagccaccccgagctagcggcctccccattcacctccaccagcggctgtccttcctggtccggccgacaccacgcgagttcttcctcccacgacctgtccagttcctgggagcagacgaacctacagcgcaccttagatcacttcagctccttggggagcgttgacagcctggaccacccctccagtcgcctctcggtggccaagtccaacagcagcatcgaccacctgggcagccacagcaagcgcgactcggcctacggctccttctccaccagctctagcactcctgaccacaccttgtccaaagccgacacgtcctccgcagagaacatcctctacactgtgggcctctgggaggctcccaggcagggtggccggcaggcccaggccgcaggcgaccctcagggctcggaggagaagctcagttgtttcccgcccagggtccccggtgacagcggcaaaggccccaggccagagtacaatgccgagcccaagctggctgcccctgggaggtccaattttgggccagtctggtatgttcccgataagaagaaagcaccatcatccccacctcctccccctccccctctccgcagtgacagctttgctgccaccaagagccacgagaaggcccagggccctgtgttctcagaggcggctgcggcacagcactttacggccctggcccaggctcagcctcgtggtgaccggagaccagagctcaccgatcggccttggaggtcagcacacccggggagcctcgggaagggatcgggaggcccgggctgcccacaggaggcccacgcagacggcagctggccgccctccaaggatggagcttccagtaggctgcaggcctctctgtccagctcagatgtgcgcttccctcagtctcctcatagcggccgacaccctcccctatacagcgaccacagccccctctgtgctgacagccttgggcaggagccaggggctgccagcttccagaacgacagccctcctcaggtgagggggctcagcagctgtgaccagaagctggggagcggctggcagggtccccggccctgtgtgcagggagacctgcaagcagcacagctctgggcgggatgctggccttctgacacagcccttggagccctcgagagtcttcccccacccacggtgggccagagcccacgccatcacctacctcagcctgagggtcctccggatgcccgcgagacaggacggtgttacccgctggacaaaggggccgagggctgctccgcgggagcccaggagcctcccagggccagccgtgcagaaaaagccagccagaggctggcagccagcatcacgtgggcagatggggagagcagcaggatctgcccgcaggagacgcccctgttgcactccctgacccaggaggggaagcgccggcctgagagcagtccagaggacagcgccaccagaccgccaccgttcgacgcccacgtgggcaagcccacccgaagaagcgaccgctttgccaccaccctgcggaatgagatccagatgcatagagccaagctgcagaagagccggagcacagtggctctgactgcagcaggggaggcggaggatggcaccggccgctggagggccgggttgggaggtggcacccaggaaggacccctcgctggcacctataaagaccacctgaaagaggcccaagcccgggtcctgagggccacgtccttcaagcgccgcgacttggaccccaacccaggagacctatacccggagtcactggaacaccggatgggggatccagacactgtcccccacttctgggaggcaggcctggcccagccaccctcatctacaagtggcgggccccacccgccccgcatcggaggccggagacggttcacagctgagcagaaattgaagtcctactcggaacctgagaagatgaacgaggtgggcctcacgaggggctacagtcctcaccagcaccccaggacatctgaggatactgtgggcacgtttgctgacaggtggaagttttttgaggaaacgagcaaacctgttccccagaggcctgcccagaagcaagctcttcacggaatcccgagagacaagccagagaggccgcggacagcgggccgcacatgtgagggcacggagccctggtcgcgcaccacctcccttggggacagcctcaacgctcacagcgcagcggagaaggcagggacttcagacctgccgcggaggctcggcacctttgcagagtatcaggcctcttggaaggaacagaggaaacctctggaggccaggagctctgggcgctgccactcagcggatgacatcctggatgtgagcctggacccacaggagaggccgcagcacgttcatgggaggtcccggtcttcaccgtccacagaccactacaagcaggaagcttctgtcgaactgcgaaggcaggcaggggaccccggcgagcccagagaagagcttccctccgcagtccgggccgaggagggacagtccacgccgagacaagcagatgcccagtgtcgggaaggcagcccaggatcacagcagcacccaccgagtcagaaggcaccgaacccacccacattctctgaactatctcactgccggggagccccagagctgccccgggagggccggggccgagcgggaaccctacctcgagattatagatactcggaggagagcaccccagcagacttgggaccccgagcccagagccctggctcacccctgcatgctcgaggacaagactcgtggccagtgagctcagccctgctctccaagaggccagccccacagaggccaccgccacccaagcgcgagcccaggagatacagggccacagacggcgcacctgctgacgcccccgtgggcgtcctcggcaggcccttcccaacgccatcccctgcgtccctggatgtgtatgtggcccgcctgtccctctcccacagcccctctgtgttcagcagtgcccagccccaggacaccccgaaggccactgtctgtgagcgtggaagccagcatgtgagcggggacgcatcacgtcctctgccagaagcactgctccctcccaagcagcagcacctgcgcctgcagacggccaccatggagacctcgcgctccccctcgccccagttcgccccccagaaactgacggacaaacctcccctgctcatccaggatgaggattcaaccagaattgagcgggtgatggacaacaacaccacggtgaagatggtgcccatcaagatcgtgcactcggagagccagccagagaaggagagccgccagagcctggcatgccccgccgagccacctgccctgccccacgggctggagaaagaccagatcaagacgctgagcacatctgagcagttctactcgcgcttctgtctgtacacgcggcagggtgctgagcccgaggccccacatagggcccagccggctgagccccagcccctgggcacccaggtgccccccgagaaagaccgctgcacctcccctccagggctcagctacatgaaggccaaagagaagactgtggaagacctgaagtcggaggagctggccagggagatcgtggggaaggataagtccctggccgacatcctggatcccagtgtgaagatcaaaaccactatggacttgatggaaggcatcttccccaaagacgagcacctcctggaagaagcccagcaacggaggaagctgctccccaaaatcccctctcctagaagcacagaggagaggaaagaggagcccagcgtgcctgcggccgtgtccctggccaccaattctacctactacagcacgtcggcccccaaggcggagctgctgatcaagatgaaggacctgcaggagcagcaggagcacgaagaggattcgggaagcgacttggaccacgacctgtcggtgaagaagcaggagctcatcgagagcatcagccgcaagctgcaggtgctccgggaggcccgcgagagcctgctggaggacgtgcaggccaacaccgtgctgggggccgaggtggaggccatcgtgaaaggcgtctgcaagcccagcgagtttgacaagttccggatgttcattggagacctggacaaagtggtgaacctcctgctgtcgctgtcaggccgcctggcccgggtggagaatgccctcaataatttggacgacggcgcttctcccggtgatcggcaatcactgcttgagaagcagagagtcctgatccagcagcacgaggacgccaaggagctcaaggagaacctggaccgccgcgagcgcatcgtctttgacattttggccaactatctgagcgaggagagcctcgcggactatgagcacttcgtgaagatgaagtcggccctcatcatcgagcagcgggagctggaagataaaatccaccttggtgaagagcagctgaagtgcttattggacagccttcagcccgaaaggggcaaataagagaccagtccccggtggaggaggggcacggggcctccgagctccagctccgttcccaaggatactcgtgaagaccccatctgtgttcatggcctggaaagagacttctcccatagcaaagaggctgttataaaagcaataacttttgtgtttgtgtgggatgatttatttaattttttagtttcccctttgattgctgagagccattttcctttacacataactacacctgacaccaggctctgctggatgtgagtttccactgcatgggctgtgggctgggcctgtggtgcctgccgagtggtcactgtcagtgggaaacccgttgttcctcccgtcttcagatgctgagccaactgcttggacagcagccagcgcgtcatgacgtgcatgagagggggaccctggtgctcatcttctcttgtcattcatccaggcatgggctgccaggttttgtccctgctcgttcaacagtgtgagcatttgtctctgttatctaatgatgttctctgacccagcagaaatcatcatcatgatgatgataatttattaactttttggaagggtgaatagtttcctaatggttaaaaaccaactgtgaaaggaaccacctgtgtggttgggttcactcattctcagattaaattgccacttaaagaaataacgtgcatgctttaaaaaacacagtcacgcaccaagcaggcaaatagctttagtccttctcacctcacatcacagttgttctgcaaagtaaaattttttggttaagagcgtgtccagtagtaatgtgcttgttagctgtttctcaagaccaacagaagattttttcagttactttccccccatgtattttgtatgcatatgattgtccgtgataattggctacttttccattgtttcctccttaaatcgtttagcatggcatgagggccacattccatggacgggaagaccccttcctcttcagaggtcccgtggactacacagctcctgagcttgatctttttctgccatgaagtttaaagattctatgcccatttccttgattgaaatggcaggattctaaagagagcctggtttgttaaaagaaaacactgtcatgctgtcagttcccaattgacaagtcacagactgggagaaaatatttgcaaatcgtgtatctgacaaaaggtttgtgtccaggatgtacaaagaactctcaaaccggatagtaagaaaacaaacagcccaagtgaaaagcaggcaaaagacttgaatagacacttcaccaaagagcatacacgcgtggcaaacaagcacacgaaaagacgttcagccgccgatggcttggttataatttataacttacttatttttatctaataattgtagattcagtgtatttcttcaaaaaatgtttaattaaatgcatgttaatggtgagtgaatcccttgggtgacttcgtgtttaggtcgtattagggcatttgttggatcaacggatcattttaaccctgacttccccttattcccataaaagaagttttccagtggaatggagatttcattttgtcagcagcagtgaccacagccttaccaaagcagacgcgtgcgcgtgcacagatgcacacacacagatgtcttaaaagactagaatccacacttcctgagccagaggggccgtgttgacggtaatgcattctctatagagccaagtccaaactggcaagctcaatgatgcaggcaataaaccgcctttttggcagcctaccaatgccaaaaggataaatgtctttccaaaagtgtgtattcctgttaaattaagctcttgctaacttgaaaaatccctgttctgccagcgaagcttcctcctcctctccagctggtagtcacttgcgtgaatgctggtcagtctgcccaaggaatttcagagtattttgtttggcagagcttttacctgttattctttgccctcaaatacagtattgtggtcattttgatgatatgtgtgtaaaatgtgaataatccaattggtgtctgtactcagccttttgatgtctttttaggactttctcttctacacagcaatacgtcgtgctcgagtatccttgtagcaaagcacatagagccagctgtcctgtcagttcccctgtttgcctctgaaacgtctggttagtggggacccaaagattctagtgagtcaacatccataactctgtatctagttgtattattcatagaaaatcaatctggtgctaatggttggccctggtgttgttgggtggcagctgctccttcgccctcttgtagtgtggctgtggagggctctgcctatggggggtggcctgtggcttgtatccttcagtccaccacagcaaatgtgtgtagatttcatgctcgacacttaccactcacctatcaacagatcatcctgcttgactgtaacaaaataaatagtgtctcttcaagtgaatggaga

SEQ ID NO: 313180 - DNA, 4365 bp, Homo sapiens
tctgcggcgctcggagcctcccttgcgatcccacggccgggactgcccggagtgcatgggcgcgggccagggacgctgagcggtcgcgccatggagggcgccgagccccgcgcgcggcccgagcgcctggccgaggccgagacgcgggcggcggacggcgggcgcctggtggaggtgcagctgagcggcggcgccccgtggggcttcaccctgaagggcggccgcgagcacggcgagccgctggtcatcaccaagattgaagagggcagtaaagccgcggcggtcgacaagttactggctggagatgagatcgtcggcatcaatgacattggtctctcagggtttagacaggaagcgatttgcctggtgaaggggtcccataagaccctgaagctggtcgtcaaaaggaggagcgagctgggctggaggcctcactcctggcatgccaccaagttctctgacagccaccccgagctagcggcctccccattcacctccaccagcggctgtccttcctggtccggccgacaccacgcgagttcttcctcccacgacctgtccagttcctgggagcagacgaacctacagcgcaccttagatcacttcagctccttggggagcgttgacagcctggaccacccctccagtcgcctctcggtggccaagtccaacagcagcatcgaccacctgggcagccacagcaagcgcgactcggcctacggctccttctccaccagctctagcactcctgaccacaccttgtccaaagccgacacgtcctccgcagagaacatcctctacactgtgggcctctgggaggctcccaggcagggtggccggcaggcccaggccgcaggcgaccctcagggctcggaggagaagctcagttgtttcccgcccagggtccccggtgacagcggcaaaggccccaggccagagtacaatgccgagcccaagctggctgcccctgggaggtccaattttgggccagtctggtatgttcccgataagaagaaagcaccatcatccccacctcctccccctccccctctccgcagtgacagctttgctgccaccaagagccacgagaaggcccagggccctgtgttctcagaggcggctgcggcacagcactttacggccctggcccaggctcagcctcgtggtgaccggagaccagagctcaccgatcggccttggaggtcagcacacccggggagcctcgggaagggatcgggaggcccgggctgcccacaggaggcccacgcagacggcagctggccgccctccaaggatggagcttccagtaggctgcaggcctctctgtccagctcagatgtgcgcttccctcagtctcctcatagcggccgacaccctcccctatacagcgaccacagccccctctgtgctgacagccttgggcaggagccaggggctgccagcttccagaacgacagccctcctcaggtgagggggctcagcagctgtgaccagaagctggggagcggctggcagggtccccggccctgtgtgcagggagacctgcaagcagcacagctctgggcgggatgctggccttctgacacagcccttggagccctcgagagtcttcccccacccacggtgggccagagcccacgccatcacctacctcagcctgagggtcctccggatgcccgcgagacaggacggtgttacccgctggacaaaggggccgagggctgctccgcgggagcccaggagcctcccagggccagccgtgcagaaaaagccagccagaggctggcagccagcatcacgtgggcagatggggagagcagcaggatctgcccgcaggagacgcccctgttgcactccctgacccaggaggggaagcgccggcctgagagcagtccagaggacagcgccaccagaccgccaccgttcgacgcccacgtgggcaagcccacccgaagaagcgaccgctttgccaccaccctgcggaatgagatccagatgcatagagccaagctgcagaagagccggagcacagtggctctgactgcagcaggggaggcggaggatggcaccggccgctggagggccgggttgggaggtggcacccaggaaggacccctcgctggcacctataaagaccacctgaaagaggcccaagcccgggtcctgagggccacgtccttcaagcgccgcgacttggaccccaacccaggagacctatacccggagtcactggaacaccggatgggggatccagacactgtcccccacttctgggaggcaggcctggcccagccaccctcatctacaagtggcgggccccacccgccccgcatcggaggccggagacggttcacagctgagcagaaattgaagtcctactcggaacctgagaagatgaacgaggtgggcctcacgaggggctacagtcctcaccagcaccccaggacatctgaggatactgtgggcacgtttgctgacaggtggaagttttttgaggaaacgagcaaacctgttccccagaggcctgcccagaagcaagctcttcacggaatcccgagagacaagccagagaggccgcggacagcgggccgcacatgtgagggcacggagccctggtcgcgcaccacctcccttggggacagcctcaacgctcacagcgcagcggagaaggcagggacttcagacctgccgcggaggctcggcacctttgcagagtatcaggcctcttggaaggaacagaggaaacctctggaggccaggagctctgggcgctgccactcagcggatgacatcctggatgtgagcctggacccacaggagaggccgcagcacgttcatgggaggtcccggtcttcaccgtccacagaccactacaagcaggaagcttctgtcgaactgcgaaggcaggcaggggaccccggcgagcccagagaagagcttccctccgcagtccgggccgaggagggacagtccacgccgagacaagcagatgcccagtgtcgggaaggcagcccaggatcacagcagcacccaccgagtcagaaggcaccgaacccacccacattctctgaactatctcactgccggggagccccagagctgccccgggagggccggggccgagcgggaaccctacctcgagattatagatactcggaggagagcaccccagcagacttgggaccccgagcccagagccctggctcacccctgcatgctcgaggacaagactcgtggccagtgagctcagccctgctctccaagaggccagccccacagaggccaccgccacccaagcgcgagcccaggagatacagggccacagacggcgcacctgctgacgcccccgtgggcgtcctcggcaggcccttcccaacgccatcccctgcgtccctggatgtgtatgtggcccgcctgtccctctcccacagcccctctgtgttcagcagtgcccagccccaggacaccccgaaggccactgtctgtgagcgtggaagccagcatgtgagcggggacgcatcacgtcctctgccagaagcactgctccctcccaagcagcagcacctgcgcctgcagacggccaccatggagacctcgcgctccccctcgccccagttcgccccccagaaactgacggacaaacctcccctgctcatccaggatgaggattcaaccagaattgagcgggtgatggacaacaacaccacggtgaagatggtgcccatcaagatcgtgcactcggagagccagccagagaaggagagccgccagagcctggcatgccccgccgagccacctgccctgccccacgggctggagaaagaccagatcaagacgctgagcacatctgagcagttctactcgcgcttctgtctgtacacgcggcagggtgctgagcccgaggccccacatagggcccagccggctgagccccagcccctgggcacccaggtgccccccgagaaagaccgctgcacctcccctccagggctcagctacatgaagcacatagagccagctgtcctgtcagttcccctgtttgcctctgaaacgtctggttagtggggacccaaagattctagtgagtcaacatccataactctgtatctagttgtattattcatagaaaatcaatctggtgctaatggttggccctggtgttgttgggtggcagctgctccttcgccctcttgtagtgtggctgtggagggctctgcctatggggggtggcctgtggcttgtatccttcagtccaccacagcaaatgtgtgtagatttcatgctcgacacttaccactcacctatcaacagatcatcctgcttgactgtaacaaaataaatagtgtctcttcaagtgaatggaga

SEQ ID NO: 313181 - DNA, 4552 bp, Homo sapiens
gagagctgcagcagaggcgggctgtgggtccctgaagcacatcgctgccttcacagctgggcgaactcccatccagcacgacaagcagatgcccagtgtcgggaaggcagcccaggatcacagcagcacccaccgagtcagaaggcaccgaacccacccacattctctgaactatctcactgccggggagccccagagctgccccgggagggccggggccgagcgggaaccctacctcgagattatagatactcggaggagagcaccccagcagacttgggaccccgagcccagagccctggctcacccctgcatgctcgaggacaagactcgtggccagtgagctcagccctgctctccaagaggccagccccacagaggccaccgccacccaagcgcgagcccaggagatacagggccacagacggcgcacctgctgacgcccccgtgggcgtcctcggcaggcccttcccaacgccatcccctgcgtccctggatgtgtatgtggcccgcctgtccctctcccacagcccctctgtgttcagcagtgcccagccccaggacaccccgaaggccactgtctgtgagcgtggaagccagcatgtgagcggggacgcatcacgtcctctgccagaagcactgctccctcccaagcagcagcacctgcgcctgcagacggccaccatggagacctcgcgctccccctcgccccagttcgccccccagaaactgacggacaaacctcccctgctcatccaggatgaggattcaaccagaattgagcgggtgatggacaacaacaccacggtgaagatggtgcccatcaagatcgtgcactcggagagccagccagagaaggagagccgccagagcctggcatgccccgccgagccacctgccctgccccacgggctggagaaagaccagatcaagacgctgagcacatctgagcagttctactcgcgcttctgtctgtacacgcggcagggtgctgagcccgaggccccacatagggcccagccggctgagccccagcccctgggcacccaggtgccccccgagaaagaccgctgcacctcccctccagggctcagctacatgaaggccaaagagaagactgtggaagacctgaagtcggaggagctggccagggagatcgtggggaaggataagtccctggccgacatcctggatcccagtgtgaagatcaaaaccactatggacttgatggaaggcatcttccccaaagacgagcacctcctggaagaagcccagcaacggaggaagctgctccccaaaatcccctctcctagaagcacagaggagaggaaagaggagcccagcgtgcctgcggccgtgtccctggccaccaattctacctactacagcacgtcggcccccaaggcggagctgctgatcaagatgaaggacctgcaggagcagcaggagcacgaagaggattcgggaagcgacttggaccacgacctgtcggtgaagaagcaggagctcatcgagagcatcagccgcaagctgcaggtgctccgggaggcccgcgagagcctgctggaggacgtgcaggccaacaccgtgctgggggccgaggtggaggccatcgtgaaaggcgtctgcaagcccagcgagtttgacaagttccggatgttcattggagacctggacaaagtggtgaacctcctgctgtcgctgtcaggccgcctggcccgggtggagaatgccctcaataatttggacgacggcgcttctcccggtgatcggcaatcactgcttgagaagcagagagtcctgatccagcagcacgaggacgccaaggagctcaaggagaacctggaccgccgcgagcgcatcgtctttgacattttggccaactatctgagcgaggagagcctcgcggactatgagcacttcgtgaagatgaagtcggccctcatcatcgagcagcgggagctggaagataaaatccaccttggtgaagagcagctgaagtgcttattggacagccttcagcccgaaaggggcaaataagagaccagtccccggtggaggaggggcacggggcctccgagctccagctccgttcccaaggatactcgtgaagaccccatctgtgttcatggcctggaaagagacttctcccatagcaaagaggctgttataaaagcaataacttttgtgtttgtgtgggatgatttatttaattttttagtttcccctttgattgctgagagccattttcctttacacataactacacctgacaccaggctctgctggatgtgagtttccactgcatgggctgtgggctgggcctgtggtgcctgccgagtggtcactgtcagtgggaaacccgttgttcctcccgtcttcagatgctgagccaactgcttggacagcagccagcgcgtcatgacgtgcatgagagggggaccctggtgctcatcttctcttgtcattcatccaggcatgggctgccaggttttgtccctgctcgttcaacagtgtgagcatttgtctctgttatctaatgatgttctctgacccagcagaaatcatcatcatgatgatgataatttattaactttttggaagggtgaatagtttcctaatggttaaaaaccaactgtgaaaggaaccacctgtgtggttgggttcactcattctcagattaaattgccacttaaagaaataacgtgcatgctttaaaaaacacagtcacgcaccaagcaggcaaatagctttagtccttctcacctcacatcacagttgttctgcaaagtaaaattttttggttaagagcgtgtccagtagtaatgtgcttgttagctgtttctcaagaccaacagaagattttttcagttactttccccccatgtattttgtatgcatatgattgtccgtgataattggctacttttccattgtttcctccttaaatcgtttagcatggcatgagggccacattccatggacgggaagaccccttcctcttcagaggtcccgtggactacacagctcctgagcttgatctttttctgccatgaagtttaaagattctatgcccatttccttgattgaaatggcaggattctaaagagagcctggtttgttaaaagaaaacactgtcatgctgtcagttcccaattgacaagtcacagactgggagaaaatatttgcaaatcgtgtatctgacaaaaggtttgtgtccaggatgtacaaagaactctcaaaccggatagtaagaaaacaaacagcccaagtgaaaagcaggcaaaagacttgaatagacacttcaccaaagagcatacacgcgtggcaaacaagcacacgaaaagacgttcagccgccgatggcttggttataatttataacttacttatttttatctaataattgtagattcagtgtatttcttcaaaaaatgtttaattaaatgcatgttaatggtgagtgaatcccttgggtgacttcgtgtttaggtcgtattagggcatttgttggatcaacggatcattttaaccctgacttccccttattcccataaaagaagttttccagtggaatggagatttcattttgtcagcagcagtgaccacagccttaccaaagcagacgcgtgcgcgtgcacagatgcacacacacagatgtcttaaaagactagaatccacacttcctgagccagaggggccgtgttgacggtaatgcattctctatagagccaagtccaaactggcaagctcaatgatgcaggcaataaaccgcctttttggcagcctaccaatgccaaaaggataaatgtctttccaaaagtgtgtattcctgttaaattaagctcttgctaacttgaaaaatccctgttctgccagcgaagcttcctcctcctctccagctggtagtcacttgcgtgaatgctggtcagtctgaaaaggtgaagctggctgtgcacttacccccatctttctccctcggggagacgacccaaggaatttcagagtattttgtttggcagagcttttacctgttattctttgccctcaaatacagtattgtggtcattttgatgatatgtgtgtaaaatgtgaataatccaattggtgtctgtactcagccttttgatgtctttttaggactttctcttctacacagcaatacgtcgtgctcgagtatccttgtagcaaagcacatagagccagctgtcctgtcagttcccctgtttgcctctgaaacgtctggttagtggggacccaaagattctagtgagtcaacatccataactctgtatctagttgtattattcatagaaaatcaatctggtgctaatggttggccctggtgttgttgggtggcagctgctccttcgccctcttgtagtgtggctgtggagggctctgcctatggggggtggcctgtggcttgtatccttcagtccaccacagcaaatgtgtgtagatttcatgctcgacacttaccactcacctatcaacagatcatcctgcttgactgtaacaaaataaatagtgtctcttcaagtgaatggaga

SEQ ID NO: 313182 - DNA, 6206 bp, Homo sapiens
  misc_feature (4148)..(4148): n is a, c, g, or t
  misc_feature (4167)..(4167): n is a, c, g, or t
  misc_feature (4172)..(4173): n is a, c, g, or t
  misc_feature (4192)..(4192): n is a, c, g, or t
  misc_feature (4210)..(4210): n is a, c, g, or t
  misc_feature (4226)..(4226): n is a, c, g, or t
  misc_feature (4273)..(4273): n is a, c, g, or t
  misc_feature (4276)..(4276): n is a, c, g, or t
  misc_feature (4279)..(4280): n is a, c, g, or t
  misc_feature (4290)..(4290): n is a, c, g, or t
  misc_feature (4293)..(4293): n is a, c, g, or t
  misc_feature (4301)..(4302): n is a, c, g, or t
  misc_feature (4327)..(4327): n is a, c, g, or t
  misc_feature (4358)..(4358): n is a, c, g, or t
  misc_feature (5333)..(5333): n is a, c, g, or t
  misc_feature (5957)..(5957): n is a, c, g, or t
  misc_feature (5960)..(5960): n is a, c, g, or t
  misc_feature (5974)..(5974): n is a, c, g, or t
  misc_feature (5982)..(5982): n is a, c, g, or t
  misc_feature (5997)..(5997): n is a, c, g, or t
  misc_feature (6000)..(6000): n is a, c, g, or t
  misc_feature (6011)..(6011): n is a, c, g, or t
  misc_feature (6023)..(6023): n is a, c, g, or t
  misc_feature (6028)..(6029): n is a, c, g, or t
  misc_feature (6042)..(6042): n is a, c, g, or t
  misc_feature (6045)..(6046): n is a, c, g, or t
  misc_feature (6086)..(6086): n is a, c, g, or t
  misc_feature (6122)..(6122): n is a, c, g, or t
  misc_feature (6127)..(6128): n is a, c, g, or t
  misc_feature (6139)..(6139): n is a, c, g, or t
  misc_feature (6148)..(6148): n is a, c, g, or t
  misc_feature (6159)..(6159): n is a, c, g, or t
  misc_feature (6162)..(6162): n is a, c, g, or t
  misc_feature (6170)..(6170): n is a, c, g, or t
  misc_feature (6177)..(6177): n is a, c, g, or t
ccccgttcccgattcctgtagtagcggctgtattgcagccgcctgccgaactgacccgggtctggggactggcccctctggcgccgttcggtttctcttattgccttcactgaggatgagtccctttgtggctctatgtggaccctgcggaatccaccggcgcagtttcatctagcgactggtcacccttgcaattatggatatttaaaagggtcagacagtgtggagggggagttcccctcctcactcccccttggtgcttgactccaggaataatttataaactgtggaatttttttaaatgaagaacttgtatttgatatgaactttatagagctatttataatttttttgatttaagtgccaaaaaattgtataaagatatatagttttatactattgtcaggaggatttaaattatcctaaaaaggtaatttattctctgtaacttcctcaatagcacctttgtgtcctggctttttcattttttaaaattagttttcacgattctgaagtaagtggtataaaaacagttaggatgagttcacccatgcctgactgcacatcaaagtgtcgatccctgaagcatgctttggatgtcctttctgtggtaacaaaggggagcgaaaaccagattaaggcctttctctccagtcattgttacaatgctgcaactatcaaggatgtttttggcaggaatgccctccaccttgtttcctcctgtggaaagaaaggagtgttagattggcttattcagaaaggagtggatctgttggtgaaagacaaagagtctggatggacagcattgcacagaagcattttttatggacatattgattgtgtttggtctctattgaagcatggtgttagtctgtatattcaagataaagaaggcttgtcagctttggatcttgtaatgaaggatagaccaactcatgtagtattcaagaatactgatcctacagatgtttatacttggggcgataatacaaattttaccctgggtcatggaagccagaatagcaaacatcatccagagttggtggatctgttctccaggagtgggatttatatcaagcaggtggtgctttgtaaatttcactccgtgtttctgtctcagaaagggcaggtttatacctgtggtcatggtcctggagggcgattaggacatggagatgaacagacatgcttggtccctcggcttgtggaaggactgaatggtcataattgttcccaagtggcagctgctaaggatcatactgttgtattaactgaagatggatgtgtttatacatttggtctaaacatttttcatcaattaggaattattccaccgccttccagttgtaatgtacccagacagatacaggcaaaatatctgaaaggaaggacaatcattggcgttgcagcaggcaggtttcatacagtcctatggactagagaagctgtttacactatgggactaaatggtggacaactgggttgtttgctagatcccaatggagaaaagtgtgtaactgctcctcgtcaggtctctgcccttcaccataaagacattgctctgtctttggttgctgcaagtgatggagctacagtctgtgttaccacaaggggagatatttacttacttgcagactatcagtgcaagaagatggcttctaaacagttgaacttgaaaaaagttcttgtgtctgggggtcatatggaatacaaggttgatcctgaacatttgaaagaaaatgggggtcaaaaaatttgcattcttgcaatggatggagctggaagggtgttttgctggagatcagtcaacagttctctgaagcagtgtcgatgggcctatccacgtcaggtcttcatttctgatattgctttaaatagaaatgaaattctatttgttacgcaagatggagaaggatttagagggagatggtttgaagagaaaagaaagagttctgaaaagaaagagattttatcaaaccttcacaattcctcatcagatgtgtcttatgtctctgatataaatagtgtgtatgaaagaattcgacttgagaaacttacctttgcacatagagctgttagtgtcagcacagatccaagtggatgcaactttgcaatcctgcagtcagatcctaaaacaagcctttatgaaattccagctgtgtcctcatcatccttttttgaagagtttggcaaactgttgagggaagcagatgaaatggacagcattcatgatgtgacatttcaagttggcaatagactcttccctgcacataaatatattttggcagtgcattctgatttttttcagaaattgtttctttcagatggtaatacttcagaatttacagatatttaccagaaagatgaagattctgcagggtgccatctctttgtggtagagaaggttcatcctgacatgtttgaataccttttacaatttatatacacagatacttgtgactttttaactcatggcttcaaaccaagaatacacttaaacaaaaacccagaagaatatcagggaactctgaattctcatttgaataaagtgaatttccatgaagatgataaccagaagtctgcatttgaagtttacaaaagtaatcaagctcaaacagttagtgagaggcagaagagcaaacctaaatcttgtaaaaaaggaaaaaatattagggaagatgatcctgtaagaatgttgcaaactgttgcaaagaaattcgacttcagtaatttgagtagtaggttagatggagtcagatttgaaaatgaaaaaattaatgttattgccaagaacactggtaataaactgaagctaagtcagaaaaaatgttcatttctgtgtgacgtgaccatgaaatcagtggatggaaaggaatttccttgtcataaatgtgttctttgtgctagacttgaatattttcatagtatgctgagtagctcatggattgaggcttccagttgtgcagctctggaaatgccaatacattctgatatattaaaagttattttggactacctctatactgatgaagctgtggtgataaaagaatctcaaaatgtagattttatttgtagtgttcttgtggtggctgatcaacttctcataacccggttgaaagagatttgtgaagtagcattaactgaaaaacttaccctgaagaatgctgctatgctactggaatttgcagcaatgtatagtgcaaaacagttgaaactgtcttgtttacagtttataggattgaatatggcagctttacttgaagcaaggtctcttgatgttttaagcgatggtgttttgaaggatctttctgagttttaccggaaaatgattccagcaatggatagaagagtcattacaccatatcaagatggaccagatattagctatttggaagtagaagatggagatatcttcttgaaagaagaaataaatatggaacaaaatcattcggaaactatgttcaagaaagcaaaaacaaaagctaaaaagaagccacgtaaacgttcagatagttctggaggttataacctttcagatattattcagagtccatcatctacaggattattaaagtctggtaagaccaattctgtggaatctcttccagaactgttgacatcagactctgaaggaagctatgcaggagtgggtagtcctagagatttacagtcccctgatttcacaacaggatttcattcagataagattgaggcgaaagtcaaaccgtatgttaatggtacatctcctgtgtattctagggaagatttaaaaccatgggaaaagtcaccaatacttaaaatatctgctccacagcctattcccagtaacagaattgatactaccagctctgccagttgggttgctggttctttcagtcctgtcagccctcctgttgtggatctcagaactatcatggaaatagaagaaagtagacaaaaatgtggagctacaccaaagtcacatttaggcaaaacagtttctcatggagttaaactttctcagaagcaacgaaaaatgattgcattgactaccaaggaaaacaattcaggaatgaatagcatggaaacagttttattcactccttcaaaagcccccaaaccagtgaatgcatgatggagtctcaccctgttgttcaggtttgagtgcngtggtgcgatcttggttcnctgcnncctccgcctcctaggttcnagcgattcttctgtctcngcctcctgaatagctnggattacagatgcctaccaccacacccggctaatttttgtatttttngtnganncatggtttcnccntgttggcnnggctggtctcgaactcctgacctcnagtgatctgcctgcctcagcctcccaaagtnctggaattacaggtgtgagccactacactttttcttttctattgtccacatatatgccttttaattctactttctggaacatttgcctgactttttccaatcattaaaatctttatcaagagctttttttggtttgtttgttgatgatacctttttctatagtattgttttaatattctaatgttgaagatctctgtactctgtaggcattttcactctttagtatatacccaacagaaacacacacgtatgtaccacgcaacaagtataagaatgttcataatttattatctgtaatagcccaaactgaaaacaatctagatgtctatcagcagtcagtggataaattaatttatttttatagtagaatactacagagtaatgaaaaagaataaatcatgactaaatacaacagtgtggatgaatcttaccaatatgatattgaacaaaataaaccaatcaaccaaaaaaaagaaagctaaaaatagccattgatttacatccatgttttattcattctactctatatgtgttttattttatttcattttgtcaatttattgattgattgttttctcttaagttctgactggaagctctgtgtgcctatgttgtacaaatagactgataggtgtgactatagggtaacgtatcagattccttagggacccctgaatctccccatatgttggttatctccatatcttttctccttggtctctttagtctgtcagtttttctaaagagcagccttttaatttttttttgctgttaaggtgtacattttgttgctagcattctggaagcgtatctcagtgtagggaggttagagctgggactgaacttgtcaccatttgtaataggttttcacatttagtgtatagactttgtacacaacagttcactcccgccatcctctattactagtgactttgaatcaaattttccttctgccagagtaaaggagatgtagtnatatgaccatatggagatagggagtacatctggcactttcagcccctccttaaataaactgaaacaattttcatgctcatgtcgacttcaggatttgatacatactctgtctccagtatatgcccctttccagagttctcagcttccctctttactgtcacccacctgatgactgctagtatttctttttgtccactcggcgacatcagtttttatcattccatctcttttgctatccttcaaaaatgtgttgctgtttttagactgccattgtcttaatagcttattatttttgcccttgtgggtttatacctttctgattactttgctgtacactttaggatttcagaggaaggtattcaagtggtcatttatctgaaacttctgactaattttcaaacataggaaaaatttttccttggtaatagcaacatgagcttagagtgccacattgaagggactatctatccaaattttaagagtctattatggcatattaaggagaattctagaaagatgggaagaaagatgccataaattttgaccaaaaacataggttatttttctttgaaaagaatttgataattatctggctgggcatgatggctcatgcctgtaattcangcnctttgggaggccanggcaggcngatcacctgaggtcnggngtttgagaccngcctggccaacntggannaaccccgtctctnctnnaaatacaaaaattagctgagcatggtgttgcatgcctgtnatcccagctacttgggaggctgaggcaggagaatcncttgnncctgggaggcngaggttgcngtgagttgagntcntgccaccncactccngcctgggcaacagagcaaaaatccttctc

SEQ ID NO: 313183 - DNA, 5787 bp, Homo sapiens
ccccgttcccgattcctgtagtagcggctgtattgcagccgcctgccgaactgacccgggtctggggactggcccctctggcgccgttcggtttctcttattgccttcactgaggatgagtccctttgtggctctatgtggaccctgcggaatccaccggcgcagtttcatctagcgactggtcacccttgcaattatggatatttaaaagggtcagacagtgtggagggggagttcccctcctcactcccccttggtgcttgactccaggaataatttataaactgtggaatttttttaaatgaagaacttgtatttgatatgaactttatagagctatttataatttttttgatttaagtgccaaaaaattgtataaagatatatagttttatactattgtcaggaggatttaaattatcctaaaaaggtaatttattctctgtaacttcctcaatagcacctttgtgtcctggctttttcattttttaaaattagttttcacgattctgaagtaagtggtataaaaacagttaggatgagttcacccatgcctgactgcacatcaaagtgtcgatccctgaagcatgctttggatgtcctttctgtggtaacaaaggggagcgaaaaccagattaaggcctttctctccagtcattgttacaatgctgcaactatcaaggatgtttttggcaggaatgccctccaccttgtttcctcctgtggaaagaaaggagtgttagattggcttattcagaaaggagtggatctgttggtgaaagacaaagagtctggatggacagcattgcacagaagcattttttatggacatattgattgtgtttggtctctattgaagcatggtgttagtctgtatattcaagataaagaaggcttgtcagctttggatcttgtaatgaaggatagaccaactcatgtagtattcaagaatactgatcctacagatgtttatacttggggcgataatacaaattttaccctgggtcatggaagccagaatagcaaacatcatccagagttggtggatctgttctccaggagtgggatttatatcaagcaggtggtgctttgtaaatttcactccgtgtttctgtctcagaaagggcaggtttatacctgtggtcatggtcctggagggcgattaggacatggagatgaacagacatgcttggtccctcggcttgtggaaggactgaatggtcataattgttcccaagtggcagctgctaaggatcatactgttgtattaactgaagatggatgtgtttatacatttggtctaaacatttttcatcaattaggaattattccaccgccttccagttgtaatgtacccagacagatacaggcaaaatatctgaaaggaaggacaatcattggcgttgcagcaggcaggtttcatacagtcctatggactagagaagctgtttacactatgggactaaatggtggacaactgggttgtttgctagatcccaatggagaaaagtgtgtaactgctcctcgtcaggtctctgcccttcaccataaagacattgctctgtctttggttgctgcaagtgatggagctacagtctgtgttaccacaaggggagatatttacttacttgcagactatcagtgcaagaagatggcttctaaacagttgaacttgaaaaaagttcttgtgtctgggggtcatatggaatacaaggttgatcctgaacatttgaaagaaaatgggggtcaaaaaatttgcattcttgcaatggatggagctggaagggtgttttgctggagatcagtcaacagttctctgaagcagtgtcgatgggcctatccacgtcaggtcttcatttctgatattgctttaaatagaaatgaaattctatttgttacgcaagatggagaaggatttagagggagatggtttgaagagaaaagaaagagttctgaaaagaaagagattttatcaaaccttcacaattcctcatcagatgtgtcttatgtctctgatataaatagtgtgtatgaaagaattcgacttgagaaacttacctttgcacatagagctgttagtgtcagcacagatccaagtggatgcaactttgcaatcctgcagtcagatcctaaaacaagcctttatgaaattccagctgtgtcctcatcatccttttttgaagagtttggcaaactgttgagggaagcagatgaaatggacagcattcatgatgtgacatttcaagttggcaatagactcttccctgcacataaatatattttggcagtgcattctgatttttttcagaaattgtttctttcagatggtaatacttcagaatttacagatatttaccagaaagatgaagattctgcagggtgccatctctttgtggtagagaaggttcatcctgacatgtttgaataccttttacaatttatatacacagatacttgtgactttttaactcatggcttcaaaccaagaatacacttaaacaaaaacccagaagaatatcagggaactctgaattctcatttgaataaagtgaatttccatgaagatgataaccagaagtctgcatttgaagtttacaaaagtaatcaagctcaaacagttagtgagaggcagaagagcaaacctaaatcttgtaaaaaaggaaaaaatattagggaagatgatcctgtaagaatgttgcaaactgttgcaaagaaattcgacttcagtaatttgagtagtaggttagatggagtcagatttgaaaatgaaaaaattaatgttattgccaagaacactggtaataaactgaagctaagtcagaaaaaatgttcatttctgtgtgacgtgaccatgaaatcagtggatggaaaggaatttccttgtcataaatgtgttctttgtgctagacttgaatattttcatagtatgctgagtagctcatggattgaggcttccagttgtgcagctctggaaatgccaatacattctgatatattaaaagttattttggactacctctatactgatgaagctgtggtgataaaagaatctcaaaatgtagattttatttgtagtgttcttgtggtggctgatcaacttctcataacccggttgaaagagatttgtgaagtagcattaactgaaaaacttaccctgaagaatgctgctatgctactggaatttgcagcaatgtatagtgcaaaacagttgaaactgtcttgtttacagtttataggattgaatatggcagctttacttgaagcaaggtctcttgatgttttaagcgatggtgttttgaaggatctttctgagttttaccggaaaatgattccagcaatggatagaagagtcattacaccatatcaagatggaccagatattagctatttggaagtagaagatggagatatcttcttgaaagaagaaataaatatggaacaaaatcattcggaaactatgttcaagaaagcaaaaacaaaagctaaaaagaagccacgtaaacgttcagatagttctggaggttataacctttcagatattattcagagtccatcatctacaggattattaaagtctggtaagaccaattctgtggaatctcttccagaactgttgacatcagactctgaaggaagctatgcaggagtgggtagtcctagagatttacagtcccctgatttcacaacaggatttcattcagataagattgaggcgaaagtcaaaccgtatgttaatggtacatctcctgtgtattctagggaagatttaaaaccatgggaaaagtcaccaatacttaaaatatctgctccacagcctattcccagtaacagaattgatactaccagctctgccagttgggttgctggttctttcagtcctgtcagccctcctgttgtggatctcagaactatcatggaaatagaagaaagtagacaaaaatgtggagctacaccaaagtcacatttaggcaaaacagtttctcatggagttaaactttctcagaagcaacgaaaaatgattgcattgactaccaaggaaaacaattcaggaatgaatagcatggaaacagttttattcactccttcaaaagcccccaaaccagtgaatgcatgggcatcttctctgcattcagtttcatccaagtcattccgggatttcttactagaagaaaaaaagtctgttactagccatagttcaggcgatcatgtcaaaaaagtttcttttaaaggaattgaaaattctcaggcaccaaaaattgtcagatgctctacccatggtaccccaggaccagaaggcaaccatatttcagatttaccacttctagacagtcccaatccctggctatcttcttcagtgactgctccatccatggtagccccagtcacttttgcatctattgtagaagaagaactacaacaagaagcagctcttattagaagtcgagaaaaaccgttggctctgattcagattgaggagcatgccatacaagatttattggttttctatgaggcatttggcaaccctgaagagtttgtcattgttgaaaggacaccgcagggaccactggcagtacctatgtggaataagcatggatgctagttcactgtggagttgagatgcattttacataattatgagtttgttcatataaagaaaagctgtggaaaagagtcttagagattttgtaatatcattctaaatagattaagaaaagatataatttctttactgcagttaaatcatataatgtttgtatgattaaaaataaatttctcagaattgtgattttagtaactttatataaaatgtgtgagacaaaaacttattaaggttaaatagaattgtttcttctgaataatctaacaaaggaaaatataagtgattgaatcataagatataaggggggtaaagtattaaaaataacttttttgtttgataacttgagaatttagaagattttgccaagtatgtgttgttgcttgacttcttaaatatggcattgatgaatttaaagtaggagcatcagttattacttctgattcattaatggccagaattttgtgtttggtgtaatagttgtgtcaccattcttgttgctttttaaaaatcaggctaatcatgtggtccatgtctcttcaaagcttgacctgcacaaatgccatatttctatttggaccacatattctccattttgcattgagcagtagagtacagtggaaagggaataagaatactgattattctgaacagtttagtcccaagagaatagcgttttaaaaaagaaaaacaagatttggagtcattgtgggttatttttggtgggatggaggatcttaaaaatgcctaattgtgagagaatcaattgctgaaagtgttaaaatttctgaaaataaatgcttaattacatatacaggaattaaatagtttggaagagggttggattatcattacctttacaatactgtataatcagaagttctctgaacctcaattgtatatctagacataaaaattgttttctgtataggatgttgtttggtttgtttctgagtgtttaaattttgcaaaaacaaatgttaaatttgtgcttcagtacctagataaattggaaaggttaatgttctagtttctggaaggtaagcctgggagacacataagcaattcactgctataatttagttgatgtaaaatgacggaaactgactcaatatgtcaggtttaactctgcccaaaagcagcagacatgtaagcagatgtgcaataaaaaatgatcttgatccatttca

SEQ ID NO: 313184 - DNA, 6292 bp, Homo sapiens
ccccgttcccgattcctgtagtagcggctgtattgcagccgcctgccgaactgacccgggtctggggactggcccctctggcgccgttcggtttctcttattgccttcactgaggatgagtccctttgtggctctatgtggaccctgcggaatccaccggcgcagtttcatctagcgactggtcacccttgcaattatggatatttaaaagggtcagacagtgtggagggggagttcccctcctcactcccccttggtgcttgactccaggaataatttataaactgtggaatttttttaaatgaagaacttgtatttgatatgaactttatagagctatttataatttttttgatttaagtgccaaaaaattgtataaagatatatagttttatactattgtcaggaggatttaaattatcctaaaaaggtaatttattctctgtaacttcctcaatagcacctttgtgtcctggctttttcattttttaaaattagttttcacgattctgaagtaagtggtataaaaacagttaggatgagttcacccatgcctgactgcacatcaaagtgtcgatccctgaagcatgctttggatgtcctttctgtggtaacaaaggggagcgaaaaccagattaaggcctttctctccagtcattgttacaatgctgcaactatcaaggatgtttttggcaggaatgccctccaccttgtttcctcctgtggaaagaaaggagtgttagattggcttattcagaaaggagtggatctgttggtgaaagacaaagagtctggatggacagcattgcacagaagcattttttatggacatattgattgtgtttggtctctattgaagcatggtgttagtctgtatattcaagataaagaaggcttgtcagctttggatcttgtaatgaaggatagaccaactcatgtagtattcaagaatactgatcctacagatgtttatacttggggcgataatacaaattttaccctgggtcatggaagccagaatagcaaacatcatccagagttggtggatctgttctccaggagtgggatttatatcaagcaggtggtgctttgtaaatttcactccgtgtttctgtctcagaaagggcaggtttatacctgtggtcatggtcctggagggcgattaggacatggagatgaacagacatgcttggtccctcggcttgtggaaggactgaatggtcataattgttcccaagtggcagctgctaaggatcatactgttgtattaactgaagatggatgtgtttatacatttggtctaaacatttttcatcaattaggaattattccaccgccttccagttgtaatgtacccagacagatacaggcaaaatatctgaaaggaaggacaatcattggcgttgcagcaggcaggtttcatacagtcctatggactagagaagctgtttacactatgggactaaatggtggacaactgggttgtttgctagatcccaatggagaaaagtgtgtaactgctcctcgtcaggtctctgcccttcaccataaagacattgctctgtctttggttgctgcaagtgatggagctacagtctgtgttaccacaaggggagatatttacttacttgcagactatcagtgcaagaagatggcttctaaacagttgaacttgaaaaaagttcttgtgtctgggggtcatatggaatacaaggttgatcctgaacatttgaaagaaaatgggggtcaaaaaatttgcattcttgcaatggatggagctggaagggtgttttgctggagatcagtcaacagttctctgaagcagtgtcgatgggcctatccacgtcaggtcttcatttctgatattgctttaaatagaaatgaaattctatttgttacgcaagatggagaaggatttagagggagatggtttgaagagaaaagaaagagttctgaaaagaaagagattttatcaaaccttcacaattcctcatcagatgtgtcttatgtctctgatataaatagtgtgtatgaaagaattcgacttgagaaacttacctttgcacatagagctgttagtgtcagcacagatccaagtggatgcaactttgcaatcctgcagtcagatcctaaaacaagcctttatgaaattccagctgtgtcctcatcatccttttttgaagagtttggcaaactgttgagggaagcagatgaaatggacagcattcatgatgtgacatttcaagttggcaatagactcttccctgcacataaatatattttggcagtgcattctgatttttttcagaaattgtttctttcagatggtaatacttcagaatttacagatatttaccagaaagatgaagattctgcagggtgccatctctttgtggtagagaaggttcatcctgacatgtttgaataccttttacaatttatatacacagatacttgtgactttttaactcatggcttcaaaccaagaatacacttaaacaaaaacccagaagaatatcagggaactctgaattctcatttgaataaagtgaatttccatgaagatgataaccagaagtctgcatttgaagtttacaaaagtaatcaagctcaaacagttagtgagaggcagaagagcaaacctaaatcttgtaaaaaaggaaaaaatattagggaagatgatcctgtaagaatgttgcaaactgttgcaaagaaattcgacttcagtaatttgagtagtaggttagatggagtcagatttgaaaatgaaaaaattaatgttattgccaagaacactggtaataaactgaagctaagtcagaaaaaatgttcatttctgtgtgacgtgaccatgaaatcagtggatggaaaggaatttccttgtcataaatgtgttctttgtgctagacttgaatattttcatagtatgctgagtagctcatggattgaggcttccagttgtgcagctctggaaatgccaatacattctgatatattaaaagttattttggactacctctatactgatgaagctgtggtgataaaagaatctcaaaatgtagattttatttgtagtgttcttgtggtggctgatcaacttctcataacccggttgaaagagatttgtgaagtagcattaactgaaaaacttaccctgaagaatgctgctatgctactggaatttgcagcaatgtatagtgcaaaacagttgaaactgtcttgtttacagtttataggattgaatatggcagctttacttgaagcaaggtctcttgatgttttaagcgatggtgttttgaaggatctttctgagttttaccggaaaatgattccagcaatggatagaagagtcattacaccatatcaagatggaccagatattagctatttggaagtagaagatggagatatcttcttgaaagaagaaataaatatggaacaaaatcattcggaaactatgttcaagaaagcaaaaacaaaagctaaaaagaagccacgtaaacgttcagatagttctggaggttataacctttcagatattattcagagtccatcatctacaggattattaaagtctggtaagaccaattctgtggaatctcttccagaactgttgacatcagactctgaaggaagctatgcaggagtgggtagtcctagagatttacagtcccctgatttcacaacaggatttcattcagataagattgaggcgaaagtcaaaccgtatgttaatggtacatctcctgtgtattctagggaagatttaaaaccatgggaaaagtcaccaatacttaaaatatctgctccacagcctattcccagtaacagaattgatactaccagctctgccagttgggttgctggttctttcagtcctgtcagccctcctgttgtggatctcagaactatcatggaaatagaagaaagtagacaaaaatgtggagctacaccaaagtcacatttaggcaaaacagtttctcatggagttaaactttctcagaagcaacgaaaaatgattgcattgactaccaaggaaaacaattcaggaatgaatagcatggaaacagttttattcactccttcaaaagcccccaaaccagtgaatgcatgggcatcttctctgcattcagtttcatccaagtcattccgggatttcttactagaagaaaaaaagtctgttactagccatagttcaggcgatcatgtcaaaaaagtttcttttaaaggaattgaaaattctcaggcaccaaaaattgtcagttttgtaggaggagagagaaggtgacatttgagccaactgtaaaagagtgagaagacatttgaagtggaatatattccagaataaggggaatagtaaaaataaagatgctctacccatggtaccccaggaccagaaggcaaccatatttcagatttaccacttctagacagtcccaatccctggctatcttcttcagtgactgctccatccatggtagccccagtcacttttgcatctattgtagaagaagaactacaacaagaagcagctcttattagaagtcgagaaaaaccgttggctctgattcagattgaggagcatgccatacaagatttattggttttctatgaggcatttggcaaccctgaagagtttgtcattgttgaaaggacaccgcagggaccactggcagtacctatgtggaataagcatggatgctagttcactgtggagttgagatgcattttacataattatgagtttgttcatataaagaaaagctgtggaaaagagtcttagagattttgtaatatcattctaaatagattaagaaaagatataatttctttactgcagttaaatcatataatgtttgtatgattaaaaataaatttctcagaattgtgattttagtaactttatataaaatgtgtgagacaaaaacttattaaggttaaatagaattgtttcttctgaataatctaacaaaggaaaatataagtgattgaatcataagatataaggggggtaaagtattaaaaataacttttttgtttgataacttgagaatttagaagattttgccaagtatgtgttgttgcttgacttcttaaatatggcattgatgaatttaaagtaggagcatcagttattacttctgattcattaatggccagaattttgtgtttggtgtaatagttgtgtcaccattcttgttgctttttaaaaatcaggctaatcatgtggtccatgtctcttcaaagcttgacctgcacaaatgccatatttctatttggaccacatattctccattttgcattgagcagtagagtacagtggaaagggaataagaatactgattattctgaacagtttagtcccaagagaatagcgttttaaaaaagaaaaacaagatttggagtcattgtgggttatttttggtgggatggaggatcttaaaaatgcctaattgtgagagaatcaattgctgaaagtgttaaaatttctgaaaataaatgcttaattacatatacaggaattaaatagtttggaagagggttggattatcattacctttacaatactgtataatcagaagttctctgaacctcaattgtatatctagacataaaaattgttttctgtataggatgttgtttggtttgtttctgagtgtttaaattttgcaaaaacaaatgttaaatttgtgcttcagtacctagataaattggaaaggttaatgttctagtttctggaaggtaagcctgggagacacataagcaattcactgctataatttagttgatgtaaaatgacggaaactgactcaatatgtcaggtttaactctgcccaaaagcagcagacatgtaagcagatgtgcaataaaaaatgatcttgatccatttcaaaaaaaaacaagcaaagaaaacaataaaaaaaaaaaagacaaaaaaaaagaagcaaacaaaagaacagaaacaagaacaaaaagggggggggggagcaaaaaaaatcccacccaggggggacacaatgaagggtcacacaatttttagaaaaagagggccccaatagagaggcgtaaataaaagagaagaggggcgcgtaaaaaacgagcaaaggggaaaacatgacacagaaggaaactctagaagaagaacccacactaagcggggggagagcaacaagtggagaacaaaccgacagaaaacgttacacccgaggagagaaatatacaaaggacggaatataaggatgacaacacaagacaattatgcgcgaaaaaaaagcgcaccagagatattgaa

SEQ ID NO: 313185 - DNA, 6037 bp, Homo sapiens
ccccgttcccgattcctgtagtagcggctgtattgcagccgcctgccgaactgacccgggtctggggactggcccctctggcgccgttcggtttctcttattgccttcactgaggatgagtccctttgtggctctatgtggaccctgcggaatccaccggcgcagtttcatctagcgactggtcacccttgcaattatggatatttaaaagggtcagacagtgtggagggggagttcccctcctcactcccccttggtgcttgactccaggaataatttataaactgtggaatttttttaaatgaagaacttgtatttgatatgaactttatagagctatttataatttttttgatttaagtgccaaaaaattgtataaagatatatagttttatactattgtcaggaggatttaaattatcctaaaaaggtaatttattctctgtaacttcctcaatagcacctttgtgtcctggctttttcattttttaaaattagttttcacgattctgaagtaagtggtataaaaacagttaggatgagttcacccatgcctgactgcacatcaaagtgtcgatccctgaagcatgctttggatgtcctttctgtggtaacaaaggggagcgaaaaccagattaaggcctttctctccagtcattgttacaatgctgcaactatcaaggatgtttttggcaggaatgccctccaccttgtttcctcctgtggaaagaaaggagtgttagattggcttattcagaaaggagtggatctgttggtgaaagacaaagagtctggatggacagcattgcacagaagcattttttatggacatattgattgtgtttggtctctattgaagcatggtgttagtctgtatattcaagataaagaaggcttgtcagctttggatcttgtaatgaaggatagaccaactcatgtagtattcaagaatactgatcctacagatgtttatacttggggcgataatacaaattttaccctgggtcatggaagccagaatagcaaacatcatccagagttggtggatctgttctccaggagtgggatttatatcaagcaggtggtgctttgtaaatttcactccgtgtttctgtctcagaaagggcaggtttatacctgtggtcatggtcctggagggcgattaggacatggagatgaacagacatgcttggtccctcggcttgtggaaggactgaatggtcataattgttcccaagtggcagctgctaaggatcatactgttgtattaactgaagatggatgtgtttatacatttggtctaaacatttttcatcaattaggaattattccaccgccttccagttgtaatgtacccagacagatacaggcaaaatatctgaaaggaaggacaatcattggcgttgcagcaggcaggtttcatacagtcctatggactagagaagctgtttacactatgggactaaatggtggacaactgggttgtttgctagatcccaatggagaaaagtgtgtaactgctcctcgtcaggtctctgcccttcaccataaagacattgctctgtctttggttgctgcaagtgatggagctacagtctgtgttaccacaaggggagatatttacttacttgcagactatcagtgcaagaagatggcttctaaacagttgaacttgaaaaaagttcttgtgtctgggggtcatatggaatacaaggttgatcctgaacatttgaaagaaaatgggggtcaaaaaatttgcattcttgcaatggatggagctggaagggtgttttgctggagatcagtcaacagttctctgaagcagtgtcgatgggcctatccacgtcaggtcttcatttctgatattgctttaaatagaaatgaaattctatttgttacgcaagatggagaaggatttagagggagatggtttgaagagaaaagaaagagttctgaaaagaaagagattttatcaaaccttcacaattcctcatcagatgtgtcttatgtctctgatataaatagtgtgtatgaaagaattcgacttgagaaacttacctttgcacatagagctgttagtgtcagcacagatccaagtggatgcaactttgcaatcctgcagtcagatcctaaaacaagcctttatgaaattccagctgtgtcctcatcatccttttttgaagagtttggcaaactgttgagggaagcagatgaaatggacagcattcatgatgtgacatttcaagttggcaatagactcttccctgcacataaatatattttggcagtgcattctgatttttttcagaaattgtttctttcagatggtaatacttcagaatttacagatatttaccagaaagatgaagattctgcagggtgccatctctttgtggtagagaaggttcatcctgacatgtttgaataccttttacaatttatatacacagatacttgtgactttttaactcatggcttcaaaccaagaatacacttaaacaaaaacccagaagaatatcagggaactctgaattctcatttgaataaagtgaatttccatgaagatgataaccagaagtctgcatttgaagtttacaaaagtaatcaagctcaaacagttagtgagaggcagaagagcaaacctaaatcttgtaaaaaaggaaaaaatattagggaagatgatcctgtaagaatgttgcaaactgttgcaaagaaattcgacttcagtaatttgagtagtaggttagatggagtcagatttgaaaatgaaaaaattaatgttattgccaagaacactggtaataaactgaagctaagtcagaaaaaatgttcatttctgtgtgacgtgaccatgaaatcagtggatggaaaggaatttccttgtcataaatgtgttctttgtgctagacttgaatattttcatagtatgctgagtagctcatggattgaggcttccagttgtgcagctctggaaatgccaatacattctgatatattaaaagttattttggactacctctatactgatgaagctgtggtgataaaagaatctcaaaatgtagattttatttgtagtgttcttgtggtggctgatcaacttctcataacccggttgaaagagatttgtgaagtagcattaactgaaaaacttaccctgaagaatgctgctatgctactggaatttgcagcaatgtatagtgcaaaacagttgaaactgtcttgtttacagtttataggattgaatatggcagctttacttgaagcaaggtctcttgatgttttaagcgatggtgttttgaaggatctttctgagttttaccggaaaatgattccagcaatggatagaagagtcattacaccatatcaagatggaccagatattagctatttggaagtagaagatggagatatcttcttgaaagaagaaataaatatggaacaaaatcattcggaaactatgttcaagaaagcaaaaacaaaagctaaaaagaagccacgtaaacgttcagatagttctggaggttataacctttcagatattattcagagtccatcatctacaggattattaaagtctggtaagaccaattctgtggaatctcttccagaactgttgacatcagactctgaaggaagctatgcaggagtgggtagtcctagagatttacagtcccctgatttcacaacaggatttcattcagataagattgaggcgaaagtcaaaccgtatgttaatggtacatctcctgtgtattctagggaagatttaaaaccatgggaaaagtcaccaatacttaaaatatctgctccacagcctattcccagtaacagaattgatactaccagctctgccagttgggttgctggttctttcagtcctgtcagccctcctgttgtggatctcagaactatcatggaaatagaagaaagtagacaaaaatgtggagctacaccaaagtcacatttaggcaaaacagtttctcatggagttaaactttctcagaagcaacgaaaaatgattgcattgactaccaaggaaaacaattcaggaatgaatagcatggaaacagttttattcactccttcaaaagcccccaaaccagtgaatgcatgggcatcttctctgcattcagtttcatccaagtcattccgggatttcttactagaagaaaaaaagtctgttactagccatagttcaggcgatcatgtcaaaaaagtttcttttaaaggaattgaaaattctcaggcaccaaaaattgtcagatgctctacccatggtaccccaggaccagaaggcaaccatatttcagatttaccacttctagacagtcccaatccctggctatcttcttcagtgactgctccatccatggtagccccagtcacttttgcatctattgtagaagaagaactacaacaagaagcagctcttattagaagtcgagaaaaaccgttggctctgattcagattgaggagcatgccatacaagatttattggttttctatgaggcatttggcaaccctgaagagtttgtcattgttgaaaggacaccgcagggaccactggcagtacctatgtggaataagcatggatgctagttcactgtggagttgagatgcattttacataattatgagtttgttcatataaagaaaagctgtggaaaagagtcttagagattttgtaatatcattctaaatagattaagaaaagatataatttctttactgcagttaaatcatataatgtttgtatgattaaaaataaatttctcagaattgtgattttagtaactttatataaaatgtgtgagacaaaaacttattaaggttaaatagaattgtttcttctgaataatctaacaaaggaaaatataagtgattgaatcataagatataaggggggtaaagtattaaaaataacttttttgtttgataacttgagaatttagaagattttgccaagtatgtgttgttgcttgacttcttaaatatggcattgatgaatttaaagtaggagcatcagttattacttctgattcattaatggccagaattttgtgtttggtgtaatagttgtgtcaccattcttgttgctttttaaaaatcaggctaatcatgtggtccatgtctcttcaaagcttgacctgcacaaatgccatatttctatttggaccacatattctccattttgcattgagcagtagagtacagtggaaagggaataagaatactgattattctgaacagtttagtcccaagagaatagcgttttaaaaaagaaaaacaagatttggagtcattgtgggttatttttggtgggatggaggatcttaaaaatgcctaattgtgagagaatcaattgctgaaagtgttaaaatttctgaaaataaatgcttaattacatatacaggaattaaatagtttggaagagggttggattatcattacctttacaatactgtataatcagaagttctctgaacctcaattgtatatctagacataaaaattgttttctgtataggatgttgtttggtttgtttctgagtgtttaaattttgcaaaaacaaatgttaaatttgtgcttcagtacctagataaattggaaaggttaatgttctagtttctggaaggtaagcctgggagacacataagcaattcactgctataatttagttgatgtaaaatgacggaaactgactcaatatgtcaggtttaactctgcccaaaagcagcagacatgtaagcagatgtgcaataaaaaatgatcttgatccatttcactaatgtgtgcttgacattttttactatattgacatttattatggaaagagttaataattattttttctgatgtgctacactagtggccagtatatggttaagttgatgctgtatttattctaagacggatttaaaaaggcagttttctaaatatgaacttgtgaatttttgtatgtgtgtttgagtaaattgagaaatgaattttataaatgttctattgatgttgcagtaaagaagccttttgaagta

SEQ ID NO: 313186 - DNA, 1747 bp, Homo sapiens
  misc_feature (2)..(2): n is a, c, g, or t
  misc_feature (20)..(20): n is a, c, g, or t
  misc_feature (25)..(25): n is a, c, g, or t
gnggatcccttgggctgtangaatncggattgaggagcatgccatacaagatttattggttttctatgaggcatttggcaaccctgaagagtttgtcattgttgaaaggacaccgcagggaccactggcagtacctatgtggaataagcatggatgctagttcactgtggagttgagatgcattttacataattatgagtttgttcatataaagaaaagctgtggaaaagagtcttagagattttgtaatatcattctaaatagattaagaaaagatataatttctttactgcagttaaatcatataatgtttgtatgattaaaaataaatttctcagaattgtgattttagtaactttatataaaatgtgtgagacaaaaacttattaaggttaaatagaattgtttcttctgaataatctaacaaaggaaaatataagtgattgaatcataagatataaggggggtaaagtattaaaaataacttttttgtttgataacttgagaatttagaagattttgccaagtatgtgttgttgcttgacttcttaaatatggcattgatgaatttaaagtaggagcatcagttattacttctgattcattaatggccagaattttgtgtttggtgtaatagttgtgtcaccattcttgttgctttttaaaaatcaggctaatcatgtggtccatgtctcttcaaagcttgacctgcacaaatgccatatttctatttggaccacatattctccattttgcattgagcagtagagtacagtggaaagggaataagaatactgattattctgaacagtttagtcccaagagaatagcgttttaaaaaagaaaaacaagatttggagtcattgtgggttatttttggtgggatggaggatcttaaaaatgcctaattgtgagagaatcaattgctgaaagtgttaaaatttctgaaaataaatgcttaattacatatacaggaattaaatagtttggaagagggttggattatcattacctttacaatactgtataatcagaagttctctgaacctcaattgtatatctagacataaaaattgttttctgtataggatgttgtttggtttgtttctgagtgtttaaattttgcaaaaacaaatgttaaatttgtgcttcagtacctagataaattggaaaggttaatgttctagtttctggaaggtaagcctgggagacacataagcaattcactgctataatttagttgatgtaaaatgacggaaactgactcaatatgtcaggtttaactctgcccaaaagcagcagacatgtaagcagatgtgcaataaaaaatgatcttgatccatttcaaaaaaaaacaagcaaagaaaacaataaaaaaaaaaaagacaaaaaaaaagaagcaaacaaaagaacagaaacaagaacaaaaagggggggggggagcaaaaaaaatcccacccaggggggacacaatgaagggtcacacaatttttagaaaaagagggccccaatagagaggcgtaaataaaagagaagaggggcgcgtaaaaaacgagcaaaggggaaaacatgacacagaaggaaactctagaagaagaacccacactaagcggggggagagcaacaagtggagaacaaaccgacagaaaacgttacacccgaggagagaaatatacaaaggacggaatataaggatgacaacacaagacaattatgcgcgaaaaaaaagcgcaccagagatattgaa

SEQ ID NO: 313187 - DNA, 1087 bp, Homo sapiens
gggaataatcagtattcttattccctttccactgtactctactgctcaatgcaaaatggagaatatgtggtccaaatagaaatatggcattgtgcaggtcaagcttgaagagacatggaaagggaataagaatactgattattctgaacagtttagtcccaagagaatagcgttttaaaaaagaaaaacaagatttggagtcattgtgggttatttttggtgggatggaggatcttaaaaatgcctaattgtgagagaatcaattgctgaaagtgttaaaatttctgaaaataaatgcttaattacatatacaggaattaaatagtttggaagagggttggattatcattacctttacaatactgtataatcagaagttctctgaacctcaattgtatatctagacataaaaattgttttctgtataggatgttgtttggtttgtttctgagtgtttaaattttgcaaaaacaaatgttaaatttgtgcttcagtacctagataaattggaaaggttaatgttctagtttctggaaggtaagcctgggagacacataagcaattcactgctataatttagttgatgtaaaatgacggaaactgactcaatatgtcaggtttaactctgcccaaaagcagcagacatgtaagcagatgtgcaataaaaaatgatcttgatccatttcaaaaaaaaacaagcaaagaaaacaataaaaaaaaaaaagacaaaaaaaaagaagcaaacaaaagaacagaaacaagaacaaaaagggggggggggagcaaaaaaaatcccacccaggggggacacaatgaagggtcacacaatttttagaaaaagagggccccaatagagaggcgtaaataaaagagaagaggggcgcgtaaaaaacgagcaaaggggaaaacatgacacagaaggaaactctagaagaagaacccacactaagcggggggagagcaacaagtggagaacaaaccgacagaaaacgttacacccgaggagagaaatatacaaaggacggaatataaggatgacaacacaagacaattatgcgcgaaaaaaaagcgcaccagagatattgaa

SEQ ID NO: 313188 - DNA, 1575 bp, Homo sapiens
ccccgttcccgattcctgtagtagcggctgtattgcagccgcctgccgaactgacccgggtctggggactggcccctctggcgccgttcggtttctcttattgccttcactgaggatgagtccctttgtggctctatgtggaccctgcggaatccaccggcgcagtttcatctagcgactggtcacccttgcaattatggatatttaaaagggtcagacagtgtggagggggagttcccctcctcactcccccttggtgcttgactccaggaataatttataaactgtggaatttttttaaatgaagaacttgtatttgatatgaactttatagagctatttataatttttttgatttaagtgccaaaaaattgtataaagatatatagttttatactattgtcaggaggatttaaattatcctaaaaaggtaatttattctctgtaacttcctcaatagcacctttgtgtcctggctttttcattttttaaaattagttttcacgattctgaagtaagtggtataaaaacagttaggatgagttcacccatgcctgactgcacatcaaagtgtcgatccctgaagcatgctttggatgtcctttctgtggtaacaaaggggagcgaaaaccagattaaggcctttctctccagtcattgttacaatgctgcaactatcaaggatgtttttggcaggaatgccctccaccttgtttcctcctgtggaaagaaaggagtgttagattggcttattcagaaaggagtggatctgttggtgaaagacaaagagtctggatggacagcattgcacagaagcattttttatggacatattgattgtgtttggtctctattgaagcatggtgttagtctgtatattcaagataaagaaggcttgtcagctttggatcttgtaatgaaggatagaccaactcatgtagtattcaagaatactgatcctacagatgtttatacttggggcgataatacaaattttaccctgggtcatggaagccagaatagcaaacatcatccagagttggtggatctgttctccaggagtgggatttatatcaagcaggtggtgctttgtaaatttcactccgtgtttctgtctcagaaagggcaggtttatacctgtggtcatggtcctggagggcgattaggacatggagatgaacagacatgcttggtccctcggcttgtggaaggactgaatggtcataattgttcccaagtggcagctgctaaggatcatactgttgtattaactgaagatggatgtgtttatacatttggtctaaacatttttcatcaattaggaattattccaccgccttccagttgtaatgtacccagacagatacaggcaaaatatctgaaaggaaggacaatcattggcgttgcagcaggcaggtttcatacagtcctatggactagagaagctgtttacactatgggactaaatggtggacaactgggttgttttgctgagaatccccagatggaagaaaaacatgttgtagctgcctcctcgtacaggtactctcgccccttccacccatcacaaggaca

SEQ ID NO: 313189 - DNA, 405 bp, Homo sapiens
ttttgctgtggtaatgtgccttttatctaattttgcaaatcttttctttctttgtagttaccctgaagaatgctgctatgctactggaatttgcagcaatgtatagtgcaaaacagttgaaactgtcttgtttacagtttataggattgaatatggcagctttacttgaagcaaggtaggtgaggtgcatatgttgtaagattgttgcaaaaggagatatttatatataatagcagatattattagtgatttaaatgtgaataatgatgtttacctggatggaaagaatttgatcaatgctgatgatttagaagttatgtacattttagaattagagagctcttgaaaacttttgaatgtttttaacagtgatctttttaaaatgaaataaatgtatactttttt

SEQ ID NO: 313190 - DNA, 2218 bp, Homo sapiens
  misc_feature (137)..(137): n is a, c, g, or t
  misc_feature (146)..(146): n is a, c, g, or t
  misc_feature (367)..(367): n is a, c, g, or t
cagacttactgcatctttcttattatttttctgcatttgatgttatagttaattatacatccttttctgggcaatttagcctccataatattatttcttaaatatgtgctaaagatagagttgagttgataatccanctcttgtanaatacagtattacatcccagaaacttgactctaaaatgatcattgtggactattggctacaaaagccaaagagttaaggcttgtgatgcaagttctttttgaaatttgtgatatgttggagggctcatatgtagctattacttgatcattgttagtataaactgatattttcattgttgaaacttgtgagcattttgatccaataatggtaaaataacatnaaataaatagaaaacattattattaccagtaacctttattaagcagaaattaatgttaattgatataatttctagaaaaatgattgcattgactaccaaggaaaacaattcaggaatgaatagcatggaaacagttttattcactccttcaaaagcccccaaaccagtgaatgcatgggcatcttctctgcattcagtttcatccaagtcattccgggatttcttactagaagaaaaaaagtctgttactagccatagttcaggcgatcatgtcaaaaaagtttcttttaaaggaattgaaaattctcaggcaccaaaaattgtcagatgctctacccatggtaccccaggaccagaaggcaaccatatttcagatttaccacttctagacagtcccaatccctggctatcttcttcagtgactgctccatccatggtagccccagtcacttttgcatctattgtagaagaagaactacaacaagaagcagctcttattagaagtcgagaaaaaccgttggctctgattcagattgaggagcatgccatacaagatttattggttttctatgaggcatttggcaaccctgaagagtttgtcattgttgaaaggacaccgcagggaccactggcagtacctatgtggaataagcatggatgctagttcactgtggagttgagatgcattttacataattatgagtttgttcatataaagaaaagctgtggaaaagagtcttagagattttgtaatatcattctaaatagattaagaaaagatataatttctttactgcagttaaatcatataatgtttgtatgattaaaaataaatttctcagaattgtgattttagtaactttatataaaatgtgtgagacaaaaacttattaaggttaaatagaattgtttcttctgaataatctaacaaaggaaaatataagtgattgaatcataagatataaggggggtaaagtattaaaaataacttttttgtttgataacttgagaatttagaagattttgccaagtatgtgttgttgcttgacttcttaaatatggcattgatgaatttaaagtaggagcatcagttattacttctgattcattaatggccagaattttgtgtttggtgtaatagttgtgtcaccattcttgttgctttttaaaaatcaggctaatcatgtggtccatgtctcttcaaagcttgacctgcacaaatgccatatttctatttggaccacatattctccattttgcattgagcagtagagtacagtggaaagggaataagaatactgattattctgaacagtttagtcccaagagaatagcgttttaaaaaagaaaaacaagatttggagtcattgtgggttatttttggtgggatggaggatcttaaaaatgcctaattgtgagagaatcaattgctgaaagtgttaaaatttctgaaaataaatgcttaattacatatacaggaattaaatagtttggaagagggttggattatcattacctttacaatactgtataatcagaagttctctgaacctcaattgtatatctagacataaaaattgttttctgtataggatgttgtttggtttgtttctgagtgtttaaattttgcaaaaacaaatgttaaatttgtgcttcagtacctagataaattggaaaggttaatgttctagtttctggaaggtaagcctgggagacacataagcaattcactgctataatttagttgatgtaaaatgacggaaactgactcaatatgtcaggtttaactctgcccaaaagcagcagacatgtaagcagatgtgcaataaaaaatgatcttgatccatttca

SEQ ID NO: 313191 - DNA, 6187 bp, Homo sapiens
ccccgttcccgattcctgtagtagcggctgtattgcagccgcctgccgaactgacccgggtctggggactggcccctctggcgccgttcggtttctcttattgccttcactgaggatgagtccctttgtggctctatgtggaccctgcggaatccaccggcgcagtttcatctagcgactggtcacccttgcaattatggatatttaaaagggtcagacagtgtggagggggagttcccctcctcactcccccttggtgcttgactccaggaataatttataaactgtggaatttttttaaatgaagaacttgtatttgatatgaactttatagagctatttataatttttttgatttaagtgccaaaaaattgtataaagatatatagttttatactattgtcaggaggatttaaattatcctaaaaaggtaatttattctctgtaacttcctcaatagcacctttgtgtcctggctttttcattttttaaaattagttttcacgattctgaagtaagtggtataaaaacagttaggatgagttcacccatgcctgactgcacatcaaagtgtcgatccctgaagcatgctttggatgtcctttctgtggtaacaaaggggagcgaaaaccagattaaggcctttctctccagtcattgttacaatgctgcaactatcaaggatgtttttggcaggaatgccctccaccttgtttcctcctgtggaaagaaaggagtgttagattggcttattcagaaaggagtggatctgttggtgaaagacaaagagtctggatggacagcattgcacagaagcattttttatggacatattgattgtgtttggtctctattgaagcatggtgttagtctgtatattcaagataaagaaggcttgtcagctttggatcttgtaatgaaggatagaccaactcatgtagtattcaagaatactgatcctacagatgtttatacttggggcgataatacaaattttaccctgggtcatggaagccagaatagcaaacatcatccagagttggtggatctgttctccaggagtgggatttatatcaagcaggtggtgctttgtaaatttcactccgtgtttctgtctcagaaagggcaggtttatacctgtggtcatggtcctggagggcgattaggacatggagatgaacagacatgcttggtccctcggcttgtggaaggactgaatggtcataattgttcccaagtggcagctgctaaggatcatactgttgtattaactgaagatggatgtgtttatacatttggtctaaacatttttcatcaattaggaattattccaccgccttccagttgtaatgtacccagacagatacaggcaaaatatctgaaaggaaggacaatcattggcgttgcagcaggcaggtttcatacagtcctatggactagagaagctgtttacactatgggactaaatggtggacaactgggttgtttgctagatcccaatggagaaaagtgtgtaactgctcctcgtcaggtctctgcccttcaccataaagacattgctctgtctttggttgctgcaagtgatggagctacagtctgtgttaccacaaggggagatatttacttacttgcagactatcagtgcaagaagatggcttctaaacagttgaacttgaaaaaagttcttgtgtctgggggtcatatggaatacaaggttgatcctgaacatttgaaagaaaatgggggtcaaaaaatttgcattcttgcaatggatggagctggaagggtgttttgctggagatcagtcaacagttctctgaagcagtgtcgatgggcctatccacgtcaggtcttcatttctgatattgctttaaatagaaatgaaattctatttgttacgcaagatggagaaggatttagagggagatggtttgaagagaaaagaaagagttctgaaaagaaagagattttatcaaaccttcacaattcctcatcagatgtgtcttatgtctctgatataaatagtgtgtatgaaagaattcgacttgagaaacttacctttgcacatagagctgttagtgtcagcacagatccaagtggatgcaactttgcaatcctgcagtcagatcctaaaacaagcctttatgaaattccagctgtgtcctcatcatccttttttgaagagtttggcaaactgttgagggaagcagatgaaatggacagcattcatgatgtgacatttcaagttggcaatagactcttccctgcacataaatatattttggcagtgcattctgatttttttcagaaattgtttctttcagatggtaatacttcagaatttacagatatttaccagaaagatgaagattctgcagggtgccatctctttgtggtagagaaggttcatcctgacatgtttgaataccttttacaatttatatacacagatacttgtgactttttaactcatggcttcaaaccaagaatacacttaaacaaaaacccagaagaatatcagggaactctgaattctcatttgaataaagtgaatttccatgaagatgataaccagaagtctgcatttgaagtttacaaaagtaatcaagctcaaacagttagtgagaggcagaagagcaaacctaaatcttgtaaaaaaggaaaaaatattagggaagatgatcctgtaagaatgttgcaaactgttgcaaagaaattcgacttcagtaatttgagtagtaggttagatggagtcagatttgaaaatgaaaaaattaatgttattgccaagaacactggtaataaactgaagctaagtcagaaaaaatgttcatttctgtgtgacgtgaccatgaaatcagtggatggaaaggaatttccttgtcataaatgtgttctttgtgctagacttgaatattttcatagtatgctgagtagctcatggattgaggcttccagttgtgcagctctggaaatgccaatacattctgatatattaaaagttattttggactacctctatactgatgaagctgtggtgataaaagaatctcaaaatgtagattttatttgtagtgttcttgtggtggctgatcaacttctcataacccggttgaaagagatttgtgaagtagcattaactgaaaaacttaccctgaagaatgctgctatgctactggaatttgcagcaatgtatagtgcaaaacagttgaaactgtcttgtttacagtttataggattgaatatggcagctttacttgaagcaaggtctcttgatgttttaagcgatggtgttttgaaggatctttctgagttttaccggaaaatgattccagcaatggatagaagagtcattacaccatatcaagatggaccagatattagctatttggaagtagaagatggagatatcttcttgaaagaagaaataaatatggaacaaaatcattcggaaactatgttcaagaaagcaaaaacaaaagctaaaaagaagccacgtaaacgttcagatagttctggaggttataacctttcagatattattcagagtccatcatctacaggattattaaagtctggtaagaccaattctgtggaatctcttccagaactgttgacatcagactctgaaggaagctatgcaggagtgggtagtcctagagatttacagtcccctgatttcacaacaggatttcattcagataagattgaggcgaaagtcaaaccgtatgttaatggtacatctcctgtgtattctagggaagatttaaaaccatgggaaaagtcaccaatacttaaaatatctgctccacagcctattcccagtaacagaattgatactaccagctctgccagttgggttgctggttctttcagtcctgtcagccctcctgttgtggatctcagaactatcatggaaatagaagaaagtagacaaaaatgtggagctacaccaaagtcacatttaggcaaaacagtttctcatggagttaaactttctcagaagcaacgaaaaatgattgcattgactaccaaggaaaacaattcaggaatgaatagcatggaaacagttttattcactccttcaaaagcccccaaaccagtgaatgcatgggcatcttctctgcattcagtttcatccaagtcattccgggatttcttactagaagaaaaaaagtctgttactagccatagttcaggcgatcatgtcaaaaaagtttcttttaaaggaattgaaaattctcaggcaccaaaaattgtcagatgctctacccatggtaccccaggaccagaaggcaaccatatttcagatttaccacttctagacagtcccaatccctggctatcttcttcagtgactgctccatccatggtagccccagtcacttttgcatctattgtagaagaagaactacaacaagaagcagctcttattagaagtcgagaaaaaccgttggctctgattcagattgaggagcatgccatacaagatttattggttttctatgaggcatttggcaaccctgaagagtttgtcattgttgaaaggacaccgcagggaccactggcagtacctatgtggaataagcatggatgctagttcactgtggagttgagatgcattttacataattatgagtttgttcatataaagaaaagctgtggaaaagagtcttagagattttgtaatatcattctaaatagattaagaaaagatataatttctttactgcagttaaatcatataatgtttgtatgattaaaaataaatttctcagaattgtgattttagtaactttatataaaatgtgtgagacaaaaacttattaaggttaaatagaattgtttcttctgaataatctaacaaaggaaaatataagtgattgaatcataagatataaggggggtaaagtattaaaaataacttttttgtttgataacttgagaatttagaagattttgccaagtatgtgttgttgcttgacttcttaaatatggcattgatgaatttaaagtaggagcatcagttattacttctgattcattaatggccagaattttgtgtttggtgtaatagttgtgtcaccattcttgttgctttttaaaaatcaggctaatcatgtggtccatgtctcttcaaagcttgacctgcacaaatgccatatttctatttggaccacatattctccattttgcattgagcagtagagtacagtggaaagggaataagaatactgattattctgaacagtttagtcccaagagaatagcgttttaaaaaagaaaaacaagatttggagtcattgtgggttatttttggtgggatggaggatcttaaaaatgcctaattgtgagagaatcaattgctgaaagtgttaaaatttctgaaaataaatgcttaattacatatacaggaattaaatagtttggaagagggttggattatcattacctttacaatactgtataatcagaagttctctgaacctcaattgtatatctagacataaaaattgttttctgtataggatgttgtttggtttgtttctgagtgtttaaattttgcaaaaacaaatgttaaatttgtgcttcagtacctagataaattggaaaggttaatgttctagtttctggaaggtaagcctgggagacacataagcaattcactgctataatttagttgatgtaaaatgacggaaactgactcaatatgtcaggtttaactctgcccaaaagcagcagacatgtaagcagatgtgcaataaaaaatgatcttgatccatttcaaaaaaaaacaagcaaagaaaacaataaaaaaaaaaaagacaaaaaaaaagaagcaaacaaaagaacagaaacaagaacaaaaagggggggggggagcaaaaaaaatcccacccaggggggacacaatgaagggtcacacaatttttagaaaaagagggccccaatagagaggcgtaaataaaagagaagaggggcgcgtaaaaaacgagcaaaggggaaaacatgacacagaaggaaactctagaagaagaacccacactaagcggggggagagcaacaagtggagaacaaaccgacagaaaacgttacacccgaggagagaaatatacaaaggacggaatataaggatgacaacacaagacaattatgcgcgaaaaaaaagcgcaccagagatattgaa

SEQ ID NO: 313192 - DNA, 6139 bp, Homo sapiens
ccccgttcccgattcctgtagtagcggctgtattgcagccgcctgccgaactgacccgggtctggggactggcccctctggcgccgttcggtttctcttattgccttcactgaggatgagtccctttgtggctctatgtggaccctgcggaatccaccggcgcagtttcatctagcgactggtcacccttgcaattatggatatttaaaagggtcagacagtgtggagggggagttcccctcctcactcccccttggtgcttgactccaggaataatttataaactgtggaatttttttaaatgaagaacttgtatttgatatgaactttatagagctatttataatttttttgatttaagtgccaaaaaattgtataaagatatatagttttatactattgtcaggaggatttaaattatcctaaaaaggtaatttattctctgtaacttcctcaatagcacctttgtgtcctggctttttcattttttaaaattagttttcacgattctgaagtaagtggtataaaaacagttaggatgagttcacccatgcctgactgcacatcaaagtgtcgatccctgaagcatgctttggatgtcctttctgtggtaacaaaggggagcgaaaaccagattaaggcctttctctccagtcattgttacaatgctgcaactatcaaggatgtttttggcaggaatgccctccaccttgtttcctcctgtggaaagaaaggagtgttagattggcttattcagaaaggagtggatctgttggtgaaagacaaagagtctggatggacagcattgcacagaagcattttttatggacatattgattgtgtttggtctctattgaagcatggtgttagtctgtatattcaagataaagaaggcttgtcagctttggatcttgtaatgaaggatagaccaactcatgtagtattcaagaatactgatcctacagatgtttatacttggggcgataatacaaattttaccctgggtcatggaagccagaatagcaaacatcatccagagttggtggatctgttctccaggagtgggatttatatcaagcaggtggtgctttgtaaatttcactccgtgtttctgtctcagaaagggcaggtttatacctgtggtcatggtcctggagggcgattaggacatggagatgaacagacatgcttggtccctcggcttgtggaaggactgaatggtcataattgttcccaagtggcagctgctaaggatcatactgttgtattaactgaagatggatgtgtttatacatttggtctaaacatttttcatcaattaggaattattccaccgccttccagttgtaatgtacccagacagatacaggcaaaatatctgaaaggaaggacaatcattggcgttgcagcaggcaggtttcatacagtcctatggactagagaagctgtttacactatgggactaaatggtggacaactgggttgtttgctagatcccaatggagaaaagtgtgtaactgctcctcgtcaggtctctgcccttcaccataaagacattgctctgtctttggttgctgcaagtgatggagctacagtctgtgttaccacaaggggagatatttacttacttgcagactatcagtgcaagaagatggcttctaaacagttgaacttgaaaaaagttcttgtgtctgggggtcatatggaatacaaggttgatcctgaacatttgaaagaaaatgggggtcaaaaaatttgcattcttgcaatggatggagctggaagggtgttttgctggagatcagtcaacagttctctgaagcagtgtcgatgggcctatccacgtcaggtcttcatttctgatattgctttaaatagaaatgaaattctatttgttacgcaagatggagaaggatttagagggagatggtttgaagagaaaagaaagagttctgaaaagaaagagattttatcaaaccttcacaattcctcatcagatgtgtcttatgtctctgatataaatagtgtgtatgaaagaattcgacttgagaaacttacctttgcacatagagctgttagtgtcagcacagatccaagtggatgcaactttgcaatcctgcagtcagatcctaaaacaagcctttatgaaattccagctgtgtcctcatcatccttttttgaagagtttggcaaactgttgagggaagcagatgaaatggacagcattcatgatgtgacatttcaagttggcaatagactcttccctgcacataaatatattttggcagtgcattctgatttttttcagaaattgtttctttcagatggtaatacttcagaatttacagatatttaccagaaagatgaagattctgcagggtgccatctctttgtggtagagaaggttcatcctgacatgtttgaataccttttacaatttatatacacagatacttgtgactttttaactcatggcttcaaaccaagaatacacttaaacaaaaacccagaagaatatcagggaactctgaattctcatttgaataaagtgaatttccatgaagatgataaccagaagtctgcatttgaagtttacaaaagtaatcaagctcaaacagttagtgagaggcagaagagcaaacctaaatcttgtaaaaaaggaaaaaatattagggaagatgatcctgtaagaatgttgcaaactgttgcaaagaaattcgacttcagtaatttgagtagtaggttagatggagtcagatttgaaaatgaaaaaattaatgttattgccaagaacactggtaataaactgaagctaagtcagaaaaaatgttcatttctgtgtgacgtgaccatgaaatcagtggatggaaaggaatttccttgtcataaatgtgttctttgtgctagacttgaatattttcatagtatgctgagtagctcatggattgaggcttccagttgtgcagctctggaaatgccaatacattctgatatattaaaagttattttggactacctctatactgatgaagctgtggtgataaaagaatctcaaaatgtagattttatttgtagtgttcttgtggtggctgatcaacttctcataacccggttgaaagagatttgtgaagtagcattaactgaaaaacttaccctgaagaatgctgctatgctactggaatttgcagcaatgtatagtgcaaaacagttgaaactgtcttgtttacagtttataggattgaatatggcagctttacttgaagcaaggtctcttgatgttttaagcgatggtgttttgaaggatctttctgagttttaccggaaaatgattccagcaatggatagaagagtcattacaccatatcaagatggaccagatattagctatttggaagtagaagatggagatatcttcttgaaagaagaaataaatatggaacaaaatcattcggaaactatgttcaagaaagcaaaaacaaaagctaaaaagaagccacgtaaacgttcagatagttctggaggttataacctttcagatattattcagagtccatcatctacaggattattaaagtctggtaagaccaattctgtggaatctcttccagaactgttgacatcagactctgaaggaagctatgcaggagtgggtagtcctagagatttacagtcccctgatttcacaacaggatttcattcagataagattgaggcgaaagtcaaaccgtatgttaatggtacatctcctgtgtattctagggaagatttaaaaccatgggaaaagtcaccaatacttaaaatatctgctccacagcctattcccagtaacagaattgatactaccagctctgccagttgggttgctggttctttcagtcctgtcagccctcctgttgtggatctcagaactatcatggaaatagaagaaagtagacaaaaatgtggagctacaccaaagtcacatttaggcaaaacagtttctcatggagttaaactttctcagaagcaacgaaaaatgattgcattgactaccaaggaaaacaattcaggaatgaatagcatggaaacagttttattcactccttcaaaagcccccaaaccagtgaatgcatgggcatcttctctgcattcagtttcatccaagtcattccgggatttcttactagaagaaaaaaagtctgttactagccatagttcaggcgatcatgtcaaaaaagtttcttttaaaggaattgaaaattctcaggcaccaaaaattgtcagatgctctacccatggtaccccaggaccagaaggcaaccatatttcagatttaccacttctagacagtcccaatccctggctatcttcttcagtgactgctccatccatggtagccccagtcacttttgcatctattgtagaagaagaactacaacaagaagcagctcttattagaagtcgagaaaaaccgttggctctgattcagattgaggagcatgccatacaagatttattggttttctatgaggcatttggcaaccctgaagagtttgtcattgttgaaaggacaccgcagggaccactggcagtacctatgtggaataagcatggatgctagttcactgtggagttgagatgcattttacataattatgagtttgttcatataaagaaaagctgtggaaaagagtcttagagattttgtaatatcattctaaatagattaagaaaagatataatttctttactgcagttaaatcatataatgtttgtatgattaaaaataaatttctcagaattgtgattttagtaactttatataaaatgtgtgagacaaaaacttattaaggttaaatagaattgtttcttctgaataatctaacaaaggaaaatataagtgattgaatcataagatataaggggggtaaagtattaaaaataacttttttgtttgataacttgagaatttagaagattttgccaagtatgtgttgttgcttgacttcttaaatatggcattgatgaatttaaagtaggagcatcagttattacttctgattcattaatggccagaattttgtgtttggtgtaatagttgtgtcaccattcttgttgctttttaaaaatcaggctaatcatgtggtccatgtctcttcaaagcttgacctgcacaaatgccatatttctatttggaccacatattctccattttgcattgagcagtagagtacagtggaaagggaataagaatactgattattctgaacagtttagtcccaagagaatagcgttttaaaaaagaaaaacaagatttggagtcattgtgggttatttttggtgggatggaggatcttaaaaatgcctaattgtgagagaatcaattgctgaaagtgttaaaatttctgaaaataaatgcttaattacatatacaggaattaaatagtttggaagagggttggattatcattacctttacaatactgtataatcagaagttctctgaacctcaattgtatatctagacataaaaattgttttctgtataggatgttgtttggtttgtttctgagtgtttaaattttgcaaaaacaaatgttaaatttgtgcttcagtacctagataaattggaaaggttaatgttctagtttctggaaggtaagcctgggagacacataagcaattcactgctataatttagttgatgtaaaatgacggaaactgactcaatatgtcaggtttaactctgcccaaaagcagcagacatgtaagcagatgtgcaataaaaaatgatcttgatccatttcaaaaaaaaaccacacacaccaacaaaacaaaaaaccacacacacacccatcaccaaaaacccacccacaaacgcgacagaccaacagacacaaaccacgaccaaaacggcgcccccaatatacagacgcgagcgacagcaacacaccagctaacgacgacacccacactgaagaaataacagcaacgccccaaaaccaacgagaaaacaacgaccataactcgaacaccatggtcgacagaagcacacacaaacccgacaaaatcagtggaaccacatcgcgaacgcgacaaacccgcgcacgccggaagagcagaaaccaacacgagacaccgacactgtcccccatatccc

SEQ ID NO: 313193 - DNA, 1987 bp, Homo sapiens
acctctgcctcctgggttcaagcgattctcctgcctccgccaccctagtagctgggattacagatgctctacccatggtaccccaggaccagaaggcaaccatatttcagatttaccacttctagacagtcccaatccctggctatcttcttcagtgactgctccatccatggtagccccagtcacttttgcatctattgtagaagaagaactacaacaagaagcagctcttattagaagtcgagaaaaaccgttggctctgattcagattgaggagcatgccatacaagatttattggttttctatgaggcatttggcaaccctgaagagtttgtcattgttgaaaggacaccgcagggaccactggcagtacctatgtggaataagcatggatgctagttcactgtggagttgagatgcattttacataattatgagtttgttcatataaagaaaagctgtggaaaagagtcttagagattttgtaatatcattctaaatagattaagaaaagatataatttctttactgcagttaaatcatataatgtttgtatgattaaaaataaatttctcagaattgtgattttagtaactttatataaaatgtgtgagacaaaaacttattaaggttaaatagaattgtttcttctgaataatctaacaaaggaaaatataagtgattgaatcataagatataaggggggtaaagtattaaaaataacttttttgtttgataacttgagaatttagaagattttgccaagtatgtgttgttgcttgacttcttaaatatggcattgatgaatttaaagtaggagcatcagttattacttctgattcattaatggccagaattttgtgtttggtgtaatagttgtgtcaccattcttgttgctttttaaaaatcaggctaatcatgtggtccatgtctcttcaaagcttgacctgcacaaatgccatatttctatttggaccacatattctccattttgcattgagcagtagagtacagtggaaagggaataagaatactgattattctgaacagtttagtcccaagagaatagcgttttaaaaaagaaaaacaagatttggagtcattgtgggttatttttggtgggatggaggatcttaaaaatgcctaattgtgagagaatcaattgctgaaagtgttaaaatttctgaaaataaatgcttaattacatatacaggaattaaatagtttggaagagggttggattatcattacctttacaatactgtataatcagaagttctctgaacctcaattgtatatctagacataaaaattgttttctgtataggatgttgtttggtttgtttctgagtgtttaaattttgcaaaaacaaatgttaaatttgtgcttcagtacctagataaattggaaaggttaatgttctagtttctggaaggtaagcctgggagacacataagcaattcactgctataatttagttgatgtaaaatgacggaaactgactcaatatgtcaggtttaactctgcccaaaagcagcagacatgtaagcagatgtgcaataaaaaatgatcttgatccatttcaaaaaaaaacaagcaaagaaaacaataaaaaaaaaaaagacaaaaaaaaagaagcaaacaaaagaacagaaacaagaacaaaaagggggggggggagcaaaaaaaatcccacccaggggggacacaatgaagggtcacacaatttttagaaaaagagggccccaatagagaggcgtaaataaaagagaagaggggcgcgtaaaaaacgagcaaaggggaaaacatgacacagaaggaaactctagaagaagaacccacactaagcggggggagagcaacaagtggagaacaaaccgacagaaaacgttacacccgaggagagaaatatacaaaggacggaatataaggatgacaacacaagacaattatgcgcgaaaaaaaagcgcaccagagatattgaa

SEQ ID NO: 313194 - DNA, 749 bp, Homo sapiens
  misc_feature (18)..(18): n is a, c, g, or t
  misc_feature (20)..(20): n is a, c, g, or t
atccttaattaaattaancncccccccccgaggggagcagggcggggcctgagcactaggcggcggcggctggcgtggggctgcttagatgcgccacggtttcggtagcgacggtagctctagccgggcctgagctgtgctagcacctcccccaggagaccgttgcagtcggccagcccccttctccacggtaaccatgtgcgaccgaaaggccgtgatcaaaaatgcggacatgtcggaagagatgcaacaggactcggtggagtgcgctactcaggcgctggagaaatacaacatagagaaggacattgcggctcatatcaagaaggaatttgacaagaagtacaatcccacctggcattgcatcgtggggaggaacttcggtagttatgtgacacatgaaaccaaacacttcatctacttctacctgggccaagtggccattcttctgttcaaatctggttaaaagcatggactgtgccacacacccagtgatccatccaaaaacaaggactgcagcctaaattccaaataccagagactgaaattttcagccttgctaagggaacatctcgatgtttgaacctttgttgtgttttgtacagggcattctctgtactagtttgtcgtggttataaaacaattagcagaatagcctacatttgtatttattttctattccatacttctgcccacgttgttttctctcaaaatccattcctttaaaaaataaatctgatgcagatgtg

SEQ ID NO: 313195 - DNA, 721 bp, Homo sapiens
  misc_feature (18)..(18): n is a, c, g, or t
  misc_feature (20)..(20): n is a, c, g, or t
atccttaattaaattaancncccccccccgagcacggtttcggtagcgacggtagctctagccgggcctgagctgtgctagcacctcccccaggagaccgttgcagtcggccagcccccttctccacggtaaccatgtgcgaccgaaaggccgtgatcaaaaatgcggacatgtcggaagagatgcaacaggactcggtggagtgcgctactcaggcgctggagaaatacaacatagagaaggacattgcggctcatatcaagaaggaatttgacaagaagtacaatcccacctggcattgcatcgtggggaggaacttcggtagttatgtgacacatgaaaccaaacacttcatctacttctacctgggccaagtggccattcttctgttcaaatctggttaaaagcatggactgtgccacacacccagtgatccatccaaaaacaaggactgcagcctaaattccaaataccagagactgaaattttcagccttgctaagggaacatctcgatgtttgaacctttgttgtgttttgtacagggcattctctgtactagtttgtcgtggttataaaacaattagcagaatagcctacatttgtatttattttctattccatacttctgcccacgttgttttctctcaaaatccattcctttaaaaaataaatctgatgcagatgtgaactggccgtccgttacaacgtcgggctgggcct

SEQ ID NO: 313196 - DNA, 687 bp, Homo sapiens
  misc_feature (18)..(18): n is a, c, g, or t
  misc_feature (20)..(20): n is a, c, g, or t
atccttaattaaattaancncccccccccgagcacggtttcggtagcgacggtagctctagccgggcctgagctgtgctagcacctcccccaggagaccgttgcagtcggccagcccccttctccacggtaaccatgtgcgaccgaaaggccgtgatcaaaaatgcggacatgtcggaagagatgcaacaggactcggtggagtgcgctactcaggcgctggagaaatacaacatagagaaggacattgcggctcatatcaagaaggaatttgacaagaagtacaatcccacctggcattgcatcgtggggaggaacttcggtagttatgtgacacatgaaaccaaacacttcatctacttctacctgggccaagtggccattcttctgttcaaatctggttaaaagcatggactgtgccacacacccagtgatccatccaaaaacaaggactgcagcctaaattccaaataccagagactgaaattttcagccttgctaagggaacatctcgatgtttgaacctttgttgtgttttgtacagggcattctctgtactagtttgtcgtggttataaaacaattagcagaatagcctacatttgtatttattttctattccatacttctgcccacgttgttttctctcaaaatccattcctttaaaaaataaatctgatgcagatgtg

SEQ ID NO: 313197 - DNA, 708 bp, Homo sapiens
ggacgcgtgggtcgacccacgcgtccggacccacgcgtgcgcggacgcgtgggcacggtttcggtagcgacggtagctctagccgggcctgagctgtgctagcacctcccccaggagaccgttgcagtcggccagcccccttctccacggtaaccatgtgcgaccgaaaggccgtgatcaaaaatgcggacatgtcggaagagatgcaacaggactcggtggagtgcgctactcaggcgctggagaaatacaacatagagaaggacattgcggctcatatcaagaaggaatttgacaagaagtacaatcccacctggcattgcatcgtggggaggaacttcggtagttatgtgacacatgaaaccaaacacttcatctacttctacctgggccaagtggccattcttctgttcaaatctggttaaaagcatggactgtgccacacacccagtgatccatccaaaaacaaggactgcagcctaaattccaaataccagagactgaaattttcagccttgctaagggaacatctcgatgtttgaacctttgttgtgttttgtacagggcattctctgtactagtttgtcgtggttataaaacaattagcagaatagcctacatttgtatttattttctattccatacttctgcccacgttgttttctctcaaaatccattcctttaaaaaataaatctgatgcagatgtg

SEQ ID NO: 313198 - DNA, 678 bp, Homo sapiens
acggagtaagtaaatggggctcgtcacaattggcacagggcggaccacggctaacgggcttaactgtgctagcacctcccccaggagaccgttgcagtcggccagcccccttctccacggtaaccatgtgcgaccgaaaggccgtgatcaaaaatgcggacatgtcggaagagatgcaacaggactcggtggagtgcgctactcaggcgctggagaaatacaacatagagaaggacattgcggctcatatcaagaaggaatttgacaagaagtacaatcccacctggcattgcatcgtggggaggaacttcggtagttatgtgacacatgaaaccaaacacttcatctacttctacctgggccaagtggccattcttctgttcaaatctggttaaaagcatggactgtgccacacacccagtgatccatccaaaaacaaggactgcagcctaaattccaaataccagagactgaaattttcagccttgctaagggaacatctcgatgtttgaacctttgttgtgttttgtacagggcattctctgtactagtttgtcgtggttataaaacaattagcagaatagcctacatttgtatttattttctattccatacttctgcccacgttgttttctctcaaaatccattcctttaaaaaataaatctgatgcagatgtg

SEQ ID NO: 313199 - DNA, 775 bp, Homo sapiens
  misc_feature (18)..(18): n is a, c, g, or t
  misc_feature (20)..(20): n is a, c, g, or t
atccttaattaaattaancncccccccccgagcacggtttcggtagcgacggtagctctagccgggcctgagctgtgctagcacctcccccaggagaccgttgcagtcggccagcccccttctccacggtaaccatgtgcgaccgaaaggccgtgatcaaaaatgcggacatgtcggaagagatgcaacaggactcggtggagtgcgctactcaggcgctggagaaatacaacatagagaaggacattgcggctcatatcaagaaggaatttgacaagaagtacaatcccacctggcattgcatcgtggggaggaacttcggtagttatgtgacacatgaaaccaaacacttcatctacttctacctgggccaagtggccattcttctgttcaaatctggttaaaagcatggactgtgccacacacccagtgatccatccaaaaacaaggactgcagcctaaattccaaataccagagactgaaattttcagccttgctaagggaacatctcgatgtttgaacctttgttgtgttttgtacagggcattctctgtactagtttgtcgtggttataaaacaattagcagaatagcctacatttgtatttattttctattccatacttctgcccacgttgttttctctcaaaatccattcctttaaaaaataaatctgatgcagatgtgcacaacacaaaacaaacaaaaaaattgtgggcgccggccgaaaagttttaaacactccgggggggggggccaagttatgaaagggtcg

SEQ ID NO: 313200 - DNA, 815 bp, Homo sapiens
gctgagcagggagagcctggggccgggccgtgtggatgccatccccgagcgcggttcgcgctcggctgaggcgctggacaagtggcttgggctcccgcgcctcagtttctctctgtggcgccgcctacctcacagacttgtgagcactcactgacgtgggtagcgcccagggcctgcggggcgcaggagagctggagtcaggcggagaccgcaggctgaccccgcagcggccgggctgtcgcggcccccacctcaggtaaccatgtgcgaccgaaaggccgtgatcaaaaatgcggacatgtcggaagagatgcaacaggactcggtggagtgcgctactcaggcgctggagaaatacaacatagagaaggacattgcggctcatatcaagaaggaatttgacaagaagtacaatcccacctggcattgcatcgtggggaggaacttcggtagttatgtgacacatgaaaccaaacacttcatctacttctacctgggccaagtggccattcttctgttcaaatctggttaaaagcatggactgtgccacacacccagtgatccatccaaaaacaaggactgcagcctaaattccaaataccagagactgaaattttcagccttgctaagggaacatctcgatgtttgaacctttgttgtgttttgtacagggcattctctgtactagtttgtcgtggttataaaacaattagcagaatagcctacatttgtatttattttctattccatacttctgcccacgttgttttctctcaaaatccattcctttaaaaaataaatctgatgcagatgtg

SEQ ID NO: 313201 - DNA, 659 bp, Homo sapiens
ggctgacctttcgtcctttgacctcctcagcctccattcccatcttcgctcagactgcaagtatgtttgtattaatgtactatgtaggcggcttggagctggggaacattctttcattctaagaatttgcagatgctgacgttcctcctttctgcccctacaggctctggcttatccaagaggcaaacactgacctctggtaattaaaatcctagttcttttcttttgtcttttccaggaatttgacaagaagtacaatcccacctggcattgcatcgtggggaggaacttcggtagttatgtgacacatgaaaccaaacacttcatctacttctacctgggccaagtggccattcttctgttcaaatctggttaaaagcatggactgtgccacacacccagtgatccatccaaaaacaaggactgcagcctaaattccaaataccagagactgaaattttcagccttgctaagggaacatctcgatgtttgaacctttgttgtgttttgtacagggcattctctgtactagtttgtcgtggttataaaacaattagcagaatagcctacatttgtatttattttctattccatacttctgcccacgttgttttctctcaaaatccattcctttaaaaaataaatctgatgcagatgtg

SEQ ID NO: 313202 - DNA, 407 bp, Homo sapiens
  misc_feature (13)..(13): n is a, c, g, or t
  misc_feature (36)..(36): n is a, c, g, or t
  misc_feature (44)..(44): n is a, c, g, or t
gcacgaggtttgncgtggttataaaacaattagcangaatcccntgtacaaaacacatgaaaccaaacacttcatctacttctacctgggccaagtggccattcttctgttcaaatctggttaaaagcatggactgtgccacacacccagtgatccatccaaaaacaaggactgcagcctaaattccaaataccagagactgaaattttcagccttgctaagggaacatctcgatgtttgaacctttgttgtgttttgtacagggcattctctgtactagtttgtcgtggttataaaacaattagcagaatagcctacatttgtatttattttctattccatacttctgcccacgttgttttctctcaaaatccattcctttaaaaaataaatctgatgcagatgtg

SEQ ID NO: 313203 - DNA, 338 bp, Homo sapiens
gcggccgcctactactactactactgctcgaattcaagcttctaacgatgtacggggacatggactgtgccacacacccagtgatccatccaaaaacaaggactgcagcctaaattccaaataccagagactgaaattttcagccttgctaagggaacatctcgatgtttgaacctttgttgtgttttgtacagggcattctctgtactagtttgtcgtggttataaaacaattagcagaatagcctacatttgtatttattttctattccatacttctgcccacgttgttttctctcaaaatccattcctttaaaaaataaatctgatgcagatgtg

SEQ ID NO: 313204 - DNA, 429 bp, Homo sapiens
ccgcctactactactaaattcgcggccgcgtcgaccacatagagaaggacattgcggctcaaatcaagaaggaatttgacaagaagtacaatcccacctggcattgcatcgtggggaggaacttcggtagttatgtgacacatgaaaccaaacacttcatctacttctacctgggccaagtggccattcttctgttcaaatctggttaaaagcatggactgtgccacacacccagtgatccatccaaaaacaaggactgcagcctaaattccaaataccagagactgaaattttcagccttgctaagggaacatctcgatgtttgaacctttgttgtgttttgtacagggcattctctgtactagtttgtcgtggttataaaacaattagcagaatagcctaaaaaaaaaagtcgacgcggccgcgaat

SEQ ID NO: 313205 - DNA, 783 bp, Homo sapiens
  misc_feature (18)..(18): n is a, c, g, or t
  misc_feature (20)..(20): n is a, c, g, or t
atccttaattaaattaancncccccccccgaggggagcagggcggggcctgagcactaggcggcggcggctggcgtggggctgcttagatgcgccacggtttcggtagcgacggtagctctagccgggcctgagctgtgctagcacctcccccaggagaccgttgcagtcggccagcccccttctccacggtaaccatgtgcgaccgaaaggccgtgatcaaaaatgcggacatgtcggaagagatgcaacaggactcggtggagtgcgctactcaggcgctggagaaatacaacatagagaaggacattgcggctcatatcaagaaggaatttgacaagaagtacaatcccacctggcattgcatcgtggggaggaacttcggtagttatgtgacacatgaaaccaaacacttcatctacttctacctgggccaagtggccattcttctgttcaaatctggttaaaagcatggactgtgccacacacccagtgatccatccaaaaacaaggactgcagcctaaattccaaataccagagactgaaattttcagccttgctaagggaacatctcgatgtttgaacctttgttgtgttttgtacagggcattctctgtactagtttgtcgtggttataaaacaattagcagaatagcctacatttgtatttattttctattccatacttctgcccacgttgttttctctcaaaatccattcctttaaaaaataaatctgatgcagatgtgaactggccgtccgttacaacgtcgggctgggcct

SEQ ID NO: 313206 - DNA, 784 bp, Homo sapiens
  misc_feature (18)..(18): n is a, c, g, or t
  misc_feature (20)..(20): n is a, c, g, or t
atccttaattaaattaancncccccccccgaggggagcagggcggggcctgagcactaggcggcggcggctggcgtggggctgcttagatgcgccacggtttcggtagcgacggtagctctagccgggcctgagctgtgctagcacctcccccaggagaccgttgcagtcggccagcccccttctccacggtaaccatgtgcgaccgaaaggccgtgatcaaaaatgcggacatgtcggaagagatgcaacaggactcggtggagtgcgctactcaggcgctggagaaatacaacatagagaaggacattgcggctcatatcaagaaggaatttgacaagaagtacaatcccacctggcattgcatcgtggggaggaacttcggtagttatgtgacacatgaaaccaaacacttcatctacttctacctgggccaagtggccattcttctgttcaaatctggttaaaagcatggactgtgccacacacccagtgatccatccaaaaacaaggactgcagcctaaattccaaataccagagactgaaattttcagccttgctaagggaacatctcgatgtttgaacctttgttgtgttttgtacagggcattctctgtactagtttgtcgtggttataaaacaattagcagaatagcctacatttgtatttattttctattccatacttctgcccacgttgttttctctcaaaatccattcctttaaaaaataaatctgatgcagatgtgaaaaaacaaaaatacattaatattcctgcggccga

SEQ ID NO: 313207 - DNA, 1464 bp, Homo sapiens
  misc_feature (18)..(18): n is a, c, g, or t
  misc_feature (20)..(20): n is a, c, g, or t
atccttaattaaattaancncccccccccgaggggagcagggcggggcctgagcactaggcggcggcggctggcgtggggctgcttagatgcgccacggtttcggtagcgacggtagctctagccgggcctgagctgtgctagcacctcccccaggagaccgttgcagtcggccagcccccttctccacggtaaccatgtgcgaccgaaaggccgtgatcaaaaatgcggacatgtcggaagagatgcaacaggactcggtggagtgcgctactcaggcgctggagaaatacaacatagagaaggacattgcggctcatatcaagaaggaatttgacaagaagtacaatcccacctggcattgcatcgtggggaggaacttcggtagttatgtgacacatgaaaccaaacacttcatctacttctacctgggccaagtggccattcttctgttcaaatctggttaaaagcatggactgtgccacacacccagtgatccatccaaaaacaaggactgcagcctaaattccaaataccagagactgaaattttcagccttgctaagggaacatctcgatgtttgaacctttgttgtgttttgtacagggcattctctgtactagtttgtcgtggttataaaacaattagcagaatagcctacatttgtatttattttctattccatacttctgcccacgttgttttctctcaaaatccattcctttaaaaaataaatctgatgcagatgtgaaaaaaaaaaaacaaacaaaacaaaaaaaaaaaaaaaaacaaaaaaaaaaacataaacaaacaaacacaaacaacaaaaagaaccaaagaaagaaaaaaacaaaaaacaaaaaaacagaacaaaaagaaagaagcagcgggagtgccagactgatgaaaaccagctacgagagacacgggagaccatgacagactccaaacaacagacactgatgaagaagagagggcgacgagtgctgacacaaaagcgtgtctaacaacaaacaaagcgaaggcagcgcaggggtacgtcaatagctacagtgaggggacgagagacgaacagacaacaaaagagtagaaagagaggacaaggaaagagagcaagacgacctagaaatgtctagggagtgaggcagaaaggagaaagaagaagacaaaaacaggaagagaaaaataacgagtaggaacgagagaaaccaaaaaagaaagagagaacagaacttaaaaaaaaagagagcaaacaacacaacgaaagactacaatagaaaaagcgatcgcaagcacgacacagcaatgtaagagtaaaagagagactaaaagtaacagttaacaagatacatactaacactagacagcgggccgcggtagagagaatagaaaaagaaaagcaagaaacatgacaaacaaaacaaaaaaatactaaccacccggaagacaagacggacaggaagga

SEQ ID NO: 313208 - DNA, 795 bp, Homo sapiens
  misc_feature (18)..(18): n is a, c, g, or t
  misc_feature (20)..(20): n is a, c, g, or t
atccttaattaaattaancncccccccccgaggggagcagggcggggcctgagcactaggcggcggcggctggcgtggggctgcttagatgcgccacggtttcggtagcgacggtagctctagccgggcctgagctgtgctagcacctcccccaggagaccgttgcagtcggccagcccccttctccacggtaaccatgtgcgaccgaaaggccgtgatcaaaaatgcggacatgtcggaagagatgcaacaggactcggtggagtgcgctactcaggcgctggagaaatacaacatagagaaggacattgcggctcatatcaagaaggaatttgacaagaagtacaatcccacctggcattgcatcgtggggaggaacttcggtagttatgtgacacatgaaaccaaacacttcatctacttctacctgggccaagtggccattcttctgttcaaatctggttaaaagcatggactgtgccacacacccagtgatccatccaaaaacaaggactgcagcctaaattccaaataccagagactgaaattttcagccttgctaagggaacatctcgatgtttgaacctttgttgtgttttgtacagggcattctctgtactagtttgtcgtggttataaaacaattagcagaatagcctacatttgtatttattttctattccatacttctgcccacgttgttttctctcaaaatccattcctttaaaaaataaatctgatgcagatgtgaacaaaaaaaataaataaacttgaggggggggcccggtaccccaaa

SEQ ID NO: 313209 - DNA, 837 bp, Homo sapiens
  misc_feature (18)..(18): n is a, c, g, or t
  misc_feature (20)..(20): n is a, c, g, or t
atccttaattaaattaancncccccccccgaggggagcagggcggggcctgagcactaggcggcggcggctggcgtggggctgcttagatgcgccacggtttcggtagcgacggtagctctagccgggcctgagctgtgctagcacctcccccaggagaccgttgcagtcggccagcccccttctccacggtaaccatgtgcgaccgaaaggccgtgatcaaaaatgcggacatgtcggaagagatgcaacaggactcggtggagtgcgctactcaggcgctggagaaatacaacatagagaaggacattgcggctcatatcaagaaggaatttgacaagaagtacaatcccacctggcattgcatcgtggggaggaacttcggtagttatgtgacacatgaaaccaaacacttcatctacttctacctgggccaagtggccattcttctgttcaaatctggttaaaagcatggactgtgccacacacccagtgatccatccaaaaacaaggactgcagcctaaattccaaataccagagactgaaattttcagccttgctaagggaacatctcgatgtttgaacctttgttgtgttttgtacagggcattctctgtactagtttgtcgtggttataaaacaattagcagaatagcctacatttgtatttattttctattccatacttctgcccacgttgttttctctcaaaatccattcctttaaaaaataaatctgatgcagatgtgcacaacacaaaacaaacaaaaaaattgtgggcgccggccgaaaagttttaaacactccgggggggggggccaagttatgaaagggtcg

SEQ ID NO: 313210 - DNA, 1227 bp, Homo sapiens
  misc_feature (18)..(18): n is a, c, g, or t
  misc_feature (20)..(20): n is a, c, g, or t
atccttaattaaattaancncccccccccgaggggagcagggcggggcctgagcactaggcggcggcggctggcgtggggctgcttagatgcgccacggtttcggtagcgacggtagctctagccgggcctgagctgtgctagcacctcccccaggagaccgttgcagtcggccagcccccttctccacggtaaccatgtgcgaccgaaaggccgtgatcaaaaatgcggacatgtcggaagagatgcaacaggactcggtggagtgcgctactcaggcgctggagaaatacaacatagagaaggacattgcggctcatatcaagaaggaatttgacaagaagtacaatcccacctggcattgcatcgtggggaggaacttcggtagttatgtgacacatgaaaccaaacacttcatctacttctacctgggccaagtggccattcttctgttcaaatctggttaaaagcatggactgtgccacacacccagtgatccatccaaaaacaaggactgcagcctaaattccaaataccagagactgaaattttcagccttgctaagggaacatctcgatgtttgaacctttgttgtgttttgtacagggcattctctgtactagtttgtcgtggttataaaacaattagcagaatagcctacatttgtatttattttctattccatacttctgcccacgttgttttctctcaaaatccattcctttaaaaaataaatctgatgcagatgtgaaaaaaagaaaaaaacaagagtaacgaaatagcagagacacgaaacaaacatacacaaaacgaaagagaaatatatagagggggagggacaagagaacaccacgtggaggagaccaaacaagagcatcgacagctaggtagaagagaggaacgaaagcaggcgagcagaaaacgacacacggcagcaaacaggacgcagcagaacaaacagaccagggacgagggaaaaaaacacaagaagagcgaaagtcaagctgagcaaagcaacccaaaacaacacgagtggaagcgaaacacactacactacgcacaccaacaccccccacgaagagaagaattaacaggcgcacggagcacggacaaaacaaacaacccagaagcagtatacacagtagcacacaccaacaaagagacagaacaccacagcagagaaaaacagtgcgctaaccacagtctaccaacaaagagacaactaccg

SEQ ID NO: 313211 - DNA, 780 bp, Homo sapiens
  misc_feature (18)..(18): n is a, c, g, or t
  misc_feature (20)..(20): n is a, c, g, or t
atccttaattaaattaancncccccccccgaggggagcagggcggggcctgagcactaggcggcggcggctggcgtggggctgcttagatgcgccacggtttcggtagcgacggtagctctagccgggcctgagctgtgctagcacctcccccaggagaccgttgcagtcggccagcccccttctccacggtaaccatgtgcgaccgaaaggccgtgatcaaaaatgcggacatgtcggaagagatgcaacaggactcggtggagtgcgctactcaggcgctggagaaatacaacatagagaaggacattgcggctcatatcaagaaggaatttgacaagaagtacaatcccacctggcattgcatcgtggggaggaacttcggtagttatgtgacacatgaaaccaaacacttcatctacttctacctgggccaagtggccattcttctgttcaaatctggttaaaagcatggactgtgccacacacccagtgatccatccaaaaacaaggactgcagcctaaattccaaataccagagactgaaattttcagccttgctaagggaacatctcgatgtttgaacctttgttgtgttttgtacagggcattctctgtactagtttgtcgtggttataaaacaattagcagaatagcctacatttgtatttattttctattccatacttctgcccacgttgttttctctcaaaatccattcctttaaaaaataaatctgatgcagatgtgaaaaaaaaatacacaagtaataacaaacact

SEQ ID NO: 313212 - DNA, 1496 bp, Homo sapiens
  misc_feature (18)..(18): n is a, c, g, or t
  misc_feature (20)..(20): n is a, c, g, or t
atccttaattaaattaancncccccccccgaggggagcagggcggggcctgagcactaggcggcggcggctggcgtggggctgcttagatgcgccacggtttcggtagcgacggtagctctagccgggcctgagctgtgctagcacctcccccaggagaccgttgcagtcggccagcccccttctccacggtaaccatgtgcgaccgaaaggccgtgatcaaaaatgcggacatgtcggaagagatgcaacaggactcggtggagtgcgctactcaggcgctggagaaatacaacatagagaaggacattgcggctcatatcaagaaggaatttgacaagaagtacaatcccacctggcattgcatcgtggggaggaacttcggtagttatgtgacacatgaaaccaaacacttcatctacttctacctgggccaagtggccattcttctgttcaaatctggttaaaagcatggactgtgccacacacccagtgatccatccaaaaacaaggactgcagcctaaattccaaataccagagactgaaattttcagccttgctaagggaacatctcgatgtttgaacctttgttgtgttttgtacagggcattctctgtactagtttgtcgtggttataaaacaattagcagaatagcctacatttgtatttattttctattccatacttctgcccacgttgttttctctcaaaatccattcctttaaaaaataaatctgatgcagatgtgctgaaacaacaagagaaccaaaaaagagaaacaaaaaaaaaaaacaaacaaaacaaaaaaaaaaaaaaaaacaaaaaaaaaaacataaacaaacaaacacaaacaacaaaaagaaccaaagaaagaaaaaaacaaaaaacaaaaaaacagaacaaaaagaaagaagcagcgggagtgccagactgatgaaaaccagctacgagagacacgggagaccatgacagactccaaacaacagacactgatgaagaagagagggcgacgagtgctgacacaaaagcgtgtctaacaacaaacaaagcgaaggcagcgcaggggtacgtcaatagctacagtgaggggacgagagacgaacagacaacaaaagagtagaaagagaggacaaggaaagagagcaagacgacctagaaatgtctagggagtgaggcagaaaggagaaagaagaagacaaaaacaggaagagaaaaataacgagtaggaacgagagaaaccaaaaaagaaagagagaacagaacttaaaaaaaaagagagcaaacaacacaacgaaagactacaatagaaaaagcgatcgcaagcacgacacagcaatgtaagagtaaaagagagactaaaagtaacagttaacaagatacatactaacactagacagcgggccgcggtagagagaatagaaaaagaaaagcaagaaacatgacaaacaaaacaaaaaaatactaaccacccggaagacaagacggacaggaagga

SEQ ID NO: 313213 - DNA, 878 bp, Homo sapiens
  misc_feature (18)..(18): n is a, c, g, or t
  misc_feature (20)..(20): n is a, c, g, or t
atccttaattaaattaancncccccccccgaggggagcagggcggggcctgagcactaggcggcggcggctggcgtggggctgcttagatgcgccacggtttcggtagcgacggtagctctagccgggcctgagctgtgctagcacctcccccaggagaccgttgcagtcggccagcccccttctccacggtaaccatgtgcgaccgaaaggccgtgatcaaaaatgcggacatgtcggaagagatgcaacaggactcggtggagtgcgctactcaggcgctggagaaatacaacatagagaaggacattgcggctcatatcaagaaggaatttgacaagaagtacaatcccacctggcattgcatcgtggggaggaacttcggtagttatgtgacacatgaaaccaaacacttcatctacttctacctgggccaagtggccattcttctgttcaaatctggttaaaagcatggactgtgccacacacccagtgatccatccaaaaacaaggactgcagcctaaattccaaataccagagactgaaattttcagccttgctaagggaacatctcgatgtttgaacctttgttgtgttttgtacagggcattctctgtactagtttgtcgtggttataaaacaattagcagaatagcctacatttgtatttattttctattccatacttctgcccacgttgttttctctcaaaatccattcctttaaaaaataaatctgatgcagatgtgaaaaaaaaaaaaaaaaaaaaaggggggggggttaaaaaatttccctcggggggccccagttaagggtaccccttttttgttccaagggggccctaaagggaggcgtataaagagggaggggccgggtta

SEQ ID NO: 313214 - DNA, 1052 bp, Homo sapiens
  misc_feature (18)..(18): n is a, c, g, or t
  misc_feature (20)..(20): n is a, c, g, or t
atccttaattaaattaancncccccccccgaggggagcagggcggggcctgagcactaggcggcggcggctggcgtggggctgcttagatgcgccacggtttcggtagcgacggtagctctagccgggcctgagctgtgctagcacctcccccaggagaccgttgcagtcggccagcccccttctccacggtaaccatgtgcgaccgaaaggccgtgatcaaaaatgcggacatgtcggaagagatgcaacaggactcggtggagtgcgctactcaggcgctggagaaatacaacatagagaaggacattgcggctcatatcaagaaggaatttgacaagaagtacaatcccacctggcattgcatcgtggggaggaacttcggtagttatgtgacacatgaaaccaaacacttcatctacttctacctgggccaagtggccattcttctgttcaaatctggttaaaagcatggactgtgccacacacccagtgatccatccaaaaacaaggactgcagcctaaattccaaataccagagactgaaattttcagccttgctaagggaacatctcgatgtttgaacctttgttgtgttttgtacagggcattctctgtactagtttgtcgtggttataaaacaattagcagaatagcctacatttgtatttattttctattccatacttctgcccacgttgttttctctcaaaatccattcctttaaaaaataaatctgatgcagatgtgaaagaagagaagagaagaaagaaagagagaaagaagacaagaaggggggcaaggagaaaacagaaaggacaaggacgagtggggggcaaagggcgcaccagaagagagggtcaaagaacagaggggggagcggagacaccaaagggaagagaagaaagagaagggaggcaacgaaagaaacgggggagaaaagaggacgcaggacccaaccaaaaaaaaaagagccgggagacaagaggaggtgtaaaaaaaacgaaggagaaaaaggagaaccagaggaaaaacaaagggcacagaaagaac

SEQ ID NO: 313215 - DNA, 833 bp, Homo sapiens
  misc_feature (18)..(18): n is a, c, g, or t
  misc_feature (20)..(20): n is a, c, g, or t
atccttaattaaattaancncccccccccgaggggagcagggcggggcctgagcactaggcggcggcggctggcgtggggctgcttagatgcgccacggtttcggtagcgacggtagctctagccgggcctgagctgtgctagcacctcccccaggagaccgttgcagtcggccagcccccttctccacggtaaccatgtgcgaccgaaaggccgtgatcaaaaatgcggacatgtcggaagagatgcaacaggactcggtggagtgcgctactcaggcgctggagaaatacaacatagagaaggacattgcggctcatatcaagaaggaatttgacaagaagtacaatcccacctggcattgcatcgtggggaggaacttcggtagttatgtgacacatgaaaccaaacacttcatctacttctacctgggccaagtggccattcttctgttcaaatctggttaaaagcatggactgtgccacacacccagtgatccatccaaaaacaaggactgcagcctaaattccaaataccagagactgaaattttcagccttgctaagggaacatctcgatgtttgaacctttgttgtgttttgtacagggcattctctgtactagtttgtcgtggttataaaacaattagcagaatagcctacatttgtatttattttctattccatacttctgcccacgttgttttctctcaaaatccattcctttaaaaaataaatctgatgcagatgtgcatcctcagccgagtgcaagcaaggcacactcccggggggccggaaccgcgacagagggtcgtacgataggggcggttacgtgg

SEQ ID NO: 313216 - DNA, 1103 bp, Homo sapiens
  misc_feature (18)..(18): n is a, c, g, or t
  misc_feature (20)..(20): n is a, c, g, or t
atccttaattaaattaancncccccccccgaggggagcagggcggggcctgagcactaggcggcggcggctggcgtggggctgcttagatgcgccacggtttcggtagcgacggtagctctagccgggcctgagctgtgctagcacctcccccaggagaccgttgcagtcggccagcccccttctccacggtaaccatgtgcgaccgaaaggccgtgatcaaaaatgcggacatgtcggaagagatgcaacaggactcggtggagtgcgctactcaggcgctggagaaatacaacatagagaaggacattgcggctcatatcaagaaggaatttgacaagaagtacaatcccacctggcattgcatcgtggggaggaacttcggtagttatgtgacacatgaaaccaaacacttcatctacttctacctgggccaagtggccattcttctgttcaaatctggttaaaagcatggactgtgccacacacccagtgatccatccaaaaacaaggactgcagcctaaattccaaataccagagactgaaattttcagccttgctaagggaacatctcgatgtttgaacctttgttgtgttttgtacagggcattctctgtactagtttgtcgtggttataaaacaattagcagaatagcctacatttgtatttattttctattccatacttctgcccacgttgttttctctcaaaatccattcctttaaaaaataaatctgatgcagatgtgaaaataaaccaaattatagagataaaaagacatgaagacaagcatgatcttgagccttcaggactagatccaaaagcctgtaggccgactggatcaaggggtcacttagtgcatacatagctaagccatgcgaggaaattttgaactgcctggacgactacgacctatatattgaggaaaacctttagattgccggtattttaagagtttccgatctggaaaggccgggaggtttccaaactatgtaacctaccggacagaacggctttaaccaatttaggaactatcggattgccagaacctatcgcctttacatcagttggcaaaccttaatgtgggcgctgggcttttttg

SEQ ID NO: 313217 - DNA, 858 bp, Homo sapiens
  misc_feature (18)..(18): n is a, c, g, or t
  misc_feature (20)..(20): n is a, c, g, or t
atccttaattaaattaancncccccccccgaggggagcagggcggggcctgagcactaggcggcggcggctggcgtggggctgcttagatgcgccacggtttcggtagcgacggtagctctagccgggcctgagctgtgctagcacctcccccaggagaccgttgcagtcggccagcccccttctccacggtaaccatgtgcgaccgaaaggccgtgatcaaaaatgcggacatgtcggaagagatgcaacaggactcggtggagtgcgctactcaggcgctggagaaatacaacatagagaaggacattgcggctcatatcaagaaggaatttgacaagaagtacaatcccacctggcattgcatcgtggggaggaacttcggtagttatgtgacacatgaaaccaaacacttcatctacttctacctgggccaagtggccattcttctgttcaaatctggttaaaagcatggactgtgccacacacccagtgatccatccaaaaacaaggactgcagcctaaattccaaataccagagactgaaattttcagccttgctaagggaacatctcgatgtttgaacctttgttgtgttttgtacagggcattctctgtactagtttgtcgtggttataaaacaattagcagaatagcctacatttgtatttattttctattccatacttctgcccacgttgttttctctcaaaatccattcctttaaaaaataaatctgatgcagatgtgggacatgtcggaagagatgcaacaggactcggtggagtgcgctactcaggcgctggagaaataccacatagagaaggacattgcggctcatatccagaaggaatctgat

SEQ ID NO: 313218 - DNA, 781 bp, Homo sapiens
  misc_feature (18)..(18): n is a, c, g, or t
  misc_feature (20)..(20): n is a, c, g, or t
atccttaattaaattaancncccccccccgaggggagcagggcggggcctgagcactaggcggcggcggctggcgtggggctgcttagatgcgccacggtttcggtagcgacggtagctctagccgggcctgagctgtgctagcacctcccccaggagaccgttgcagtcggccagcccccttctccacggtaaccatgtgcgaccgaaaggccgtgatcaaaaatgcggacatgtcggaagagatgcaacaggactcggtggagtgcgctactcaggcgctggagaaatacaacatagagaaggacattgcggctcatatcaagaaggaatttgacaagaagtacaatcccacctggcattgcatcgtggggaggaacttcggtagttatgtgacacatgaaaccaaacacttcatctacttctacctgggccaagtggccattcttctgttcaaatctggttaaaagcatggactgtgccacacacccagtgatccatccaaaaacaaggactgcagcctaaattccaaataccagagactgaaattttcagccttgctaagggaacatctcgatgtttgaacctttgttgtgttttgtacagggcattctctgtactagtttgtcgtggttataaaacaattagcagaatagcctacatttgtatttattttctattccatacttctgcccacgttgttttctctcaaaatccattcctttaaaaaataaatctgatgcagatgtgtggaaatgctgacccgtgctggaaatgctgac

SEQ ID NO: 313219 - DNA, 948 bp, Homo sapiens
  misc_feature (18)..(18): n is a, c, g, or t
  misc_feature (20)..(20): n is a, c, g, or t
atccttaattaaattaancncccccccccgaggggagcagggcggggcctgagcactaggcggcggcggctggcgtggggctgcttagatgcgccacggtttcggtagcgacggtagctctagccgggcctgagctgtgctagcacctcccccaggagaccgttgcagtcggccagcccccttctccacggtgagaaactcggggggccagggggtgtcctcgctgccttatttcgccccactccggacttagccctccgcgtagcccgcgcttcctgagaagtggggtggggggcgtcgtcccgtggtggcgccggccggggtgggggcagttagtgcctggggggcgcggcccaactcaaccccttaccccaggccttgcccactaggtaaccatgtgcgaccgaaaggccgtgatcaaaaatgcggacatgtcggaagagatgcaacaggactcggtggagtgcgctactcaggcgctggagaaatacaacatagagaaggacattgcggctcatatcaagaaggaatttgacaagaagtacaatcccacctggcattgcatcgtggggaggaacttcggtagttatgtgacacatgaaaccaaacacttcatctacttctacctgggccaagtggccattcttctgttcaaatctggttaaaagcatggactgtgccacacacccagtgatccatccaaaaacaaggactgcagcctaaattccaaataccagagactgaaattttcagccttgctaagggaacatctcgatgtttgaacctttgttgtgttttgtacagggcattctctgtactagtttgtcgtggttataaaacaattagcagaatagcctacatttgtatttattttctattccatacttctgcccacgttgttttctctcaaaatccattcctttaaaaaataaatctgatgcagatgtg

SEQ ID NO: 313220 - DNA, 719 bp, Homo sapiens
  misc_feature (18)..(18): n is a, c, g, or t
  misc_feature (20)..(20): n is a, c, g, or t
atccttaattaaattaancncccccccccgaggggagcagggcggggcctgagcactaggcggcggcggctggcgtggggctgcttagatgcgccacggtttcggtagcgacggtagctctagccgggcctgagctgtgctagcacctcccccaggagaccgttgcagtcggccagcccccttctccacggtaaccatgtgcgaccgaaaggccgtgatcaaaaatgcggacatgtcggaagagatgcaacaggactcggtggagtgcgctactcaggcgctggagaaatacaacatagagaaggacattgcggctcatatcaagaaggaatttgacaagaagtacaatcccacctggcattgcatcgtggggaggaacttcggtagttatgtgacacatgaaaccaaacacttcatctacttctacctgggccaagtggccattcttctgttcaaatctggttaaaagcatggactgtgccacacacccagtgatccatccaaaaacaaggactgcagcctaaattccaaataccagagactgaaattttcagccttgctaagggaacatctcgatgtttgaacctttgttgtgttttgtacagggcattctctgtactagtttgtcgtggttataaaacaattagcagaatagcctacatttgtatttattttctattccatacttctgcccagcataaggtggggtaccgagctga

SEQ ID NO: 313221 - DNA, 1229 bp, Homo sapiens
gctgagcagggagagcctggggccgggccgtgtggatgccatccccgagcgcggttcgcgctcggctgaggcgctggacaagtggcttgggctcccgcgcctcagtttctctctgtggcgccgcctacctcacagacttgtgagcactcactgacgtgggtagcgcccagggcctgcggggcgcaggagagctggagtcaggcggagaccgcaggctgaccccgcagcggccgggctgtcgcggcccccacctcagagccactggtggccgcagaagacagtccacgtgtcttaaccaggcttacaagactccaaagatgggtgccttgtatcaagcaggtgctcaacaaatgtctgctgaaaaaatgatgcagggtgcggtggctcacgcagtaaagatggggtttcaccatgttagccaggatggtcttgatctcctgacctcgtgatccgcctgcctcggcctcccaaagtgctgggattacaggcgtgagccaccacacccggccatataaggaaagactgcctcacctgagcaagaagcttcaccctggacaaaaaccccggggctcaacactcccaaatccacccggatccccatcaccaaccccttaaaggatgtccgcattgcttggcagagaccccactcttggggataatcccttaattcgtaaccatgtgcgaccgaaaggccgtgatcaaaaatgcggacatgtcggaagagatgcaacaggactcggtggagtgcgctactcaggcgctggagaaatacaacatagagaaggacattgcggctcatatcaagaaggaatttgacaagaagtacaatcccacctggcattgcatcgtggggaggaacttcggtagttatgtgacacatgaaaccaaacacttcatctacttctacctgggccaagtggccattcttctgttcaaatctggttaaaagcatggactgtgccacacacccagtgatccatccaaaaacaaggactgcagcctaaattccaaataccagagactgaaattttcagccttgctaagggaacatctcgatgtttgaacctttgttgtgttttgtacagggcattctctgtactagtttgtcgtggttataaaacaattagcagaatagcctacatttgtatttattttctattccatacttctgcccacgttgttttctctcaaaatccattcctttaaaaaataaatctgatgcagatgtg

SEQ ID NO: 313222 - DNA, 1029 bp, Homo sapiens
gctgagcagggagagcctggggccgggccgtgtggatgccatccccgagcgcggttcgcgctcggctgaggcgctggacaagtggcttgggctcccgcgcctcagtttctctctgtggcgccgcctacctcacagacttgtgagcactcactgacgtgggtagcgcccagggcctgcggggcgcaggagagctggagtcaggcggagaccgcaggctgaccccgcagcggccgggctgtcgcggcccccacctcagggtcttattctgttgctcaggctggagtgcaatggcgcgaacacggctcactgcagtctcgatctcgctggactcagagccactggtggccgcagaagacagtccacgtgtcttaaccaggcttacaagactccaaagatgggtgccttgtatcaagcaggtgctcaacaaatgtctgctgaaaaaatgatgcagggtgcggtggctcacgcaggtaaccatgtgcgaccgaaaggccgtgatcaaaaatgcggacatgtcggaagagatgcaacaggactcggtggagtgcgctactcaggcgctggagaaatacaacatagagaaggacattgcggctcatatcaagaaggaatttgacaagaagtacaatcccacctggcattgcatcgtggggaggaacttcggtagttatgtgacacatgaaaccaaacacttcatctacttctacctgggccaagtggccattcttctgttcaaatctggttaaaagcatggactgtgccacacacccagtgatccatccaaaaacaaggactgcagcctaaattccaaataccagagactgaaattttcagccttgctaagggaacatctcgatgtttgaacctttgttgtgttttgtacagggcattctctgtactagtttgtcgtggttataaaacaattagcagaatagcctacatttgtatttattttctattccatacttctgcccacgttgttttctctcaaaatccattcctttaaaaaataaatctgatgcagatgtg

SEQ ID NO: 313223 - DNA, 716 bp, Homo sapiens
  misc_feature (18)..(18): n is a, c, g, or t
  misc_feature (20)..(20): n is a, c, g, or t
atccttaattaaattaancncccccccccgaggggagcagggcggggcctgagcactaggcggcggcggctggcgtggggctgcttagatgcgccacggtttcggtagcgacggtagctctagccgggcctgagctgtgctagcacctcccccaggagaccgttgcagtcggccagcccccttctccacggtaaccatgtgcgaccgaaaggccgtgatcaaaaatgcggacatgtcggaagagatgcaacaggactcggtggagtgcgctactcaggcgctggagaaatacaacatagagaaggacattgcggctcatatcaagaaggaatttgacaagaagtacaatcccacctggcattgcatcgtggggaggaacttcggtagttatgtgacacatgaaaccaaacacttcatctacttctacctgggccaagtggccattcttctgttcaaatctggttaaaagcatggactgtgccacacacccagtgatccatccaaaaacaaggactgcagcctaaattccaaataccagagactgaaattttcagccttgctaagggaacatctcgatgtttgaacctttgttgtgttttgtacagggcattctctgtactagtttgtcgtggttataaaacaattagcagaatagcctacatttgtatttattttctattccatacttctgcccacgccccggcataagtggggac

SEQ ID NO: 313224 - DNA, 534 bp, Homo sapiens
ccgcctactactactaaattcgcggccgcgtcgaccaggactcggtggagtgcgctactcaggcgctggagaaatacaacatagagaaggacattgcggctcatatcaagaaggaatttgacaagaagtacaatcccacctggcattgcatcgtggggaggaacttcggtagttatgtgacacatgaaaccaaacacttcatctacttctacctgggccaagtggccattcttctgttcaaatctggttaaaagcatggactgtgccacacacccagtgatccatccaaaaacaaggactgcagcctaaattccaaataccagagactgaaattttcagccttgctaagggaacatctcgatgtttgaacctttgttgtgttttgtacagggcattctctgtactagtttgtcgtggttataaaacaattagcagaatagcctacatttgtatttattttctattccatacttctgcccacgttgttttctctcaaaatccattcctttaaaaaataaatctgatgcagatgtg

SEQ ID NO: 313225 - DNA, 667 bp, Homo sapiens
gaataggcggcaatgcagtgtgaatcgaggcgtagcctctatggcggggctgggactgatgattgcactcatacctccgcaggacaccgttggtagtcggacaatctgcttctactacggtacaccatgttcgatcgaaatgcctatgatgcgaccgagtgcggcgagcaggactcggtggagtgcgctactcaggcgctggagaaatacaacatagagaaggacattgcggctcatatcaagaaggaatttgacaagaagtacaatcccacctggcattgcatcgtggggaggaacttcggtagttatgtgacacatgaaaccaaacacttcatctacttctacctgggccaagtggccattcttctgttcaaatctggttaaaagcatggactgtgccacacacccagtgatccatccaaaaacaaggactgcagcctaaattccaaataccagagactgaaattttcagccttgctaagggaacatctcgatgtttgaacctttgttgtgttttgtacagggcattctctgtactagtttgtcgtggttataaaacaattagcagaatagcctacatttgtatttattttctattccatacttctgcccacgttgttttctctcaaaatccattcctttaaaaaataaatctgatgcagatgtg

SEQ ID NO: 313226 - DNA, 654 bp, Homo sapiens
  misc_feature (18)..(18): n is a, c, g, or t
  misc_feature (20)..(20): n is a, c, g, or t
  misc_feature (619)..(619): n is a, c, g, or t
atccttaattaaattaancncccccccccgaggggagcagggcggggcctgagcactaggcggcggcggctggcgtggggctgcttagatgcgccacggtttcggtagcgacggtagctctagccgggcctgagctgtgctagcacctcccccaggagaccgttgcagtcggccagcccccttctccacggtaaccatgtgcgaccgaaaggccgtgatcaaaaatgcggacatgtcggaagagatgcaacaggactcggtggagtgcgctactcaggcgctggagaaatacaacatagagaaggacattgcggctcatatcaagaaggaatttgacaagaagtacaatcccacctggcattgcatcgtggggaggaacttcggtagttatgtgacacatgaaaccaaacacttcatctacttctacctgggccaagtggccattcttctgttcaaatctggttaaaagcatggactgtgccacacacccagtgatccatccaaaaacaaggactgcagcctaaattccaaataccagagactgaaattttcagccttgctaagggaacatctcgatgtttgaacctttgttgtgttttgtacagggcattctcgcacnacttgtcgaattcgggtaccggctcgattcgtata

SEQ ID NO: 313227 - DNA, 690 bp, Homo sapiens
  misc_feature (257)..(257): n is a, c, g, or t
  misc_feature (261)..(261): n is a, c, g, or t
agaggatccaacgtcagcacatacttgatatgagccgcaagtccttctctatgttgtatttctccagcgcctgagatagcgcactccaccgagtcctgatgcatctcttccgacatgtccgcatttttgatcacggcctctcagtcgcacatggttaccgtggagaagggggctggccgactgcaaagatctcctgggggaggtgctagcacagctcaggcccggctagagctaccgtcgctaccgaaaccgtggcncatntcaagaaggaatttgacaagaagtacaatcccacctggcattgcatcgtggggaggaacttcggtagttatgtgacacatgaaaccaaacacttcatctacttctacctgggccaagtggccattcttctgttcaaatctggttaaaagcatggactgtgccacacacccagtgatccatccaaaaacaaggactgcagcctaaattccaaataccagagactgaaattttcagccttgctaagggaacatctcgatgtttgaacctttgttgtgttttgtacagggcattctctgtactagtttgtcgtggttataaaacaattagcagaatagcctacatttgtatttattttctattccatacttctgcccacgttgttttctctcaaaatccattcctttaaaaaataaatctgatgcagatgtg

SEQ ID NO: 313228 - DNA, 672 bp, Homo sapiens
  misc_feature (18)..(18): n is a, c, g, or t
  misc_feature (20)..(20): n is a, c, g, or t
atccttaattaaattaancncccccccccgaggggagcagggcggggcctgagcactaggcggcggcggctggcgtggggctgcttagatgcgccacggtttcggtagcgacggtagctctagccgggcctgagctgtgctagcacctcccccaggagaccgttgcagtcggccagcccccttctccacggtaaccatgtgcgaccgaaaggccgtgatcaaaaatgcggacatgtcggaagagatgcaacgaatttgacaagaagtacaatcccacctggcattgcatcgtggggaggaacttcggtagttatgtgacacatgaaaccaaacacttcatctacttctacctgggccaagtggccattcttctgttcaaatctggttaaaagcatggactgtgccacacacccagtgatccatccaaaaacaaggactgcagcctaaattccaaataccagagactgaaattttcagccttgctaagggaacatctcgatgtttgaacctttgttgtgttttgtacagggcattctctgtactagtttgtcgtggttataaaacaattagcagaatagcctacatttgtatttattttctattccatacttctgcccacgttgttttctctcaaaatccattcctttaaaaaataaatctgatgcagatgtg

SEQ ID NO: 313229 - DNA, 645 bp, Homo sapiens
ctctgacttgggaccgtcactctacgatggcatctgctgtgtcgtaaggcgttgctctgttgctctgacatgtgttaccacgtctctcgactatctgccgtagaacgattctcagtagatgcgtgctccttatacagacacatcacaccatgagcattataacgccaccgtccatgctagcccccataagcttgctgagggagactgcggcctatatcgagagggaatttgacaagaagtacaatcccacctggcattgcatcgtggggaggaacttcggtagttatgtgacacatgaaaccaaacacttcatctacttctacctgggccaagtggccattcttctgttcaaatctggttaaaagcatggactgtgccacacacccagtgatccatccaaaaacaaggactgcagcctaaattccaaataccagagactgaaattttcagccttgctaagggaacatctcgatgtttgaacctttgttgtgttttgtacagggcattctctgtactagtttgtcgtggttataaaacaattagcagaatagcctacatttgtatttattttctattccatacttctgcccacgttgttttctctcaaaatccattcctttaaaaaataaatctgatgcagatgtg

SEQ ID NO: 313230 - DNA, 695 bp, Homo sapiens
  misc_feature (18)..(18): n is a, c, g, or t
  misc_feature (20)..(20): n is a, c, g, or t
atccttaattaaattaancncccccccccgaggggagcagggcggggcctgagcactaggcggcggcggctggcgtggggctgcttagatgcgccacggtttcggtagcgacggtagctctagccgggcctgagctgtgctagcacctcccccaggagaccgttgcagtcggccagcccccttctccacggtaaccatgtgcgaccgaaaggccgtgatcaaaaatgcggacatgtcggaagagatgcaacaggactcggtggagtgcgctactcaggcgctggagaaatacaacatagagaaggacattgcggctcatatcaagaaggaatttgacaagaagtacaatcccacctggcattgcatcgtggggaggaacttcggtagttatgtgacacatgaaaccaaacacttcatctacttctacctgggccaagtggccattcttctgttcaaatctggttaaaagcatggactgtgccacacacccagtgatccatccttgctaagggaacatctcgatgtttgaacctttgttgtgttttgtacagggcattctctgtactagtttgtcgtggttataaaacaattagcagaatagcctacatttgtatttattttctattccatacttctgcccacgttgttttctctcaaaatccattcctttaaaaaataaatctgatgcagatgtg

SEQ ID NO: 313231 - DNA, 1464 bp, Homo sapiens
gctgagcagggagagcctggggccgggccgtgtggatgccatccccgagcgcggttcgcgctcggctgaggcgctggacaagtggcttgggctcccgcgcctcagtttctctctgtggcgccgcctacctcacagacttgtgagcactcactgacgtgggtagcgcccagggcctgcggggcgcaggagagctggagtcaggcggagaccgcaggctgaccccgcagcggccgggctgtcgcggcccccacctcagagccactggtggccgcagaagacagtccacgtgtcttaaccaggcttacaagactccaaagatgggtgccttgtatcaagcaggtgctcaacaaatgtctgctgaaaaaatgatgcagggtgcggtggctcacgcagtaaagatggggtttcaccatgttagccaggatggtcttgatctcctgacctcgtgatccgcctgcctcggcctcccaaagtgctgggattacaggcgtgagccaccacacccggccatataaggaaagactgcctcacctgagcaagaagcttcaccctggacaaaaaccccggggctcaacactcccaaatccacccggatccccatcaccaaccccttaaaggatgtccgcattgcttggcagagaccccactcttggggataatcccttaattcgtaaccatgtgcgaccgaaaggccgtgatcaaaaatgcggacatgtcggaagagatgcaacgaatttgacaagaagtacaatcccacctggcattgcatcgtggggaggaacttcggtagttatgtgacacatgaaaccaaacacttcatctacttctacctgggccaagtggccattcttctgttcaaatctggttaaaagcatggactgtgccacacacccagtgatccatccaaaaacaaggactgcagcctaaattccaaataccagagactgaaattttcagccttgctaagggaacatctcgatgtttgaacctttgttgtgttttgtacagggcattctctgtactagtttgtcgtggttataaaacaattagcagaatagcctacatttgtatttattttctattccatacttctgcccacgttgttttctctcaaaatccattcctttaaaaaataaatctgatgcagatgtgcaaaaaacaaaaaagaagaaagcgaaggaacaaaacaccttttggggcgcttgggccccgggaaagtttttgaacacccttcggtggggccccgggggcccaatagggaatgtgaaccatgggcccaaagcggttccccagagagaagaaccggggacacagaacagcgggcgcgggattctctccaccatttaaaaaacgccgggggggaaacaccggagagtgtcttggaacaaattcagagagggagttcgaggggaccacggggggtccattcacgaggagttcacagagagctcggatttaaatagc

SEQ ID NO: 313232 - DNA, 457 bp, Homo sapiens
  misc_feature (18)..(18): n is a, c, g, or t
  misc_feature (20)..(20): n is a, c, g, or t
atccttaattaaattaancncccccccccgaggggagcagggcggggcctgagcactaggcggcggcggctggcgtggggctgcttagatgcgccacggtttcggtagcgacggtagctctagccgggcctgagctgtgctagcacctcccccaggagaccgttgcagtcggccagcccccttctccacggtaaccatgtgcgaccgaaaggccgtgatcaaaaatgcggacatgtcggaagagatgcaacaggactcggtggagtgcgctactcaggcgctggagaaatacaacatagagaaggacattgcggctcatatcaagaaggaatttgacaagaagtacaatcccacctggcattgcatcgtggggaggaacttcggtagttatgtgacacatgaaaccaaacacttcatctacttctacctgggccttagtctacctgggtaccgagcc

SEQ ID NO: 313233 - DNA, 1135 bp, Homo sapiens
  misc_feature (18)..(18): n is a, c, g, or t
  misc_feature (20)..(20): n is a, c, g, or t
atccttaattaaattaancncccccccccgaggggagcagggcggggcctgagcactaggcggcggcggctggcgtggggctgcttagatgcgccacggtttcggtagcgacggtagctctagccgggcctgagctgtgctagcacctcccccaggagaccgttgcagtcggccagcccccttctccacggtaaccatgtgcgaccgaaaggccgtgatcaaaaatgcggacatgtcggaagagatgcaacaggactcggtggagtgcgctactcaggcgctggagaaatacaacatagagaaggacattgcggctcatatcaagaaggtgaggatgggcgcgggggccgatacgcagccgggagcagggggttccttccccccgatcctgctttcctaagggcgcctgacaggtcccgggaatactgctggcggcttggggcgtagaagcttccagaaaggacgcagatgcattttgcgctcctgtggagaagaccagacccccggcgtccgaagttttttttttttttttttaattacccagctccgcggggggaaagcgccacctagcaacgggtatctaaagatcagggacgccgcggttcccccttctgtgtggttcctgcgccgaggatccatctgggtgttccggaggggggagctgcgtgggtgtttccagccgggccgggaggagatcttgccagccttccagtggggagttgagggaaggtggtgggtggtggcggggctgggggctggggtaggggcttggtaaatggcagtctagaaagccggcaggactgccaacttctcgagcagtgtttgctggaagggaagaaagctggcagcctaagccgtgggagggttccagtcgagaatgggaagatgaaagacttcagatggaacagaaataaatgccttttttgacaaacgcagcagtgcgtgcctctagcttgcaagagcgttactccccttcatagctttaaaaggttttcgcactgcgtgcagttagagtagctaaatcttgtgtgacgctccacaaacacttgtaagaattttgcagagaaagataaccgttgccacccaatgccccccacaggcattctactccccagtacctcttagggtgggagaa

SEQ ID NO: 313234 - DNA, 1334 bp, Homo sapiens
  misc_feature (18)..(18): n is a, c, g, or t
  misc_feature (20)..(20): n is a, c, g, or t
atccttaattaaattaancncccccccccgaggggagcagggcggggcctgagcactaggcggcggcggctggcgtggggctgcttagatgcgccacggtttcggtagcgacggtagctctagccgggcctgagctgtgctagcacctcccccaggagaccgttgcagtcggccagcccccttctccacggtgagaaactcggggggccagggggtgtcctcgctgccttatttcgccccactccggacttagccctccgcgtagcccgcgcttcctgagaagtggggtggggggcgtcgtcccgtggtggcgccggccggggtgggggcagttagtgcctggggggcgcggcccaactcaaccccttaccccaggccttgcccactaggtaaccatgtgcgaccgaaaggccgtgatcaaaaatgcggacatgtcggaagagatgcaacaggactcggtggagtgcgctactcaggcgctggagaaatacaacatagagaaggacattgcggctcatatcaagaaggtgaggatgggcgcgggggccgatacgcagccgggagcagggggttccttccccccgatcctgctttcctaagggcgcctgacaggtcccgggaatactgctggcggcttggggcgtagaagcttccagaaaggacgcagatgcattttgcgctcctgtggagaagaccagacccccggcgtccgaagttttttttttttttttttaattacccagctccgcggggggaaagcgccacctagcaacgggtatctaaagatcagggacgccgcggttcccccttctgtgtggttcctgcgccgaggatccatctgggtgttccggaggggggagctgcgtgggtgtttccagccgggccgggaggagatcttgccagccttccagtggggagttgagggaaggtggtgggtggtggcggggctgggggctggggtaggggcttggtaaatggcagtctagaaagccggcaggactgccaacttctcgagcagtgtttgctggaagggaagaaagctggcagcctaagccgtgggagggttccagtcgagaatgggaagatgaaagacttcagatggaacagaaataaatgccttttttgacaaacgcagcagtgcgtgcctctagcttgcaagagcgttactccccttcatagctttaaaaggttttcgcactgcgtgcagttagagtagctaaatcttgtgtgacgctccacaaacacttgtaagaattttgcagagaaagataaccgttgccacccaatgccccccacaggcattctactccccagtacctcttagggtgggagaa

SEQ ID NO: 313235 - DNA, 380 bp, Homo sapiens
atgaaaccaaacacttcatctacttctacctgggccaagtggccattcttctgttcaaatctggttaaaagcatggactgtgccacacacccagtgatccatccaaaaacaaggactgcagcctaaattccaaataccagagactgaaattttcagccttgctaagggaacatctcgatgtttgaacctttgttgtgttttgtacagggcattctctgtactagtttgtcgtggttataaaacaattagcagaatagcctacatttgtatttattttctattccatacttctgcccacgttgttttctctcaaaatccattcctttaaaaaataaatctgatgcagatgtgatgtgtatgtgtgtgaattacaatttgtt

SEQ ID NO: 313236 - DNA, 938 bp, Homo sapiens
tgaccgttgccaagcaacccagatgtccgttatctaggttgcccaggcacagacttatcccataaccttcactatggcgcccaggtggccgtaactcaggccagctcagaggctcatgaccttcactccactgcttagataaaacaatacttgaagtcactggttacagagaataggaatctataaactcattccataaaacaaaggaaaatttgtttttcttctccctatgttgagggagtactgggagaatctccagagcacattagataatatcatgaagaattttcctgggtctggcctgtgcctattgctgcctctgggacaagtcaccctcatacagaaaaacttatttctctttctttttaattttgcttttctttaatttcccacctcaacagagccactggtggccgcagaagacagtccacgtgtcttaaccaggcttacaagactccaaaggtctggcttctccccacccctactccctgtcttgtctctcccacactcccccaacagcttctctggagccaagtcagccagcctccttccagcttcaggcctttgaacatgctgttctttccacctaaaaagctccctgcacttcccccagcctagttccctgcttgtatagattgttcctctaatgtgactcctggaaaagccttccttgcctctcaggctagagcagagcccccattaacagctctcacaccagcctatctttctcctccactgcatttgtcacatcctgtgatcctgtgtgcatcctgttcaatgtctgtctccacacataaaatctaaactccaaaaggataggaactgtgtctgactcgcttcctttcatgtcccttgtgcctagatgggtgccttgtatcaagcaggtgctcaacaaatgtctgctgaaaaaatgatgcagggtgcggtggctcacgcag

SEQ ID NO: 313237 - DNA, 952 bp, Homo sapiens
gctgagcagggagagcctggggccgggccgtgtggatgccatccccgagcgcggttcgcgctcggctgaggcgctggacaagtggcttgggctcccgcgcctcagtttctctctgtggcgccgcctacctcacagacttgtgagcactcactgacgtgggtagcgcccagggcctgcggggcgcaggagagctggagtcaggcggagaccgcaggctgaccccgcagcggccgggctgtcgcggcccccacctcagagccactggtggccgcagaagacagtccacgtgtcttaaccaggcttacaagactccaaagatgggtgccttgtatcaagcaggtgctcaacaaatgtctgctgaaaaaatgatgcagggtgcggtggctcacgcaggtaaccatgtgcgaccgaaaggccgtgatcaaaaatgcggacatgtcggaagagatgcaacaggactcggtggagtgcgctactcaggcgctggagaaatacaacatagagaaggacattgcggctcatatcaagaaggaatttgacaagaagtacaatcccacctggcattgcatcgtggggaggaacttcggtagttatgtgacacatgaaaccaaacacttcatctacttctacctgggccaagtggccattcttctgttcaaatctggttaaaagcatggactgtgccacacacccagtgatccatccaaaaacaaggactgcagcctaaattccaaataccagagactgaaattttcagccttgctaagggaacatctcgatgtttgaacctttgttgtgttttgtacagggcattctctgtactagtttgtcgtggttataaaacaattagcagaatagcctacatttgtatttattttctattccatacttctgcccacgttgttttctctcaaaatccattcctttaaaaaataaatctgatgcagatgtg

SEQ ID NO: 313238 - DNA, 810 bp, Homo sapiens
  misc_feature (18)..(18): n is a, c, g, or t
  misc_feature (20)..(20): n is a, c, g, or t
  misc_feature (441)..(441): n is a, c, g, or t
  misc_feature (447)..(447): n is a, c, g, or t
atccttaattaaattaancncccccccccgaggggagcagggcggggcctgagcactaggcggcggcggctggcgtggggctgcttagatgcgccacggtttcggtagcgacggtagctctagccgggcctgagctgtgctagcacctcccccaggagaccgttgcagtcggccagcccccttctccacggtaaccatgtgcgaccgaaaggccgtgatcaaaaatgcggacatgtcggaagagatgcaacaggactcggtggagtgcgctactcaggcgctggagaaatacaacatagagaaggacattgcggctcatatcaagaaggaatttgacaagaagtacaatcccacctggcattgcatcgtggggaggaacttcggtagttatgtgacacatgaaaccaaacacttcatctacttctacctgggccccccccncccctnttttgggggggggggggggggggcccccccccccccaaaaaaaaaagcaagtggccattcttctgttcaaatctggttaaaagcatggactgtgccacacacccagtgatccatccaaaaacaaggactgcagcctaaattccaaataccagagactgaaattttcagccttgctaagggaacatctcgatgtttgaacctttgttgtgttttgtacagggcattctctgtactagtttgtcgtggttataaaacaattagcagaatagcctacatttgtatttattttctattccatacttctgcccacgttgttttctctcaaaatccattcctttaaaaaataaatctgatgcagatgtg

SEQ ID NO: 313239 - DNA, 524 bp, Homo sapiens
  misc_feature (18)..(18): n is a, c, g, or t
  misc_feature (20)..(20): n is a, c, g, or t
  misc_feature (465)..(465): n is a, c, g, or t
  misc_feature (471)..(471): n is a, c, g, or t
  misc_feature (509)..(509): n is a, c, g, or t
atccttaattaaattaancncccccccccgaggggagcagggcggggcctgagcactaggcggcggcggctggcgtggggctgcttagatgcgccacggtttcggtagcgacggtagctctagccgggcctgagctgtgctagcacctcccccaggagaccgttgcagtcggccagcccccttctccacggtaaccatgtgcgaccgaaaggccgtgatcaaaaatgcggacatgtcggaagagatgcaacaggactcggtggagtgcgctactcaggcgctggagaaatacaacatagagaaggacattgcggctcatatcaagaaggaatttgacaagaagtacaatcccacctggcattgcatcgtggggaggaacttcggtagttatgtgacacatgaaaccaaacactttcaattctttaaaccctttttttttttcccctttttttaaaaaaccccccncccctnttttgggggggggggggcgccctaagtggccattcttntgttcaaatctggtt

SEQ ID NO: 313240 - DNA, 795 bp, Homo sapiens
gtatctgctgctgtctcttgctagataatatacacagttacctccctgcttctgtttatttaaggttacaaatatgcacagagaattttaagggtctggctattccttatctggaacacatcatccatgtttgggaggagacaggctctcggttccacaactgcctgatccagctatactgtgagaaggtgcaaggtctgatgaaggagtatctcctgtccttccctgcaggcaaaaccccagtcccagctggagaggaagagggtgagctgggagaataccggcaaaagctcctcatgttcttggagatttccagctactatgatccaggccggctcatctgtgattttccctttgatggcctcttagaagaacgagctctcctgttggggcgcatggggaaacatgaacaagctcttttcatttatgtccacatcttgaaggatacaaggatggctgaggagtaccgctccaaactcatcctcttccccaggaagccctcggcccccaagaagggagacagttctgctgaagaactgaaactggccacccagctgaccggaccggtcatgcccgtccggaacgtctataagaaggagaaagctcgagtcatcactgaggaagagaagaatttcaaagccttcgctagtctccgtatggcccgtgccaacgcccggctcttcggcatacgggcaaaaagagccaaggaagccgcagaacaggatgtcgaccacgaacaaacataaagccctcctggggacttggaatcaaaaaaaacaacatcactaaaaaggg

SEQ ID NO: 313241 - DNA, 722 bp, Homo sapiens
tttttttttttatattttaaaacatgatctgtcatcgctgtcccccctcccacttggccttctcccctctgctgggacactgaaaattagacactttggtggcatgagttcttatggctgccccaaagagtctccctgatttccagagggcaagggcagagctagctgtggggaacaactcaggtcagcagtgcgagcatcctgtccatgaagtagaaggcaggtagcagggcgtgggttcagagcacaggctttagagtcagcctgggtttgcttgtaggctccctcactggctgttacctaactgctttacccctcatgcccctcaaatatgagcttggaataataatacctacttcttgggagtagttgtgagtttacagaaaaaaatatatataaatttttaaaccccgaacccagtatgtagttattgcttcatgatagctgctctgatgatgatgatgataattattctctttttgactcattggtgacttttgaggctgaatatttttgtcatccccagcaaggctgaattcacatgtttttatggtatataactttcttccccttttttgtaacagtgccagcagatgtagcatcacctgaaagcggcagtaagtgtagacgcattgaattgctttagctctggagatgggtttgagtgtttgctctgtctccgtgatacagaacttagttagaatagttgctggaaattagtt

SEQ ID NO: 313242 - DNA, 360 bp, Homo sapiens
ggtttttctatgtatccctgtatttggaactaccagtgtttatttgttttccataggttgcaacagatttgaagtgacactagagaaatccaataagaacttctccaaaaagattcagcaggtaagcagtgatggcagtccttacaagaatatttgacttacatgagaccctgtcagactagaactttggtaatgttatttattaactctgaatcctcttctctttgaccttctatttatgcaggagtgtctgctcatatatcatgtgcctgagatcctctctcacaagcagaaatgataatcacagaaattatagtgcccagaaaaatcagtgagatccctgtaactggataggctccg

SEQ ID NO: 313243 - DNA, 4850 bp, Homo sapiens
ctaactagcaggaagtccggggttgacgatggctgtgttgttgaagggcctgtagccggggggttcctggccggatcccggtctacccttagcccagactcgttccggaccccagcccggcccggaacactctgggcgagacggcggtggcaactctccccttgccgccatgcacgacgctttcgagccagtgccgatcctagaaaagctgcctctgcaaatcgactgtctggctgcctgggaggaatggcttcttgtgggaaccaaacaaggacatcttcttctctataggattcggaaggacgttggttgcaacagatttgaagtgacactagagaaatccaataagaacttctccaaaaagattcagcagatccatgtggtttcccagtttaagattctggtcagcttgttagaaaataacatttatgtccatgacctattgacatttcaacaaatcactacggtttcaaaggcaaagggagcatcactgtttacttgtgacctccagcacacagagaccggtgaggaggtgttacggatgtgtgtggcagtaaaaaagaagctgcagctctatttctggaaggacagggaatttcatgaattgcagggggactttagtgtgccagatgtgcccaagtccatggcgtggtgtgaaaattctatctgtgtgggtttcaagagagactactacctaataagggtggatggaaaggggtccatcaaagagctctttccaacaggaaaacagctggagcccttagttgcacctctggcagatggaaaagtggctgtgggccaggatgatctcaccgtggtactcaatgaggaagggatctgcacacagaaatgtgccctgaactggacggacataccagtggccatggagcaccagcctccctacatcattgcagtgttgcctcgatatgttgagatccgaacatttgaaccgaggcttctggtccaaagcattgaattgcaaaggccccgtttcattacctcaggaggatcaaacattatctatgtggccagcaatcattttgtttggagactcatccctgtccccatggcaacccaaatccaacaacttctccaggacaagcagtttgaattggctctgcagctcgcagaaatgaaagatgattctgacagtgaaaagcagcaacaaattcatcacatcaagaacttgtatgccttcaacctcttctgccagaagcgttttgatgagtccatgcaggtctttgctaaacttggcacagatcccacccatgtgatgggcctgtaccctgacctgctgcccacagactacagaaagcagttgcagtatcccaacccattgcctgtgctctccggggctgaattggagaaggctcacttagctctgattgactacctgacacagaaacgaagtcaattggtaaagaagctgaatgactctgatcaccagtcaagcacctcaccgctcatggaaggcactcccaccatcaaatccaagaagaagctgctacaaatcatcgacaccaccctgctcaagtgctatctccatacaaatgtggccctggtggcccccttgctacgcctggagaacaatcactgccacatcgaggagagcgagcacgtgctaaagaaggctcacaagtacagtgagcttatcatcctgtatgagaagaaggggctccacgagaaagctctgcaggtgctcgtggaccagtccaagaaagccaactcccctctgaaaggccacgagaggacagtgcagtatctgcagcatctgggcacagaaaacctgcatttgattttctcctactcagtgtgggtgctgagagacttcccagaagatggcctgaagatatttactgaagatctcccggaagtggagtctctgccacgtgatcgagtcctcggcttcttaatagagaattttaagggtctggctattccttatctggaacacatcatccatgtttgggaggagacaggctctcggttccacaactgcctgatccagctatactgtgagaaggtgcaaggtctgatgaaggagtatctcctgtccttccctgcaggcaaaaccccagtcccagctggagaggaagagggtgagctgggagaataccggcaaaagctcctcatgttcttggagatttccagctactatgatccaggccggctcatctgtgattttccctttgatggcctcttagaagaacgagctctcctgttggggcgcatggggaaacatgaacaagctcttttcatttatgtccacatcttgaaggatacaaggatggctgaggagtactgccacaaacactatgaccgaaacaaagatggcaacaaagatgtgtatctgtccctgcttcggatgtacctgtcgccccccagcattcactgcctggggccaatcaagctggaactactggagccaaaagccaacctccaggccgctctgcaggtcctcgagctacaccacagcaaactggacaccaccaaggccctcaaccttctgccagcaaacactcagatcaatgacatacgcatcttcctggaaaaggtcttggaagaaaatgcacaaaagaaacggttcaatcaagtgctcaagaaccttctccatgcagaattcctgagggtccaggaagagcggattttacaccagcaggtgaagtgcatcatcacagaggagaaggtgtgcatggtgtgtaagaagaagattgggaacagtgcatttgcaagataccccaatggagtggtcgtccattacttctgttccaaagaggtaaacccagctgacacttgagcccagcatcctggggatccagcggatggacagcttggctctcccagagaggtgaaggagcacctggccttaggaatcctggctgccaccaccacaaggctccccatttggacattactggctatcttgtgccctggaacaactctgaattaattagactcatggtctggcattgccagctttttaatgggaaaagagattagttataccttataccattatgttgtgggcaattccagagaattcagtacctgcttggtcaggaggatgtgcaccatcttgcctttgcacaccagtcacctgaacaaggaaacttgtcacaagtgtttgtaaccatggggttgttcatcaagggcttttctattaagtacatgacttcacaaggaccgctcagcatggctcactggagagttccatgagagaacagcactcaagcttctggccgcatggacccgatggctcgcattctgtgtagtgttttacgtctccatggtaactgtgccctgcacccctcggtagccgccctgttagttttcagtctccttttctttctcaccatttatcacttccctcactgccctacccaggctttctctcccacttccctgactctgggaataactaatatttaagcaaggtaagatgagaagcaaggggtctcagttctaggaatacagtgctagttgattgtcaggtatgttgtaaatagaccctctttggccatacactccatgcctagatgcctcggagagcatcattctctgcctaggcaaggccctgcatcccttgcctcaggccgggctgagtgtgactgcagctcctgaggatgggcctgccctgtctggggtatgcgtgatccctagatacatgttcccacagaggtgcctgctccgtcttcgctcaccagacactcaggcaggctggcttagtctttgtgcgtggcgattttgtgctctgggccctttctctttttccagccagtttccattcacttgccttacagcctgccctggccgtcactccccagctttgttcagcaatggtgtggttggagagttgtgctgggatagcgcaggaaggtgggtcccggcaacacgcaggggatgagtggacctggaactgacaatggcgtgctgccaagtgttcctgagaggtgtttaggcacagcagaggggacgcggggggcaagaacagcaggacgctggtttaaaaataactcaccgccaaacctgtggagcagtgtggggcatcctgccagaggtgcacaggctggagtttcaggcactgcaggctgatgacacacagggagagtggccctgcctcctgtcctccccggggtttttgcagactcgaagtctcactgcaccagtgtctttgatggtggtgagggtgggtgatggtgcccagcaccaacagttttagtggcctgtccttgacctgccgtggtcctttgtaaactatggctccatgctgtgtgacagatcaacgtgctgatggtaagtagactaggcttccccaggcatgccgtccgtgggggcctgaagagacagtgagtgccattggccccattcgcagatgtgggagactctgctcaggcctgtgaggctgggcagcccttcaccagagttcggaggagcagtgtgtggcgccacgtcccgactggccatacccacacagaagcagtgctgcccggggcctcatctgggccagcttggactctgcttcctccaggagcagcagggaagctctgggccacctccctggatagcaggaacttgacctgccatgtgtgccctgccttcctggccagctgtgcttgttatcttccattctcacaaactgtctttgaagcaatagaataaagaatgtgtgttttctttcctggtatacatacatgatcccatgctcccaagctccattcttccttccctcaactctctgccctccacagagctatggagaaggctggagatgaaagctttgtagtgaggactgataaagatctcatcactgctccttataataaacctaataaagcaagaaaccaaaaaaa

SEQ ID NO: 313244 - DNA, 4241 bp, Homo sapiens
acgatgtccgtgtaacagagcagctgcttccacctttcagatatagatgttggaaccacagcagaagttatagagagactactacctaataagggtggatggaaaggggtccatcaaagagctctttccaacaggaaaacagctggagcccttagttgcacctctggcagatggaaaagtggctgtgggccaggatgatctcaccgtggtactcaatgaggaagggatctgcacacagaaatgtgccctgaactggacggacataccagtggccatggagcaccagcctccctacatcattgcagtgttgcctcgatatgttgagatccgaacatttgaaccgaggcttctggtccaaagcattgaattgcaaaggccccgtttcattacctcaggaggatcaaacattatctatgtggccagcaatcattttgtttggagactcatccctgtccccatggcaacccaaatccaacaacttctccaggacaagcagtttgaattggctctgcagctcgcagaaatgaaagatgattctgacagtgaaaagcagcaacaaattcatcacatcaagaacttgtatgccttcaacctcttctgccagaagcgttttgatgagtccatgcaggtctttgctaaacttggcacagatcccacccatgtgatgggcctgtaccctgacctgctgcccacagactacagaaagcagttgcagtatcccaacccattgcctgtgctctccggggctgaattggagaaggctcacttagctctgattgactacctgacacagaaacgaagtcaattggtaaagaagctgaatgactctgatcaccagtcaagcacctcaccgctcatggaaggcactcccaccatcaaatccaagaagaagctgctacaaatcatcgacaccaccctgctcaagtgctatctccatacaaatgtggccctggtggcccccttgctacgcctggagaacaatcactgccacatcgaggagagcgagcacgtgctaaagaaggctcacaagtacagtgagcttatcatcctgtatgagaagaaggggctccacgagaaagctctgcaggtgctcgtggaccagtccaagaaagccaactcccctctgaaaggccacgagaggacagtgcagtatctgcagcatctgggcacagaaaacctgcatttgattttctcctactcagtgtgggtgctgagagacttcccagaagatggcctgaagatatttactgaagatctcccggaagtggagtctctgccacgtgatcgagtcctcggcttcttaatagagaattttaagggtctggctattccttatctggaacacatcatccatgtttgggaggagacaggctctcggttccacaactgcctgatccagctatactgtgagaaggtgcaaggtctgatgaaggagtatctcctgtccttccctgcaggcaaaaccccagtcccagctggagaggaagagggtgagctgggagaataccggcaaaagctcctcatgttcttggagatttccagctactatgatccaggccggctcatctgtgattttccctttgatggcctcttagaagaacgagctctcctgttggggcgcatggggaaacatgaacaagctcttttcatttatgtccacatcttgaaggatacaaggatggctgaggagtactgccacaaacactatgaccgaaacaaagatggcaacaaagatgtgtatctgtccctgcttcggatgtacctgtcgccccccagcattcactgcctggggccaatcaagctggaactactggagccaaaagccaacctccaggccgctctgcaggtcctcgagctacaccacagcaaactggacaccaccaaggccctcaaccttctgccagcaaacactcagatcaatgacatacgcatcttcctggaaaaggtcttggaagaaaatgcacaaaagaaacggttcaatcaagtgctcaagaaccttctccatgcagaattcctgagggtccaggaagagcggattttacaccagcaggtgaagtgcatcatcacagaggagaaggtgtgcatggtgtgtaagaagaagattgggaacagtgcatttgcaagataccccaatggagtggtcgtccattacttctgttccaaagaggtaaacccagctgacacttgagcccagcatcctggggatccagcggatggacagcttggctctcccagagaggtgaaggagcacctggccttaggaatcctggctgccaccaccacaaggctccccatttggacattactggctatcttgtgccctggaacaactctgaattaattagactcatggtctggcattgccagctttttaatgggaaaagagattagttataccttataccattatgttgtgggcaattccagagaattcagtacctgcttggtcaggaggatgtgcaccatcttgcctttgcacaccagtcacctgaacaaggaaacttgtcacaagtgtttgtaaccatggggttgttcatcaagggcttttctattaagtacatgacttcacaaggaccgctcagcatggctcactggagagttccatgagagaacagcactcaagcttctggccgcatggacccgatggctcgcattctgtgtagtgttttacgtctccatggtaactgtgccctgcacccctcggtagccgccctgttagttttcagtctccttttctttctcaccatttatcacttccctcactgccctacccaggctttctctcccacttccctgactctgggaataactaatatttaagcaaggtaagatgagaagcaaggggtctcagttctaggaatacagtgctagttgattgtcaggtatgttgtaaatagaccctctttggccatacactccatgcctagatgcctcggagagcatcattctctgcctaggcaaggccctgcatcccttgcctcaggccgggctgagtgtgactgcagctcctgaggatgggcctgccctgtctggggtatgcgtgatccctagatacatgttcccacagaggtgcctgctccgtcttcgctcaccagacactcaggcaggctggcttagtctttgtgcgtggcgattttgtgctctgggccctttctctttttccagccagtttccattcacttgccttacagcctgccctggccgtcactccccagctttgttcagcaatggtgtggttggagagttgtgctgggatagcgcaggaaggtgggtcccggcaacacgcaggggatgagtggacctggaactgacaatggcgtgctgccaagtgttcctgagaggtgtttaggcacagcagaggggacgcggggggcaagaacagcaggacgctggtttaaaaataactcaccgccaaacctgtggagcagtgtggggcatcctgccagaggtgcacaggctggagtttcaggcactgcaggctgatgacacacagggagagtggccctgcctcctgtcctccccggggtttttgcagactcgaagtctcactgcaccagtgtctttgatggtggtgagggtgggtgatggtgcccagcaccaacagttttagtggcctgtccttgacctgccgtggtcctttgtaaactatggctccatgctgtgtgacagatcaacgtgctgatggtaagtagactaggcttccccaggcatgccgtccgtgggggcctgaagagacagtgagtgccattggccccattcgcagatgtgggagactctgctcaggcctgtgaggctgggcagcccttcaccagagttcggaggagcagtgtgtggcgccacgtcccgactggccatacccacacagaagcagtgctgcccggggcctcatctgggccagcttggactctgcttcctccaggagcagcagggaagctctgggccacctccctggatagcaggaacttgacctgccatgtgtgccctgccttcctggccagctgtgcttgttatcttccattctcacaaactgtctttgaagcaatagaataaagaatgtgtgttttctttcctggtatacatacatgatcccatgctcccaagctccattcttccttccctcaactctctgccctccacagagctatggagaaggctggagatgaaagctttgtagtgaggactgataaagatctcatcactgctccttataataaacctaataaagcaagaaaccaaaaaaa

SEQ ID NO: 313245 - DNA, 4155 bp, Homo sapiens
actacctaataagggtgcacaggctggagtttcaggcactgcaggctgaatgactctgatcaccagtcaagcacctcaccgctcatggaaaagtggctgtgggccaggatgatctcaccgtggtactcaatgaggaagggatctgcacacagaaatgtgccctgaactggacggacataccagtggccatggagcaccagcctccctacatcattgcagtgttgcctcgatatgttgagatccgaacatttgaaccgaggcttctggtccaaagcattgaattgcaaaggccccgtttcattacctcaggaggatcaaacattatctatgtggccagcaatcattttgtttggagactcatccctgtccccatggcaacccaaatccaacaacttctccaggacaagcagtttgaattggctctgcagctcgcagaaatgaaagatgattctgacagtgaaaagcagcaacaaattcatcacatcaagaacttgtatgccttcaacctcttctgccagaagcgttttgatgagtccatgcaggtctttgctaaacttggcacagatcccacccatgtgatgggcctgtaccctgacctgctgcccacagactacagaaagcagttgcagtatcccaacccattgcctgtgctctccggggctgaattggagaaggctcacttagctctgattgactacctgacacagaaacgaagtcaattggtaaagaagctgaatgactctgatcaccagtcaagcacctcaccgctcatggaaggcactcccaccatcaaatccaagaagaagctgctacaaatcatcgacaccaccctgctcaagtgctatctccatacaaatgtggccctggtggcccccttgctacgcctggagaacaatcactgccacatcgaggagagcgagcacgtgctaaagaaggctcacaagtacagtgagcttatcatcctgtatgagaagaaggggctccacgagaaagctctgcaggtgctcgtggaccagtccaagaaagccaactcccctctgaaaggccacgagaggacagtgcagtatctgcagcatctgggcacagaaaacctgcatttgattttctcctactcagtgtgggtgctgagagacttcccagaagatggcctgaagatatttactgaagatctcccggaagtggagtctctgccacgtgatcgagtcctcggcttcttaatagagaattttaagggtctggctattccttatctggaacacatcatccatgtttgggaggagacaggctctcggttccacaactgcctgatccagctatactgtgagaaggtgcaaggtctgatgaaggagtatctcctgtccttccctgcaggcaaaaccccagtcccagctggagaggaagagggtgagctgggagaataccggcaaaagctcctcatgttcttggagatttccagctactatgatccaggccggctcatctgtgattttccctttgatggcctcttagaagaacgagctctcctgttggggcgcatggggaaacatgaacaagctcttttcatttatgtccacatcttgaaggatacaaggatggctgaggagtactgccacaaacactatgaccgaaacaaagatggcaacaaagatgtgtatctgtccctgcttcggatgtacctgtcgccccccagcattcactgcctggggccaatcaagctggaactactggagccaaaagccaacctccaggccgctctgcaggtcctcgagctacaccacagcaaactggacaccaccaaggccctcaaccttctgccagcaaacactcagatcaatgacatacgcatcttcctggaaaaggtcttggaagaaaatgcacaaaagaaacggttcaatcaagtgctcaagaaccttctccatgcagaattcctgagggtccaggaagagcggattttacaccagcaggtgaagtgcatcatcacagaggagaaggtgtgcatggtgtgtaagaagaagattgggaacagtgcatttgcaagataccccaatggagtggtcgtccattacttctgttccaaagaggtaaacccagctgacacttgagcccagcatcctggggatccagcggatggacagcttggctctcccagagaggtgaaggagcacctggccttaggaatcctggctgccaccaccacaaggctccccatttggacattactggctatcttgtgccctggaacaactctgaattaattagactcatggtctggcattgccagctttttaatgggaaaagagattagttataccttataccattatgttgtgggcaattccagagaattcagtacctgcttggtcaggaggatgtgcaccatcttgcctttgcacaccagtcacctgaacaaggaaacttgtcacaagtgtttgtaaccatggggttgttcatcaagggcttttctattaagtacatgacttcacaaggaccgctcagcatggctcactggagagttccatgagagaacagcactcaagcttctggccgcatggacccgatggctcgcattctgtgtagtgttttacgtctccatggtaactgtgccctgcacccctcggtagccgccctgttagttttcagtctccttttctttctcaccatttatcacttccctcactgccctacccaggctttctctcccacttccctgactctgggaataactaatatttaagcaaggtaagatgagaagcaaggggtctcagttctaggaatacagtgctagttgattgtcaggtatgttgtaaatagaccctctttggccatacactccatgcctagatgcctcggagagcatcattctctgcctaggcaaggccctgcatcccttgcctcaggccgggctgagtgtgactgcagctcctgaggatgggcctgccctgtctggggtatgcgtgatccctagatacatgttcccacagaggtgcctgctccgtcttcgctcaccagacactcaggcaggctggcttagtctttgtgcgtggcgattttgtgctctgggccctttctctttttccagccagtttccattcacttgccttacagcctgccctggccgtcactccccagctttgttcagcaatggtgtggttggagagttgtgctgggatagcgcaggaaggtgggtcccggcaacacgcaggggatgagtggacctggaactgacaatggcgtgctgccaagtgttcctgagaggtgtttaggcacagcagaggggacgcggggggcaagaacagcaggacgctggtttaaaaataactcaccgccaaacctgtggagcagtgtggggcatcctgccagaggtgcacaggctggagtttcaggcactgcaggctgatgacacacagggagagtggccctgcctcctgtcctccccggggtttttgcagactcgaagtctcactgcaccagtgtctttgatggtggtgagggtgggtgatggtgcccagcaccaacagttttagtggcctgtccttgacctgccgtggtcctttgtaaactatggctccatgctgtgtgacagatcaacgtgctgatggtaagtagactaggcttccccaggcatgccgtccgtgggggcctgaagagacagtgagtgccattggccccattcgcagatgtgggagactctgctcaggcctgtgaggctgggcagcccttcaccagagttcggaggagcagtgtgtggcgccacgtcccgactggccatacccacacagaagcagtgctgcccggggcctcatctgggccagcttggactctgcttcctccaggagcagcagggaagctctgggccacctccctggatagcaggaacttgacctgccatgtgtgccctgccttcctggccagctgtgcttgttatcttccattctcacaaactgtctttgaagcaatagaataaagaatgtgtgttttctttcctggtatacatacatgatcccatgctcccaagctccattcttccttccctcaactctctgccctccacagagctatggagaaggctggagatgaaagctttgtagtgaggactgataaagatctcatcactgctccttataataaacctaataaagcaagaaaccaaaaaaa

SEQ ID NO: 313246 - DNA, 3990 bp, Homo sapiens
aactgctgtgtatgttctctttcacagagcaccagcctccctacatcattgcagtgttgcctcgatatgttgagatccgaacatttgaaccgaggcttctggtccaaagcattgaattgcaaaggccccgtttcattacctcaggaggatcaaacattatctatgtggccagcaatcattttgtttggagactcatccctgtccccatggcaacccaaatccaacaacttctccaggacaagcagtttgaattggctctgcagctcgcagaaatgaaagatgattctgacagtgaaaagcagcaacaaattcatcacatcaagaacttgtatgccttcaacctcttctgccagaagcgttttgatgagtccatgcaggtctttgctaaacttggcacagatcccacccatgtgatgggcctgtaccctgacctgctgcccacagactacagaaagcagttgcagtatcccaacccattgcctgtgctctccggggctgaattggagaaggctcacttagctctgattgactacctgacacagaaacgaagtcaattggtaaagaagctgaatgactctgatcaccagtcaagcacctcaccgctcatggaaggcactcccaccatcaaatccaagaagaagctgctacaaatcatcgacaccaccctgctcaagtgctatctccatacaaatgtggccctggtggcccccttgctacgcctggagaacaatcactgccacatcgaggagagcgagcacgtgctaaagaaggctcacaagtacagtgagcttatcatcctgtatgagaagaaggggctccacgagaaagctctgcaggtgctcgtggaccagtccaagaaagccaactcccctctgaaaggccacgagaggacagtgcagtatctgcagcatctgggcacagaaaacctgcatttgattttctcctactcagtgtgggtgctgagagacttcccagaagatggcctgaagatatttactgaagatctcccggaagtggagtctctgccacgtgatcgagtcctcggcttcttaatagagaattttaagggtctggctattccttatctggaacacatcatccatgtttgggaggagacaggctctcggttccacaactgcctgatccagctatactgtgagaaggtgcaaggtctgatgaaggagtatctcctgtccttccctgcaggcaaaaccccagtcccagctggagaggaagagggtgagctgggagaataccggcaaaagctcctcatgttcttggagatttccagctactatgatccaggccggctcatctgtgattttccctttgatggcctcttagaagaacgagctctcctgttggggcgcatggggaaacatgaacaagctcttttcatttatgtccacatcttgaaggatacaaggatggctgaggagtactgccacaaacactatgaccgaaacaaagatggcaacaaagatgtgtatctgtccctgcttcggatgtacctgtcgccccccagcattcactgcctggggccaatcaagctggaactactggagccaaaagccaacctccaggccgctctgcaggtcctcgagctacaccacagcaaactggacaccaccaaggccctcaaccttctgccagcaaacactcagatcaatgacatacgcatcttcctggaaaaggtcttggaagaaaatgcacaaaagaaacggttcaatcaagtgctcaagaaccttctccatgcagaattcctgagggtccaggaagagcggattttacaccagcaggtgaagtgcatcatcacagaggagaaggtgtgcatggtgtgtaagaagaagattgggaacagtgcatttgcaagataccccaatggagtggtcgtccattacttctgttccaaagaggtaaacccagctgacacttgagcccagcatcctggggatccagcggatggacagcttggctctcccagagaggtgaaggagcacctggccttaggaatcctggctgccaccaccacaaggctccccatttggacattactggctatcttgtgccctggaacaactctgaattaattagactcatggtctggcattgccagctttttaatgggaaaagagattagttataccttataccattatgttgtgggcaattccagagaattcagtacctgcttggtcaggaggatgtgcaccatcttgcctttgcacaccagtcacctgaacaaggaaacttgtcacaagtgtttgtaaccatggggttgttcatcaagggcttttctattaagtacatgacttcacaaggaccgctcagcatggctcactggagagttccatgagagaacagcactcaagcttctggccgcatggacccgatggctcgcattctgtgtagtgttttacgtctccatggtaactgtgccctgcacccctcggtagccgccctgttagttttcagtctccttttctttctcaccatttatcacttccctcactgccctacccaggctttctctcccacttccctgactctgggaataactaatatttaagcaaggtaagatgagaagcaaggggtctcagttctaggaatacagtgctagttgattgtcaggtatgttgtaaatagaccctctttggccatacactccatgcctagatgcctcggagagcatcattctctgcctaggcaaggccctgcatcccttgcctcaggccgggctgagtgtgactgcagctcctgaggatgggcctgccctgtctggggtatgcgtgatccctagatacatgttcccacagaggtgcctgctccgtcttcgctcaccagacactcaggcaggctggcttagtctttgtgcgtggcgattttgtgctctgggccctttctctttttccagccagtttccattcacttgccttacagcctgccctggccgtcactccccagctttgttcagcaatggtgtggttggagagttgtgctgggatagcgcaggaaggtgggtcccggcaacacgcaggggatgagtggacctggaactgacaatggcgtgctgccaagtgttcctgagaggtgtttaggcacagcagaggggacgcggggggcaagaacagcaggacgctggtttaaaaataactcaccgccaaacctgtggagcagtgtggggcatcctgccagaggtgcacaggctggagtttcaggcactgcaggctgatgacacacagggagagtggccctgcctcctgtcctccccggggtttttgcagactcgaagtctcactgcaccagtgtctttgatggtggtgagggtgggtgatggtgcccagcaccaacagttttagtggcctgtccttgacctgccgtggtcctttgtaaactatggctccatgctgtgtgacagatcaacgtgctgatggtaagtagactaggcttccccaggcatgccgtccgtgggggcctgaagagacagtgagtgccattggccccattcgcagatgtgggagactctgctcaggcctgtgaggctgggcagcccttcaccagagttcggaggagcagtgtgtggcgccacgtcccgactggccatacccacacagaagcagtgctgcccggggcctcatctgggccagcttggactctgcttcctccaggagcagcagggaagctctgggccacctccctggatagcaggaacttgacctgccatgtgtgccctgccttcctggccagctgtgcttgttatcttccattctcacaaactgtctttgaagcaatagaataaagaatgtgtgttttctttcctggtatacatacatgatcccatgctcccaagctccattcttccttccctcaactctctgccctccacagagctatggagaaggctggagatgaaagctttgtagtgaggactgataaagatctcatcactgctccttataataaacctaataaagcaagaaaccaaaaaaa

SEQ ID NO: 313247 - DNA, 3015 bp, Homo sapiens
gtatctgctgctgtctcttgctagataatatacacagttacctccctgcttctgtttatttaaggttacaaatatgcacagagaattttaagggtctggctattccttatctggaacacatcatccatgtttgggaggagacaggctctcggttccacaactgcctgatccagctatactgtgagaaggtgcaaggtctgatgaaggagtatctcctgtccttccctgcaggcaaaaccccagtcccagctggagaggaagagggtgagctgggagaataccggcaaaagctcctcatgttcttggagatttccagctactatgatccaggccggctcatctgtgattttccctttgatggcctcttagaagaacgagctctcctgttggggcgcatggggaaacatgaacaagctcttttcatttatgtccacatcttgaaggatacaaggatggctgaggagtactgccacaaacactatgaccgaaacaaagatggcaacaaagatgtgtatctgtccctgcttcggatgtacctgtcgccccccagcattcactgcctggggccaatcaagctggaactactggagccaaaagccaacctccaggccgctctgcaggtcctcgagctacaccacagcaaactggacaccaccaaggccctcaaccttctgccagcaaacactcagatcaatgacatacgcatcttcctggaaaaggtcttggaagaaaatgcacaaaagaaacggttcaatcaagtgctcaagaaccttctccatgcagaattcctgagggtccaggaagagcggattttacaccagcaggtgaagtgcatcatcacagaggagaaggtgtgcatggtgtgtaagaagaagattgggaacagtgcatttgcaagataccccaatggagtggtcgtccattacttctgttccaaagaggtaaacccagctgacacttgagcccagcatcctggggatccagcggatggacagcttggctctcccagagaggtgaaggagcacctggccttaggaatcctggctgccaccaccacaaggctccccatttggacattactggctatcttgtgccctggaacaactctgaattaattagactcatggtctggcattgccagctttttaatgggaaaagagattagttataccttataccattatgttgtgggcaattccagagaattcagtacctgcttggtcaggaggatgtgcaccatcttgcctttgcacaccagtcacctgaacaaggaaacttgtcacaagtgtttgtaaccatggggttgttcatcaagggcttttctattaagtacatgacttcacaaggaccgctcagcatggctcactggagagttccatgagagaacagcactcaagcttctggccgcatggacccgatggctcgcattctgtgtagtgttttacgtctccatggtaactgtgccctgcacccctcggtagccgccctgttagttttcagtctccttttctttctcaccatttatcacttccctcactgccctacccaggctttctctcccacttccctgactctgggaataactaatatttaagcaaggtaagatgagaagcaaggggtctcagttctaggaatacagtgctagttgattgtcaggtatgttgtaaatagaccctctttggccatacactccatgcctagatgcctcggagagcatcattctctgcctaggcaaggccctgcatcccttgcctcaggccgggctgagtgtgactgcagctcctgaggatgggcctgccctgtctggggtatgcgtgatccctagatacatgttcccacagaggtgcctgctccgtcttcgctcaccagacactcaggcaggctggcttagtctttgtgcgtggcgattttgtgctctgggccctttctctttttccagccagtttccattcacttgccttacagcctgccctggccgtcactccccagctttgttcagcaatggtgtggttggagagttgtgctgggatagcgcaggaaggtgggtcccggcaacacgcaggggatgagtggacctggaactgacaatggcgtgctgccaagtgttcctgagaggtgtttaggcacagcagaggggacgcggggggcaagaacagcaggacgctggtttaaaaataactcaccgccaaacctgtggagcagtgtggggcatcctgccagaggtgcacaggctggagtttcaggcactgcaggctgatgacacacagggagagtggccctgcctcctgtcctccccggggtttttgcagactcgaagtctcactgcaccagtgtctttgatggtggtgagggtgggtgatggtgcccagcaccaacagttttagtggcctgtccttgacctgccgtggtcctttgtaaactatggctccatgctgtgtgacagatcaacgtgctgatggtaagtagactaggcttccccaggcatgccgtccgtgggggcctgaagagacagtgagtgccattggccccattcgcagatgtgggagactctgctcaggcctgtgaggctgggcagcccttcaccagagttcggaggagcagtgtgtggcgccacgtcccgactggccatacccacacagaagcagtgctgcccggggcctcatctgggccagcttggactctgcttcctccaggagcagcagggaagctctgggccacctccctggatagcaggaacttgacctgccatgtgtgccctgccttcctggccagctgtgcttgttatcttccattctcacaaactgtctttgaagcaatagaataaagaatgtgtgttttctttcctggtatacatacatgatcccatgctcccaagctccattcttccttccctcaactctctgccctccacagagctatggagaaggctggagatgaaagctttgtagtgaggactgataaagatctcatcactgctccttataataaacctaataaagcaagaaaccaaaaaaa

SEQ ID NO: 313248 - DNA, 4508 bp, Homo sapiens
ctaactagcaggaagtccggggttgacgatggctgtgttgttgaagggcctgtagccggggggttcctggccggatcccggtctacccttagcccagactcgttccggaccccagcccggcccggaacactctgggcgagacggcggtggcaactctccccttgccgccatgcacgacgctttcgagccagtgccgatcctagaaaagctgcctctgcaaatcgactgtctggctgcctgggaggaatggcttcttgtgggaaccaaacaaggacatcttcttctctataggattcggaaggacgttgtgccagcagatgtagcatcacctgaaagcggcagttgcaacagatttgaagtgacactagagaaatccaataagaacttctccaaaaagattcagcagatccatgtggtttcccagtttaagattctggtcagcttgttagaaaataacatttatgtccatgacctattgacatttcaacaaatcactacggtttcaaaggcaaagggagcatcactgtttacttgtgacctccagcacacagagaccggtgaggaggtgttacggatgtgtgtggcagtaaaaaagaagctgcagctctatttctggaaggacagggaatttcatgaattgcagggggactttagtgtgccagatgtgcccaagtccatggcgtggtgtgaaaattctatctgtgtgggtttcaagagagactactacctaataagggtggatggaaaggggtccatcaaagagctctttccaacaggaaaacagctggagcccttagttgcacctctggcagatggaaaagtggctgtgggccaggatgatctcaccgtggtactcaatgaggaagggatctgcacacagaaatgtgccctgaactggacggacataccagtggccatggagcaccagcctccctacatcattgcagtgttgcctcgatatgttgagatccgaacatttgaaccgaggcttctggtccaaagcattgaattgcaaaggccccgtttcattacctcaggaggatcaaacattatctatgtggccagcaatcattttgtttggagactcatccctgtccccatggcaacccaaatccaacaacttctccaggacaagcagtttgaattggctctgcagctcgcagaaatgaaagatgattctgacagtgaaaagcagcaacaaattcatcacatcaagaacttgtatgccttcaacctcttctgccagaagcgttttgatgagtccatgcaggtctttgctaaacttggcacagatcccacccatgtgatgggcctgtaccctgacctgctgcccacagactacagaaagcagttgcagtatcccaacccattgcctgtgctctccggggctgaattggagaaggctcacttagctctgattgactacctgacacagaaacgaagtcaattggtaaagaagctgaatgactctgatcaccagtcaagcacctcaccgctcatggaaggcactcccaccatcaaatccaagaagaagctgctacaaatcatcgacaccaccctgctcaagtgctatctccatacaaatgtggccctggtggcccccttgctacgcctggagaacaatcactgccacatcgaggagagcgagcacgtgctaaagaaggctcacaagtacagtgagcttatcatcctgtatgagaagaaggggctccacgagaaagctctgcaggtgctcgtggaccagtccaagaaagccaactcccctctgaaaggccacgagaggacagtgcagtatctgcagcatctgggcacagaaaacctgcatttgattttctcctactcagtgtgggtgctgagagacttcccagaagatggcctgaagatatttactgaagatctcccggaagtggagtctctgccacgtgatcgagtcctcggcttcttaatagagaattttaagggtctggctattccttatctggaacacatcatccatgtttgggaggagacaggctctcggttccacaactgcctgatccagctatactgtgagaaggtgcaaggtctgatgaaggagtatctcctgtccttccctgcaggcaaaaccccagtcccagctggagaggaagagggtgagctgggagaataccggcaaaagctcctcatgttcttggagatttccagctactatgatccaggccggctcatctgtgattttccctttgatggcctcttagaagaacgagctctcctgttggggcgcatggggaaacatgaacaagctcttttcatttatgtccacatcttgaaggatacaaggatggctgaggagtactgccacaaacactatgaccgaaacaaagatggcaacaaagatgtgtatctgtccctgcttcggatgtacctgtcgccccccagcattcactgcctggggccaatcaagctggaactactggagccaaaagccaacctccaggccgctctgcaggtcctcgagctacaccacagcaaactggacaccaccaaggccctcaaccttctgccagcaaacactcagatcaatgacatacgcatcttcctggaaaaggtcttggaagaaaatgcacaaaagaaacggttcaatcaagtgctcaagaaccttctccatgcagaattcctgagggtccaggaagagcggattttacaccagcaggtgaagtgcatcatcacagaggagaaggtgtgcatggtgtgtaagaagaagattgggaacagtgcatttgcaagataccccaatggagtggtcgtccattacttctgttccaaagaggtaaacccagctgacacttgagcccagcatcctggggatccagcggatggacagcttggctctcccagagaggtgaaggagcacctggccttaggaatcctggctgccaccaccacaaggctccccatttggacattactggctatcttgtgccctggaacaactctgaattaattagactcatggtctggcattgccagctttttaatgggaaaagagattagttataccttataccattatgttgtgggcaattccagagaattcagtacctgcttggtcaggaggatgtgcaccatcttgcctttgcacaccagtcacctgaacaaggaaacttgtcacaagtgtttgtaaccatggggttgttcatcaagggcttttctattaagtacatgacttcacaaggaccgctcagcatggctcactggagagttccatgagagaacagcactcaagcttctggccgcatggacccgatggctcgcattctgtgtagtgttttacgtctccatggtaactgtgccctgcacccctcggtagccgccctgttagttttcagtctccttttctttctcaccatttatcacttccctcactgccctacccaggctttctctcccacttccctgactctgggaataactaatatttaagcaaggtaagatgagaagcaaggggtctcagttctaggaatacagtgctagttgattgtcaggtatgttgtaaatagaccctctttggccatacactccatgcctagatgcctcggagagcatcattctctgcctaggcaaggccctgcatcccttgcctcaggccgggctgagtgtgactgcagctcctgaggatgggcctgccctgtctggggtatgcgtgatccctagatacatgttcccacagaggtgcctgctccgtcttcgctcaccagacactcaggcaggctggcttagtctttgtgcgtggcgattttgtgctctgggccctttctctttttccagccagtttccattcacttgccttacagcctgccctggccgtcactccccagctttgttcagcaatggtgtggttggagagttgtgctgggatagcgcaggaaggtgggtcccggcaacacgcaggggatgagtggacctggaactgacaatggcgtgctgccaagtgttcctgagaggtgtttaggcacagcagaggggacgcggggggcaagaacagcaggacgctggtttaaaaataactcaccgccaaacctgtggagcagtgtggggcatcctgccagaggtgcacaggctggagtttcaggcactgcaggctgatgacacacagggagactgcccggggcctcatctgggccagcttggactctgcttcctccaggagcagcagggaagctctgggccacctccctggatagcaggaacttgacctgccatgtgtgccctgccttcctggccagctgtgcttgttatcttccattctcacaaactgtctttgaagcaatagaataaagaatgtgtgttttctttcctggtatacatacatgatcccatgctcccaagctccattcttccttccctcaactctctgccctccacagagctatggagaaggctggagatgaaagctttgtagtgaggactgataaagatctcatcactgctccttataataaacctaataaagcaagaaaccaaaaaaa

SEQ ID NO: 313249 - DNA, 3524 bp, Homo sapiens
ctaactagcaggaagtccggggttgacgatggctgtgttgttgaagggcctgtagccggggggttcctggccggatcccggtctacccttagcccagactcgttccggaccccagcccggcccggaacactctgggcgagacggcggtggcaactctccccttgccgccatgcacgacgctttcgagccagtgccgatcctagaaaagctgcctctgcaaatcgactgtctggctgcctgggaggaatggcttcttgtgggaaccaaacaaggacatcttcttctctataggattcggaaggacgttgtgccagcagatgtagcatcacctgaaagcggcagttgcaacagatttgaagtgacactagagaaatccaataagaacttctccaaaaagattcagcagatccatgtggtttcccagtttaagattctggtcagcttgttagaaaataacatttatgtccatgacctattgacatttcaacaaatcactacggtttcaaaggcaaagggagcatcactgtttacttgtgacctccagcacacagagaccggtgaggaggtgttacggatgtgtgtggcagtaaaaaagaagctgcagctctatttctggaaggacagggaatttcatgaattgcagggggactttagtgtgccagatgtgcccaagtccatggcgtggtgtgaaaattctatctgtgtgggtttcaagagagactactacctaataagggtggatggaaaggggtccatcaaagagctctttccaacaggaaaacagctggagcccttagttgcacctctggcagatggaaaagtggctgtgggccaggatgatctcaccgtggtactcaatgaggaagggatctgcacacagaaatgtgccctgaactggacggacataccagtggccatggagcaccagcctccctacatcattgcagtgttgcctcgatatgttgagatccgaacatttgaaccgaggcttctggtccaaagcattgaattgcaaaggccccgtttcattacctcaggaggatcaaacattatctatgtggccagcaatcattttgtttggagactcatccctgtccccatggcaacccaaatccaacaacttctccaggacaagcagtttgaattggctctgcagctcgcagaaatgaaagatgattctgacagtgaaaagcagcaacaaattcatcacatcaagaacttgtatgccttcaacctcttctgccagaagcgttttgatgagtccatgcaggtctttgctaaacttggcacagatcccacccatgtgatgggcctgtaccctgacctgctgcccacagactacagaaagcagttgcagtatcccaacccattgcctgtgctctccggggctgaattggagaaggctcacttagctctgattgactacctgacacagaaacgaagtcaattggtaaagaagctgaatgactctgatcaccagtcaagcacctcaccgctcatggaaggcactcccaccatcaaatccaagaagaagctgctacaaatcatcgacaccaccctgctcaagtgctatctccatacaaatgtggccctggtggcccccttgctacgcctggagaacaatcactgccacatcgaggagagcgagcacgtgctaaagaaggctcacaagtacagtgagcttatcatcctgtatgagaagaaggggctccacgagaaagctctgcaggtgctcgtggaccagtccaagaaagccaactcccctctgaaaggccacgagaggacagtgcagtatctgcagcatctgggcacagaaaacctgcatttgattttctcctactcagtgtgggtgctgagagacttcccagaagatggcctgaagatatttactgaagatctcccggaagtggagtctctgccacgtgatcgagtcctcggcttcttaatagagaattttaagggtctggctattccttatctggaacacatcatccatgtttgggaggagacaggctctcggttccacaactgcctgatccagctatactgtgagaaggtgcaaggtctgatgaaggagtatctcctgtccttccctgcaggcaaaaccccagtcccagctggagaggaagagggtgagctgggagaataccggcaaaagctcctcatgttcttggagatttccagctactatgatccaggccggctcatctgtgattttccctttgatggcctcttagaagaacgagctctcctgttggggcgcatggggaaacatgaacaagctcttttcatttatgtccacatcttgaaggatacaaggatggctgaggagtactgccacaaacactatgaccgaaacaaagatggcaacaaagatgtgtatctgtccctgcttcggatgtacctgtcgccccccagcattcactgcctggggccaatcaagctggaactactggagccaaaagccaacctccaggccgctctgcaggtcctcgagctacaccacagcaaactggacaccaccaaggccctcaaccttctgccagcaaacactcagatcaatgacatacgcatcttcctggaaaaggtcttggaagaaaatgcacaaaagaaacggttcaatcaagtgctcaagaaccttctccatgcagaattcctgagggtccaggaagagcggattttacaccagcaggtgaagtgcatcatcacagaggagaaggtgtgcatggtgtgtaagaagaagattgggaacagtgcatttgcaagataccccaatggagtggtcgtccattacttctgttccaaagaggtaaacccagctgacacttgagcccagcatcctggggatccagcggatggacagcttggctctcccagagaggtgaaggagcacctggccttaggaatcctggctgccaccaccacaaggctccccatttggacattactggctatcttgtgccctggaacaactctgaattaattagactcatggtctggcattgccagctttttaatgggaaaagagattagttataccttataccattatgttgtgggcaattccagagaattcagtacctgcttggtcaggaggatgtgcaccatcttgcctttgcacaccagtcacctgaacaaggaaacttgtcacaagtgtttgtaaccatggggttgttcatcaagggcttttctattaagtacatgacttcacaaggaccgctcagcatggctcactggagagttccatgagagaacagcactcaagcttctggccgcatggacccgatggctcgcattctgtgtagtgttttacgtctccatggtaactgtgccctgcacccctcggtagccgccctgttagttttcagtctccttttctttctcaccatttatcacttccctcaactctctgccctccacagagctatggagaaggctggagatgaaagctttgtagtgaggactgataaagatctcatcactgctccttataataaacctaataaagcaagaaaccaaaaaaa

SEQ ID NO: 313250 - DNA, 3377 bp, Homo sapiens
ctaactagcaggaagtccggggttgacgatggctgtgttgttgaagggcctgtagccggggggttcctggccggatcccggtctacccttagcccagactcgttccggaccccagcccggcccggaacactctgggcgagacggcggtggcaactctccccttgccgccatgcacgacgctttcgagccagtgccgatcctagaaaagctgcctctgcaaatcgactgtctggctgcctgggaggaatggcttcttgtgggaaccaaacaaggacatcttcttctctataggattcggaaggacgttgtgccagcagatgtagcatcacctgaaagcggcagttgcaacagatttgaagtgacactagagaaatccaataagaacttctccaaaaagattcagcagatccatgtggtttcccagtttaagattctggtcagcttgttagaaaataacatttatgtccatgacctattgacatttcaacaaatcactacggtttcaaaggcaaagggagcatcactgtttacttgtgacctccagcacacagagaccggtgaggaggtgttacggatgtgtgtggcagtaaaaaagaagctgcagctctatttctggaaggacagggaatttcatgaattgcagggggactttagtgtgccagatgtgcccaagtccatggcgtggtgtgaaaattctatctgtgtgggtttcaagagagactactacctaataagggtggatggaaaggggtccatcaaagagctctttccaacaggaaaacagctggagcccttagttgcacctctggcagatggaaaagtggctgtgggccaggatgatctcaccgtggtactcaatgaggaagggatctgcacacagaaatgtgccctgaactggacggacataccagtggccatggagcaccagcctccctacatcattgcagtgttgcctcgatatgttgagatccgaacatttgaaccgaggcttctggtccaaagcattgaattgcaaaggccccgtttcattacctcaggaggatcaaacattatctatgtggccagcaatcattttgtttggagactcatccctgtccccatggcaacccaaatccaacaacttctccaggacaagcagtttgaattggctctgcagctcgcagaaatgaaagatgattctgacagtgaaaagcagcaacaaattcatcacatcaagaacttgtatgccttcaacctcttctgccagaagcgttttgatgagtccatgcaggtctttgctaaacttggcacagatcccacccatgtgatgggcctgtaccctgacctgctgcccacagactacagaaagcagttgcagtatcccaacccattgcctgtgctctccggggctgaattggagaaggctcacttagctctgattgactacctgacacagaaacgaagtcaattggtaaagaagctgaatgactctgatcaccagtcaagcacctcaccgctcatggaaggcactcccaccatcaaatccaagaagaagctgctacaaatcatcgacaccaccctgctcaagtgctatctccatacaaatgtggccctggtggcccccttgctacgcctggagaacaatcactgccacatcgaggagagcgagcacgtgctaaagaaggctcacaagtacagtgagcttatcatcctgtatgagaagaaggggctccacgagaaagctctgcaggtgctcgtggaccagtccaagaaagccaactcccctctgaaaggccacgagaggacagtgcagtatctgcagcatctgggcacagaaaacctgcatttgattttctcctactcagtgtgggtgctgagagacttcccagaagatggcctgaagatatttactgaagatctcccggaagtggagtctctgccacgtgatcgagtcctcggcttcttaatagagaattttaagggtctggctattccttatctggaacacatcatccatgtttgggaggagacaggctctcggttccacaactgcctgatccagctatactgtgagaaggtgcaaggtctgatgaaggagtatctcctgtccttccctgcaggcaaaaccccagtcccagctggagaggaagagggtgagctgggagaataccggcaaaagctcctcatgttcttggagatttccagctactatgatccaggccggctcatctgtgattttccctttgatggcctcttagaagaacgagctctcctgttggggcgcatggggaaacatgaacaagctcttttcatttatgtccacatcttgaaggatacaaggatggctgaggagtactgccacaaacactatgaccgaaacaaagatggcaacaaagatgtgtatctgtccctgcttcggatgtacctgtcgccccccagcattcactgcctggggccaatcaagctggaactactggagccaaaagccaacctccaggccgctctgcaggtcctcgagctacaccacagcaaactggacaccaccaaggccctcaaccttctgccagcaaacactcagatcaatgacatacgcatcttcctggaaaaggtcttggaagaaaatgcacaaaagaaacggttcaatcaagtgctcaagaaccttctccatgcagaattcctgagggtccaggaagagcggattttacaccagcaggtgaagtgcatcatcacagaggagaaggtgtgcatggtgtgtaagaagaagattgggaacagtgcatttgcaagataccccaatggagtggtcgtccattacttctgttccaaagaggtaaacccagctgacacttgagcccagcatcctggggatccagcggatggacagcttggctctcccagagaggtgaaggagcacctggccttaggaatcctggctgccaccaccacaaggctccccatttggacattactggctatcttgtgccctggaacaactctgaattaattagactcatggtctggcattgccagctttttaatgggaaaagagattagttataccttaaaaaaaaaaaaaaaaaaaaaaaaaaaaaaaaaaaaaaaaaaaaaaaaaaaaaaaaaaaaaaaaaaaaaagggggggggcccccaaaaaatccccccggggggcggccgccattgttgtcgcgcgcatccccccgcgtttttttggttgcaaccagggggggccccatatgtgggggggcggtttttaattgcagccgagggcggcggggcccgcgtgttttaacacgctggtggagggtggtggaaccgcccgctcgcgctggggacatcttgtgcggagaggagccccttccctgggggggggggcgcaccctgtcgtgcggcgcgctcttga

SEQ ID NO: 313251 - DNA, 655 bp, Homo sapiens
agtcggtaccgcacgagttcggagttcactgtaccggccgtgcgtcttagacatgtaaactatggctccatgctgtgtgacagatcaacgtgctgatggtaagtagactaggcttccccaggcatgccgtccgtgggggcctgaagagacagtgagtgccattggccccattcgcagatgtgggagactctgctcaggcctgtgaggctgggcagcccttcaccagagttcggaggagcagtgtgtggcgccacgtcccgactggccatacccacacagaagcagtgctgcccggggcctcatctgggccagcttggactctgcttcctccaggagcagcagggaagctctgggccacctccctggatagcaggaacttgacctgccatgtgtgccctgccttcctggccagctgtgcttgttatcttccattctcacaaactgtctttgaagcaatagaataaagaatgtgtgttttctttcctggtatacatacatgatcccatgctcccaagctccattcttccttccctcaactctctgccctccacagagctatggagaaggctggagatgaaagctttgtagtgaggactgataaagatctcatcactgctccttataataaacctaataaagcaagaaaccaaaaaaa

SEQ ID NO: 313252 - DNA, 806 bp, Homo sapiens
taaactgttggtgctgggcacatcacccaccctcaccaccaccaaagacactggtgcagtgagacttcgagtctgcaaaaaccccggggaggacaggaggcagggccactctccctgtgtgtcatcagcctgcagtgcctgaaactccagcctgtgcacctctggcaggatgccccacactgctccacaggtttggcggtgagttataaactatggctccatgctgtgtgacagatcaacgtgctgatggtaagtagactaggcttccccaggcatgccgtccgtgggggcctgaagagacagtgagtgccattggccccattcgcagatgtgggagactctgctcaggcctgtgaggctgggcagcccttcaccagagttcggaggagcagtgtgtggcgccacgtcccgactggccatacccacacagaagcagtgctgcccggggcctcatctgggccagcttggactctgcttcctccaggagcagcagggaagctctgggccacctccctggatagcaggaacttgacctgccatgtgtgccctgccttcctggccagctgtgcttgttatcttccattctcacaaactgtctttgaagcaatagaataaagaatgtgtgttttctttcctggtatacatacatgatcccatgctcccaagctccattcttccttccctcaactctctgccctccacagagctatggagaaggctggagatgaaagctttgtagtgaggactgataaagatctcatcactgctccttataataaacctaataaagcaagaaaccaaaaaaa

SEQ ID NO: 313253 - DNA, 1752 bp, Homo sapiens
ctaactagcaggaagtccggggttgacgatggctgtgttgttgaagggcctgtagccggggggttcctggccggatcccggtctacccttagcccagactcgttccggaccccagcccggcccggaacactctgggcgagacggcggtggcaactctccccttgccgccatgcacgacgctttcgagccagtgccgatcctagaaaagctgcctctgcaaatcgactgtctggctgcctgggaggaatggcttcttgtgggaaccaaacaaggacatcttcttctctataggattcggaaggacgttggttgcaacagatttgaagtgacactagagaaatccaataagaacttctccaaaaagattcagcagatccatgtggtttcccagtttaagattctggtcagcttgttagaaaataacatttatgtccatgacctattgacatttcaacaaatcactacggtttcaaaggcaaagggagcatcactgtttacttgtgacctccagcacacagagaccggtgaggaggtgttacggatgtgtgtggcagtaaaaaagaagctgcagctctatttctggaaggacagggaatttcatgaattgcagggggactttagtgtgccagatgtgcccaagtccatggcgtggtgtgaaaattctatctgtgtgggtttcaagagagactactacctaataagggtggatggaaaggggtccatcaaagagctctttccaacaggaaaacagctggagcccttagttgcacctctggcagatggaaaagtggctgtgggccaggatgatctcaccgtggtactcaatgaggaagggatctgcacacagaaatgtgccctgaactggacggacataccagtggccatggagcaccagcctccctacatcattgcagtgttgcctcgatatgttgagatccgaacatttgaaccgaggcttctggtccaaagcattgaattgcaaaggccccgtttcattacctcaggaggatcaaacattatctatgtggccagcaatcattttgtttggagactcatccctgtccccatggcaacccaaatccaacaacttctccaggacaagcagtttgaattggctctgcagctcgcagaaatgaaagatgattctgacagtgaaaagcagcaacaaattcatcacatcaagaacttgtatgccttcaacctcttctgccagaagcgttttgatgagtccatgcaggtctttgctaaacttggcacagatcccacccatgtgatgggcctgtaccctgacctgctgcccacagactacagaaagcagttgcagtatcccaacccattgcctgtgctctccggggctgaattggagaaggctcacttagctctgattgactacctgacacagaaacgaagtcaattggtaaagaagctgaatgactctgatcaccagtcaagcacctccctggatagcaggaacttgacctgccatgtgtgccctgccttcctggccagctgtgcttgttatcttccattctcacaaactgtctttgaagcaatagaataaagaatgtgtgttttctttcctggtatacatacatgatcccatgctcccaagctccattcttccttccctcaactctctgccctccacagagctatggagaaggctggagatgaaagctttgtagtgaggactgataaagatctcatcactgctccttataataaacctaataaagcaagaaaccaaaaaaa

SEQ ID NO: 313254 - DNA, 549 bp, Homo sapiens
agtaatcccagcactttgggaggctaaggcaggaggattgcttgagtccaggagtttgagaccagcctgggcaacacagggagacctcatctccacaaaaaataaacaaaattagccaggtgtggtggtgcatgcctgtagtcctagctactcaggaggctgaggtaggaggatcacttgactgcccggggcctcatctgggccagcttggactctgcttcctccaggagcagcagggaagctctgggccacctccctggatagcaggaacttgacctgccatgtgtgccctgccttcctggccagctgtgcttgttatcttccattctcacaaactgtctttgaagcaatagaataaagaatgtgtgttttctttcctggtatacatacatgatcccatgctcccaagctccattcttccttccctcaactctctgccctccacagagctatggagaaggctggagatgaaagctttgtagtgaggactgataaagatctcatcactgctccttataataaacctaataaagcaagaaaccaaaaaaa

SEQ ID NO: 313255 - DNA, 230 bp, Homo sapiens
ctccttgaagaaaaacccaagcaataagaatcctattgtcttccctttatattgcctcgtgtccactcctctgacagcatagcccccaccttgtgcttgcgtgatggcggcagtggttcctcatattccttttcctcctaggcctcttagaagaacgagctctcctgttggggcgcatggggaaacatgaacaagctcttttcatttatgtccacatcttgaaggataca

SEQ ID NO: 313256 - DNA, 387 bp, Homo sapiens
acaattacatgagtcgctatgagagtttggaggattatgggacaaaattagtaaaatggagtttagtaattgagaagatggctcctcacgttactgggtcgcattgtgaaacttcctggtggctttagacgagctgtctcttagtcatctttgcagcccgattaggggataatctggatgggacctgttgggccttaaaaatgtgagggaggctgggagaccaggtcacagcctggagaataccagtgacaaagacctacatcttgcctcaggaacacatcatccatgtttgggaggagacaggctctcggttccacaactgcctgatccagctatactgtgagaaggtgcaaggtctgatgaaggagtatctcctgtccttccctg

SEQ ID NO: 313257 - DNA, 386 bp, Homo sapiens
ggctgtctgctttctcttgcttgtgctacattcctggcctttcagcctagagcaggcctgggccagggaagggtggggctccccaggaagcagtttccactgaactcctgctctttctgcagacaaatgtggccctggtggcccccttgctacgcctggagaacaatcactgccacatcgaggagagcgagcacgtgctaaagaaggctcacaagtacagtgagcttatcatcctgtatgagaagaaggggctccacgagaaaggtgtgggagtggttccttggatctgggaggggctcttgtacatggcaggggaaacccactgagatatggaaatctcccgtggggaaaaggctcatgaccttgttcttgggcttggtggccag

SEQ ID NO: 313258 - DNA, 576 bp, Homo sapiens
tctgtagctcctagcatcttctctaacatcaagaacatactgaacaatatttgttgagtgagtgaactcttacatattctgctccgttattaggaaatgaaagatgattctgacagtgaaaagcagcaacaaattcatcacatcaagaacttgtatgccttcaacctcttctgccagaagcgttttgatgagtccatgcaggtctttgctaaacttggcacaggtaacaagtggtgaggcctttatataagggactaatggaggaggggagcctgaaaagtatggggagaaatgataacagacttctgagaatggagaaggtttaggctcagctaaattgatcctcatacctagcaagatcctgtggggtgaccacagtggttacatatctatactcctaatcctatgaatctggtcttctcaataaatgtggactcccaattttccagtatgatatgcccttgccattagagaaaggtagcagaaagtcattcagttcaacaaatgggtatttgatcagctagtgtttattgaatgctgttctgaaccaaagtccttggattaaactgcagatca

SEQ ID NO: 313259 - DNA, 612 bp, Homo sapiens
ctaactagcaggaagtccggggttgacgatggctgtgttgttgaagggcctgtagccggggggttcctggccggatcccggtctacccttagcccagactcgttccggaccccagcccggcccggaacactctgggcgagacggcggtggcaactctccccttgccgccatgcacgacgctttcgagccagtgccgatcctagaaaagctgcctctgcaaatcgactgtctggctgcctgggaggaatggcttcttgtgggaaccaaacaaggacatcttcttctctataggattcggaaggacgttggttgcaacagatttgaagtgacactagagaaatccaataagaacttctccaaaaagattcagcaggtaagcagtgatggcagtccttacaagaatatttgacttacatgagaccctgtcagactagaactttggtaatgttatttattaactctgaatcctcttctctttgaccttctatttatgcaggagtgtctgctcatatatcatgtgcctgagatcctctctcacaagcagaaatgataatcacagaaattatagtgcccagaaaaatcagtgagatccctgtaactggataggctccg

SEQ ID NO: 313260 - DNA, 4883 bp, Homo sapiens
ctaactagcaggaagtccggggttgacgatggctgtgttgttgaagggcctgtagccggggggttcctggccggatcccggtctacccttagcccagactcgttccggaccccagcccggcccggaacactctgggcgagacggcggtggcaactctccccttgccgccatgcacgacgctttcgagccagtgccgatcctagaaaagctgcctctgcaaatcgactgtctggctgcctgggaggaatggcttcttgtgggaaccaaacaaggacatcttcttctctataggattcggaaggacgttgtgccagcagatgtagcatcacctgaaagcggcagttgcaacagatttgaagtgacactagagaaatccaataagaacttctccaaaaagattcagcagatccatgtggtttcccagtttaagattctggtcagcttgttagaaaataacatttatgtccatgacctattgacatttcaacaaatcactacggtttcaaaggcaaagggagcatcactgtttacttgtgacctccagcacacagagaccggtgaggaggtgttacggatgtgtgtggcagtaaaaaagaagctgcagctctatttctggaaggacagggaatttcatgaattgcagggggactttagtgtgccagatgtgcccaagtccatggcgtggtgtgaaaattctatctgtgtgggtttcaagagagactactacctaataagggtggatggaaaggggtccatcaaagagctctttccaacaggaaaacagctggagcccttagttgcacctctggcagatggaaaagtggctgtgggccaggatgatctcaccgtggtactcaatgaggaagggatctgcacacagaaatgtgccctgaactggacggacataccagtggccatggagcaccagcctccctacatcattgcagtgttgcctcgatatgttgagatccgaacatttgaaccgaggcttctggtccaaagcattgaattgcaaaggccccgtttcattacctcaggaggatcaaacattatctatgtggccagcaatcattttgtttggagactcatccctgtccccatggcaacccaaatccaacaacttctccaggacaagcagtttgaattggctctgcagctcgcagaaatgaaagatgattctgacagtgaaaagcagcaacaaattcatcacatcaagaacttgtatgccttcaacctcttctgccagaagcgttttgatgagtccatgcaggtctttgctaaacttggcacagatcccacccatgtgatgggcctgtaccctgacctgctgcccacagactacagaaagcagttgcagtatcccaacccattgcctgtgctctccggggctgaattggagaaggctcacttagctctgattgactacctgacacagaaacgaagtcaattggtaaagaagctgaatgactctgatcaccagtcaagcacctcaccgctcatggaaggcactcccaccatcaaatccaagaagaagctgctacaaatcatcgacaccaccctgctcaagtgctatctccatacaaatgtggccctggtggcccccttgctacgcctggagaacaatcactgccacatcgaggagagcgagcacgtgctaaagaaggctcacaagtacagtgagcttatcatcctgtatgagaagaaggggctccacgagaaagctctgcaggtgctcgtggaccagtccaagaaagccaactcccctctgaaaggccacgagaggacagtgcagtatctgcagcatctgggcacagaaaacctgcatttgattttctcctactcagtgtgggtgctgagagacttcccagaagatggcctgaagatatttactgaagatctcccggaagtggagtctctgccacgtgatcgagtcctcggcttcttaatagagaattttaagggtctggctattccttatctggaacacatcatccatgtttgggaggagacaggctctcggttccacaactgcctgatccagctatactgtgagaaggtgcaaggtctgatgaaggagtatctcctgtccttccctgcaggcaaaaccccagtcccagctggagaggaagagggtgagctgggagaataccggcaaaagctcctcatgttcttggagatttccagctactatgatccaggccggctcatctgtgattttccctttgatggcctcttagaagaacgagctctcctgttggggcgcatggggaaacatgaacaagctcttttcatttatgtccacatcttgaaggatacaaggatggctgaggagtactgccacaaacactatgaccgaaacaaagatggcaacaaagatgtgtatctgtccctgcttcggatgtacctgtcgccccccagcattcactgcctggggccaatcaagctggaactactggagccaaaagccaacctccaggccgctctgcaggtcctcgagctacaccacagcaaactggacaccaccaaggccctcaaccttctgccagcaaacactcagatcaatgacatacgcatcttcctggaaaaggtcttggaagaaaatgcacaaaagaaacggttcaatcaagtgctcaagaaccttctccatgcagaattcctgagggtccaggaagagcggattttacaccagcaggtgaagtgcatcatcacagaggagaaggtgtgcatggtgtgtaagaagaagattgggaacagtgcatttgcaagataccccaatggagtggtcgtccattacttctgttccaaagaggtaaacccagctgacacttgagcccagcatcctggggatccagcggatggacagcttggctctcccagagaggtgaaggagcacctggccttaggaatcctggctgccaccaccacaaggctccccatttggacattactggctatcttgtgccctggaacaactctgaattaattagactcatggtctggcattgccagctttttaatgggaaaagagattagttataccttataccattatgttgtgggcaattccagagaattcagtacctgcttggtcaggaggatgtgcaccatcttgcctttgcacaccagtcacctgaacaaggaaacttgtcacaagtgtttgtaaccatggggttgttcatcaagggcttttctattaagtacatgacttcacaaggaccgctcagcatggctcactggagagttccatgagagaacagcactcaagcttctggccgcatggacccgatggctcgcattctgtgtagtgttttacgtctccatggtaactgtgccctgcacccctcggtagccgccctgttagttttcagtctccttttctttctcaccatttatcacttccctcactgccctacccaggctttctctcccacttccctgactctgggaataactaatatttaagcaaggtaagatgagaagcaaggggtctcagttctaggaatacagtgctagttgattgtcaggtatgttgtaaatagaccctctttggccatacactccatgcctagatgcctcggagagcatcattctctgcctaggcaaggccctgcatcccttgcctcaggccgggctgagtgtgactgcagctcctgaggatgggcctgccctgtctggggtatgcgtgatccctagatacatgttcccacagaggtgcctgctccgtcttcgctcaccagacactcaggcaggctggcttagtctttgtgcgtggcgattttgtgctctgggccctttctctttttccagccagtttccattcacttgccttacagcctgccctggccgtcactccccagctttgttcagcaatggtgtggttggagagttgtgctgggatagcgcaggaaggtgggtcccggcaacacgcaggggatgagtggacctggaactgacaatggcgtgctgccaagtgttcctgagaggtgtttaggcacagcagaggggacgcggggggcaagaacagcaggacgctggtttaaaaataactcaccgccaaacctgtggagcagtgtggggcatcctgccagaggtgcacaggctggagtttcaggcactgcaggctgatgacacacagggagagtggccctgcctcctgtcctccccggggtttttgcagactcgaagtctcactgcaccagtgtctttgatggtggtgagggtgggtgatggtgcccagcaccaacagttttagtggcctgtccttgacctgccgtggtcctttgtaaactatggctccatgctgtgtgacagatcaacgtgctgatggtaagtagactaggcttccccaggcatgccgtccgtgggggcctgaagagacagtgagtgccattggccccattcgcagatgtgggagactctgctcaggcctgtgaggctgggcagcccttcaccagagttcggaggagcagtgtgtggcgccacgtcccgactggccatacccacacagaagcagtgctgcccggggcctcatctgggccagcttggactctgcttcctccaggagcagcagggaagctctgggccacctccctggatagcaggaacttgacctgccatgtgtgccctgccttcctggccagctgtgcttgttatcttccattctcacaaactgtctttgaagcaatagaataaagaatgtgtgttttctttcctggtatacatacatgatcccatgctcccaagctccattcttccttccctcaactctctgccctccacagagctatggagaaggctggagatgaaagctttgtagtgaggactgataaagatctcatcactgctccttataataaacctaataaagcaagaaaccaaaaaaa

SEQ ID NO: 313261 - DNA, 4842 bp, Homo sapiens
ctaactagcaggaagtccggggttgacgatggctgtgttgttgaagggcctgtagccggggggttcctggccggatcccggtctacccttagcccagactcgttccggaccccagcccggcccggaacactctgggcgagacggcggtggcaactctccccttgccgccatgcacgacgctttcgagccagtgccgatcctagaaaagctgcctctgcaaatcgactgtctggctgcctgggaggaatggcttcttgtgggaaccaaacaaggacatcttcttctctataggattcggaaggacgttgtgccagcagatgtagcatcacctgaaagcggcagttgcaacagatttgaagtgacactagagaaatccaataagaacttctccaaaaagattcagcagatccatgtggtttcccagtttaagattctggtcagcttgttagaaaataacatttatgtccatgacctattgacatttcaacaaatcactacggtttcaaaggcaaagggagcatcactgtttacttgtgacctccagcacacagagaccggtgaggaggtgttacggatgtgtgtggcagtaaaaaagaagctgcagctctatttctggaaggacagggaatttcatgaattgcagggggactttagtgtgccagatgtgcccaagtccatggcgtggtgtgaaaattctatctgtgtgggtttcaagagagactactacctaataagggtggatggaaaggggtccatcaaagagctctttccaacaggaaaacagctggagcccttagttgcacctctggcagatggaaaagtggctgtgggccaggatgatctcaccgtggtactcaatgaggaagggatctgcacacagaaatgtgccctgaactggacggacataccagtggccatggagcaccagcctccctacatcattgcagtgttgcctcgatatgttgagatccgaacatttgaaccgaggcttctggtccaaagcattgaattgcaaaggccccgtttcattacctcaggaggatcaaacattatctatgtggccagcaatcattttgtttggagactcatccctgtccccatggcaacccaaatccaacaacttctccaggacaagcagtttgaattggctctgcagctcgcagaaatgaaagatgattctgacagtgaaaagcagcaacaaattcatcacatcaagaacttgtatgccttcaacctcttctgccagaagcgttttgatgagtccatgcaggtctttgctaaacttggcacagatcccacccatgtgatgggcctgtaccctgacctgctgcccacagactacagaaagcagttgcagtatcccaacccattgcctgtgctctccggggctgaattggagaaggctcacttagctctgattgactacctgacacagaaacgaagtcaattggtaaagaagctgaatgactctgatcaccagtcaagcacctcaccgctcatggaaggcactcccaccatcaaatccaagaagaagctgctacaaatcatcgacaccaccctgctcaagtgctatctccatacaaatgtggccctggtggcccccttgctacgcctggagaacaatcactgccacatcgaggagagcgagcacgtgctaaagaaggctcacaagtacagtgagcttatcatcctgtatgagaagaaggggctccacgagaaagctctgcaggtgctcgtggaccagtccaagaaagccaactcccctctgaaaggccacgagaggacagtgcagtatctgcagcatctgggcacagaaaacctgcatttgattttctcctactcagtgtgggtgctgagagacttcccagaagatggcctgaagatatttactgaagatctcccggaagtggagtctctgccacgtgatcgagtcctcggcttcttaatagagaattttaagggtctggctattccttatctggaacacatcatccatgtttgggaggagacaggctctcggttccacaactgcctgatccagctatactgtgagaaggtgcaaggtctgatgaaggagtatctcctgtccttccctgcaggcaaaaccccagtcccagctggagaggaagagggtgagctgggagaataccggcaaaagctcctcatgttcttggagatttccagctactatgatccaggccggctcatctgtgattttccctttgatggcctcttagaagaacgagctctcctgttggggcgcatggggaaacatgaacaagctcttttcatttatgtccacatcttgaaggatacaaggatggctgaggagtactgccacaaacactatgaccgaaacaaagatggcaacaaagatgtgtatctgtccctgcttcggatgtacctgtcgccccccagcattcactgcctggggccaatcaagctggaactactggagccaaaagccaacctccaggccgctctgcaggtcctcgagctacaccacagcaaactggacaccaccaaggccctcaaccttctgccagcaaacactcagatcaatgacatacgcatcttcctggaaaaggtcttggaagaaaatgcacaaaagaaacggttcaatcaagtgctcaagaaccttctccatgcagaattcctgagggtccaggaagagcggattttacaccagcaggtgaagtgcatcatcacagaggagaaggtgtgcatggtgtgtaagaagaagattgggaacagtgcatttgcaagataccccaatggagtggtcgtccattacttctgttccaaagaggtaaacccagctgacacttgagcccagcatcctggggatccagcggatggacagcttggctctcccagagaggtgaaggagcacctggccttaggaatcctggctgccaccaccacaaggctccccatttggacattactggctatcttgtgccctggaacaactctgaattaattagactcatggtctggcattgccagctttttaatgggaaaagagattagttataccttataccattatgttgtgggcaattccagagaattcagtacctgcttggtcaggaggatgtgcaccatcttgcctttgcacaccagtcacctgaacaaggaaacttgtcacaagtgtttgtaaccatggggttgttcatcaagggcttttctattaagtacatgacttcacaaggaccgctcagcatggctcactggagagttccatgagagaacagcactcaagcttctggccgcatggacccgatggctcgcattctgtgtagtgttttacgtctccatggtaactgtgccctgcacccctcggtagccgccctgttagttttcagtctccttttctttctcaccatttatcacttccctcactgccctacccaggctttctctcccacttccctgactctgggaataactaatatttaagcaaggtaagatgagaagcaaggggtctcagttctaggaatacagtgctagttgattgtcaggtatgttgtaaatagaccctctttggccatacactccatgcctagatgcctcggagagcatcattctctgcctaggcaaggccctgcatcccttgcctcaggccgggctgagtgtgactgcagctcctgaggatgggcctgccctgtctggggtatgcgtgatccctagatacatgttcccacagaggtgcctgctccgtcttcgctcaccagacactcaggcaggctggcttagtctttgtgcgtggcgattttgtgctctgggccctttctctttttccagccagtttccattcacttgccttacagcctgccctggccgtcactccccagctttgttcagcaatggtgtggttggagagttgtgctgggatagcgcaggaaggtgggtcccggcaacacgcaggggatgagtggacctggaactgacaatggcgtgctgccaagtgttcctgagaggtgtttaggcacagcagaggggacgcggggggcaagaacagcaggacgctggtttaaaaataactcaccgccaaacctgtggagcagtgtggggcatcctgccagaggtgcacaggctggagtttcaggcactgcaggctgatgacacacagggagagtggccctgcctcctgtcctccccggggtttttgcagactcgaagtctcactgcaccagtgtctttgatggtggtgagggtgggtgatggtgcccagcaccaacagttttagtggcctgtccttgacctgccgtggtcctttgtaaactatggctccatgctgtgtgacagatcaacgtgctgatggtaagtagactaggcttccccaggcatgccgtccgtgggggcctgaagagacagtgagtgccattggccccattcgcagatgtgggagactctgctcaggcctgtgaggctgggcagcccttcaccagagttcggaggagcagtgtgtggcgccacgtcccgactggccatacccacacagaagcagtgctgcccggggcctcatctgggccagcttggactctgcttcctccaggagcagcagggaagctctgggccacctccctggatagcaggaacttgacctgccatgtgtgccctgccttcctggccagctgtgcttgttatcttccattctcacaaactgtctttgaagcaatagaataaagaatgtgtgttttctttcctggtatacatacatgatcccatgctcccaagctccattcttccttccctcaactctctgccctccacagagctatggagaaggctggagatgaaagctttgtagtgaggactgataaagatctcatcact

SEQ ID NO: 313262 - DNA, 4031 bp, Homo sapiens
caagggggtcataaaacccaggagagatgtgtccctaaacaggaacgagacataccagttggccatggagcaccagcctccctacatcattgcagtgttgcctcgatatgttgagatccgaacatttgaaccgaggcttctggtccaaagcattgaattgcaaaggccccgtttcattacctcaggaggatcaaacattatctatgtggccagcaatcattttgtttggagactcatccctgtccccatggcaacccaaatccaacaacttctccaggacaagcagtttgaattggctctgcagctcgcagaaatgaaagatgattctgacagtgaaaagcagcaacaaattcatcacatcaagaacttgtatgccttcaacctcttctgccagaagcgttttgatgagtccatgcaggtctttgctaaacttggcacagatcccacccatgtgatgggcctgtaccctgacctgctgcccacagactacagaaagcagttgcagtatcccaacccattgcctgtgctctccggggctgaattggagaaggctcacttagctctgattgactacctgacacagaaacgaagtcaattggtaaagaagctgaatgactctgatcaccagtcaagcacctcaccgctcatggaaggcactcccaccatcaaatccaagaagaagctgctacaaatcatcgacaccaccctgctcaagtgctatctccatacaaatgtggccctggtggcccccttgctacgcctggagaacaatcactgccacatcgaggagagcgagcacgtgctaaagaaggctcacaagtacagtgagcttatcatcctgtatgagaagaaggggctccacgagaaagctctgcaggtgctcgtggaccagtccaagaaagccaactcccctctgaaaggccacgagaggacagtgcagtatctgcagcatctgggcacagaaaacctgcatttgattttctcctactcagtgtgggtgctgagagacttcccagaagatggcctgaagatatttactgaagatctcccggaagtggagtctctgccacgtgatcgagtcctcggcttcttaatagagaattttaagggtctggctattccttatctggaacacatcatccatgtttgggaggagacaggctctcggttccacaactgcctgatccagctatactgtgagaaggtgcaaggtctgatgaaggagtatctcctgtccttccctgcaggcaaaaccccagtcccagctggagaggaagagggtgagctgggagaataccggcaaaagctcctcatgttcttggagatttccagctactatgatccaggccggctcatctgtgattttccctttgatggcctcttagaagaacgagctctcctgttggggcgcatggggaaacatgaacaagctcttttcatttatgtccacatcttgaaggatacaaggatggctgaggagtactgccacaaacactatgaccgaaacaaagatggcaacaaagatgtgtatctgtccctgcttcggatgtacctgtcgccccccagcattcactgcctggggccaatcaagctggaactactggagccaaaagccaacctccaggccgctctgcaggtcctcgagctacaccacagcaaactggacaccaccaaggccctcaaccttctgccagcaaacactcagatcaatgacatacgcatcttcctggaaaaggtcttggaagaaaatgcacaaaagaaacggttcaatcaagtgctcaagaaccttctccatgcagaattcctgagggtccaggaagagcggattttacaccagcaggtgaagtgcatcatcacagaggagaaggtgtgcatggtgtgtaagaagaagattgggaacagtgcatttgcaagataccccaatggagtggtcgtccattacttctgttccaaagaggtaaacccagctgacacttgagcccagcatcctggggatccagcggatggacagcttggctctcccagagaggtgaaggagcacctggccttaggaatcctggctgccaccaccacaaggctccccatttggacattactggctatcttgtgccctggaacaactctgaattaattagactcatggtctggcattgccagctttttaatgggaaaagagattagttataccttataccattatgttgtgggcaattccagagaattcagtacctgcttggtcaggaggatgtgcaccatcttgcctttgcacaccagtcacctgaacaaggaaacttgtcacaagtgtttgtaaccatggggttgttcatcaagggcttttctattaagtacatgacttcacaaggaccgctcagcatggctcactggagagttccatgagagaacagcactcaagcttctggccgcatggacccgatggctcgcattctgtgtagtgttttacgtctccatggtaactgtgccctgcacccctcggtagccgccctgttagttttcagtctccttttctttctcaccatttatcacttccctcactgccctacccaggctttctctcccacttccctgactctgggaataactaatatttaagcaaggtaagatgagaagcaaggggtctcagttctaggaatacagtgctagttgattgtcaggtatgttgtaaatagaccctctttggccatacactccatgcctagatgcctcggagagcatcattctctgcctaggcaaggccctgcatcccttgcctcaggccgggctgagtgtgactgcagctcctgaggatgggcctgccctgtctggggtatgcgtgatccctagatacatgttcccacagaggtgcctgctccgtcttcgctcaccagacactcaggcaggctggcttagtctttgtgcgtggcgattttgtgctctgggccctttctctttttccagccagtttccattcacttgccttacagcctgccctggccgtcactccccagctttgttcagcaatggtgtggttggagagttgtgctgggatagcgcaggaaggtgggtcccggcaacacgcaggggatgagtggacctggaactgacaatggcgtgctgccaagtgttcctgagaggtgtttaggcacagcagaggggacgcggggggcaagaacagcaggacgctggtttaaaaataactcaccgccaaacctgtggagcagtgtggggcatcctgccagaggtgcacaggctggagtttcaggcactgcaggctgatgacacacagggagagtggccctgcctcctgtcctccccggggtttttgcagactcgaagtctcactgcaccagtgtctttgatggtggtgagggtgggtgatggtgcccagcaccaacagttttagtggcctgtccttgacctgccgtggtcctttgtaaactatggctccatgctgtgtgacagatcaacgtgctgatggtaagtagactaggcttccccaggcatgccgtccgtgggggcctgaagagacagtgagtgccattggccccattcgcagatgtgggagactctgctcaggcctgtgaggctgggcagcccttcaccagagttcggaggagcagtgtgtggcgccacgtcccgactggccatacccacacagaagcagtgctgcccggggcctcatctgggccagcttggactctgcttcctccaggagcagcagggaagctctgggccacctccctggatagcaggaacttgacctgccatgtgtgccctgccttcctggccagctgtgcttgttatcttccattctcacaaactgtctttgaagcaatagaataaagaatgtgtgttttctttcctggtatacatacatgatcccatgctcccaagctccattcttccttccctcaactctctgccctccacagagctatggagaaggctggagatgaaagctttgtagtgaggactgataaagatctcatcactgctccttataataaacctaataaagcaagaaaccaaaaaaa

SEQ ID NO: 313263 - DNA, 4841 bp, Homo sapiens
ctaactagcaggaagtccggggttgacgatggctgtgttgttgaagggcctgtagccggggggttcctggccggatcccggtctacccttagcccagactcgttccggaccccagcccggcccggaacactctgggcgagacggcggtggcaactctccccttgccgccatgcacgacgctttcgagccagtgccgatcctagaaaagctgcctctgcaaatcgactgtctggctgcctgggaggaatggcttcttgtgggaaccaaacaaggacatcttcttctctataggattcggaaggacgttgtgccagcagatgtagcatcacctgaaagcggcagttgcaacagatttgaagtgacactagagaaatccaataagaacttctccaaaaagattcagcagatccatgtggtttcccagtttaagattctggtcagcttgttagaaaataacatttatgtccatgacctattgacatttcaacaaatcactacggtttcaaaggcaaagggagcatcactgtttacttgtgacctccagcacacagagaccggtgaggaggtgttacggatgtgtgtggcagtaaaaaagaagctgcagctctatttctggaaggacagggaatttcatgaattgcagggggactttagtgtgccagatgtgcccaagtccatggcgtggtgtgaaaattctatctgtgtgggtttcaagagagactactacctaataagggtggatggaaaggggtccatcaaagagctctttccaacaggaaaacagctggagcccttagttgcacctctggcagatggaaaagtggctgtgggccaggatgatctcaccgtggtactcaatgaggaagggatctgcacacagaaatgtgccctgaactggacggacataccagtggccatggagcaccagcctccctacatcattgcagtgttgcctcgatatgttgagatccgaacatttgaaccgaggcttctggtccaaagcattgaattgcaaaggccccgtttcattacctcaggaggatcaaacattatctatgtggccagcaatcattttgtttggagactcatccctgtccccatggcaacccaaatccaacaacttctccaggacaagcagtttgaattggctctgcagctcgcagaaatgaaagatgattctgacagtgaaaagcagcaacaaattcatcacatcaagaacttgtatgccttcaacctcttctgccagaagcgttttgatgagtccatgcaggtctttgctaaacttggcacagatcccacccatgtgatgggcctgtaccctgacctgctgcccacagactacagaaagcagttgcagtatcccaacccattgcctgtgctctccggggctgaattggagaaggctcacttagctctgattgactacctgacacagaaacgaagtcaattggtaaagaagctgaatgactctgatcaccagtcaagcacctcaccgctcatggaaggcactcccaccatcaaatccaagaagaagctgctacaaatcatcgacaccaccctgctcaagtgctatctccatacaaatgtggccctggtggcccccttgctacgcctggagaacaatcactgccacatcgaggagagcgagcacgtgctaaagaaggctcacaagtacagtgagcttatcatcctgtatgagaagaaggggctccacgagaaagctctgcaggtgctcgtggaccagtccaagaaagccaactcccctctgaaaggccacgagaggacagtgcagtatctgcagcatctgggcacagaaaacctgcatttgattttctcctactcagtgtgggtgctgagagacttcccagaagatggcctgaagatatttactgaagatctcccggaagtggagtctctgccacgtgatcgagtcctcggcttcttaatagagaattttaagggtctggctattccttatctggaacacatcatccatgtttgggaggagacaggctctcggttccacaactgcctgatccagctatactgtgagaaggtgcaaggtctgatgaaggagtatctcctgtccttccctgcaggcaaaaccccagtcccagctggagaggaagagggtgagctgggagaataccggcaaaagctcctcatgttcttggagatttccagctactatgatccaggccggctcatctgtgattttccctttgatggcctcttagaagaacgagctctcctgttggggcgcatggggaaacatgaacaagctcttttcatttatgtccacatcttgaaggatacaaggatggctgaggagtactgccacaaacactatgaccgaaacaaagatggcaacaaagatgtgtatctgtccctgcttcggatgtacctgtcgccccccagcattcactgcctggggccaatcaagctggaactactggagccaaaagccaacctccaggccgctctgcaggtcctcgagctacaccacagcaaactggacaccaccaaggccctcaaccttctgccagcaaacactcagatcaatgacatacgcatcttcctggaaaaggtcttggaagaaaatgcacaaaagaaacggttcaatcaagtgctcaagaaccttctccatgcagaattcctgagggtccaggaagagcggattttacaccagcaggtgaagtgcatcatcacagaggagaaggtgtgcatggtgtgtaagaagaagattgggaacagtgcatttgcaagataccccaatggagtggtcgtccattacttctgttccaaagaggtaaacccagctgacacttgagcccagcatcctggggatccagcggatggacagcttggctctcccagagaggtgaaggagcacctggccttaggaatcctggctgccaccaccacaaggctccccatttggacattactggctatcttgtgccctggaacaactctgaattaattagactcatggtctggcattgccagctttttaatgggaaaagagattagttataccttataccattatgttgtgggcaattccagagaattcagtacctgcttggtcaggaggatgtgcaccatcttgcctttgcacaccagtcacctgaacaaggaaacttgtcacaagtgtttgtaaccatggggttgttcatcaagggcttttctattaagtacatgacttcacaaggaccgctcagcatggctcactggagagttccatgagagaacagcactcaagcttctggccgcatggacccgatggctcgcattctgtgtagtgttttacgtctccatggtaactgtgccctgcacccctcggtagccgccctgttagttttcagtctccttttctttctcaccatttatcacttccctcactgccctacccaggctttctctcccacttccctgactctgggaataactaatatttaagcaaggtaagatgagaagcaaggggtctcagttctaggaatacagtgctagttgattgtcaggtatgttgtaaatagaccctctttggccatacactccatgcctagatgcctcggagagcatcattctctgcctaggcaaggccctgcatcccttgcctcaggccgggctgagtgtgactgcagctcctgaggatgggcctgccctgtctggggtatgcgtgatccctagatacatgttcccacagaggtgcctgctccgtcttcgctcaccagacactcaggcaggctggcttagtctttgtgcgtggcgattttgtgctctgggccctttctctttttccagccagtttccattcacttgccttacagcctgccctggccgtcactccccagctttgttcagcaatggtgtggttggagagttgtgctgggatagcgcaggaaggtgggtcccggcaacacgcaggggatgagtggacctggaactgacaatggcgtgctgccaagtgttcctgagaggtgtttaggcacagcagaggggacgcggggggcaagaacagcaggacgctggtttaaaaataactcaccgccaaacctgtggagcagtgtggggcatcctgccagaggtgcacaggctggagtttcaggcactgcaggctgatgacacacagggagagtggccctgcctcctgtcctccccggggtttttgcagactcgaagtctcactgcaccagtgtctttgatggtggtgagggtgggtgatggtgcccagcaccaacagttttagtggcctgtccttgacctgccgtggtcctttgtaaactatggctccatgctgtgtgacagatcaacgtgctgatggtaagtagactaggcttccccaggcatgccgtccgtgggggcctgaagagacagtgagtgccattggccccattcgcagatgtgggagactctgctcaggcctgtgaggctgggcagcccttcaccagagttcggaggagcagtgtgtggcgccacgtcccgactggccatacccacacagaagcagtgctgcccggggcctcatctgggccagcttggactctgcttcctccaggagcagcagggaagctctgggccacctccctggatagcaggaacttgacctgccatgtgtgccctgccttcctggccagctgtgcttgttatcttccattctcacaaactgtctttgaagcaatagaataaagaatgtgtgttttctttcctggtatacatacatgatcccatgctcccaagctccattcttccttccctcaactctctgccctccacagagctatggggaggcggggagcaacttggaggggagggaaagtcatagggctttataactg

SEQ ID NO: 313264 - DNA, 4450 bp, Homo sapiens
  misc_feature (4447)..(4447): n is a, c, g, or t
ctaactagcaggaagtccggggttgacgatggctgtgttgttgaagggcctgtagccggggggttcctggccggatcccggtctacccttagcccagactcgttccggaccccagcccggcccggaacactctgggcgagacggcggtggcaactctccccttgccgccatgcacgacgctttcgagccagtgccgatcctagaaaagctgcctctgcaaatcgactgtctggctgcctgggaggaatggcttcttgtgggaaccaaacaaggacatcttcttctctataggattcggaaggacgttgtgccagcagatgtagcatcacctgaaagcggcagttgcaacagatttgaagtgacactagagaaatccaataagaacttctccaaaaagattcagcagatccatgtggtttcccagtttaagattctggtcagcttgttagaaaataacatttatgtccatgacctattgacatttcaacaaatcactacggtttcaaaggcaaagggagcatcactgtttacttgtgacctccagcacacagagaccggtgaggaggtgttacggatgtgtgtggcagtaaaaaagaagctgcagctctatttctggaaggacagggaatttcatgaattgcagggggactttagtgtgccagatgtgcccaagtccatggcgtggtgtgaaaattctatctgtgtgggtttcaagagagactactacctaataagggtggatggaaaggggtccatcaaagagctctttccaacaggaaaacagctggagcccttagttgcacctctggcagatggaaaagtggctgtgggccaggatgatctcaccgtggtactcaatgaggaagggatctgcacacagaaatgtgccctgaactggacggacataccagtggccatggagcaccagcctccctacatcattgcagtgttgcctcgatatgttgagatccgaacatttgaaccgaggcttctggtccaaagcattgaattgcaaaggccccgtttcattacctcaggaggatcaaacattatctatgtggccagcaatcattttgtttggagactcatccctgtccccatggcaacccaaatccaacaacttctccaggacaagcagtttgaattggctctgcagctcgcagaaatgaaagatgattctgacagtgaaaagcagcaacaaattcatcacatcaagaacttgtatgccttcaacctcttctgccagaagcgttttgatgagtccatgcaggtctttgctaaacttggcacagatcccacccatgtgatgggcctgtaccctgacctgctgcccacagactacagaaagcagttgcagtatcccaacccattgcctgtgctctccggggctgaattggagaaggctcacttagctctgattgactacctgacacagaaacgaagtcaattggtaaagaagctgaatgactctgatcaccagtcaagcacctcaccgctcatggaaggcactcccaccatcaaatccaagaagaagctgctacaaatcatcgacaccaccctgctcaagtgctatctccatacaaatgtggccctggtggcccccttgctacgcctggagaacaatcactgccacatcgaggagagcgagcacgtgctaaagaaggctcacaagtacagtgagcttatcatcctgtatgagaagaaggggctccacgagaaagctctgcaggtgctcgtggaccagtccaagaaagccaactcccctctgaaaggccacgagaggacagtgcagtatctgcagcatctgggcacagaaaacctgcatttgattttctcctactcagtgtgggtgctgagagacttcccagaagatggcctgaagatatttactgaagatctcccggaagtggagtctctgccacgtgatcgagtcctcggcttcttaatagagaattttaagggtctggctattccttatctggaacacatcatccatgtttgggaggagacaggctctcggttccacaactgcctgatccagctatactgtgagaaggtgcaaggtctgatgaaggagtatctcctgtccttccctgcaggcaaaaccccagtcccagctggagaggaagagggtgagctgggagaataccggcaaaagctcctcatgttcttggagatttccagctactatgatccaggccggctcatctgtgattttccctttgatggcctcttagaagaacgagctctcctgttggggcgcatggggaaacatgaacaagctcttttcatttatgtccacatcttgaaggatacaaggatggctgaggagtactgccacaaacactatgaccgaaacaaagatggcaacaaagatgtgtatctgtccctgcttcggatgtacctgtcgccccccagcattcactgcctggggccaatcaagctggaactactggagccaaaagccaacctccaggccgctctgcaggtcctcgagctacaccacagcaaactggacaccaccaaggccctcaaccttctgccagcaaacactcagatcaatgacatacgcatcttcctggaaaaggtcttggaagaaaatgcacaaaagaaacggttcaatcaagtgctcaagaaccttctccatgcagaattcctgagggtccaggaagagcggattttacaccagcaggtgaagtgcatcatcacagaggagaaggtgtgcatggtgtgtaagaagaagattgggaacagtgcatttgcaagataccccaatggagtggtcgtccattacttctgttccaaagaggtaaacccagctgacacttgagcccagcatcctggggatccagcggatggacagcttggctctcccagagaggtgaaggagcacctggccttaggaatcctggctgccaccaccacaaggctccccatttggacattactggctatcttgtgccctggaacaactctgaattaattagactcatggtctggcattgccagctttttaatgggaaaagagattagttataccttataccattatgttgtgggcaattccagagaattcagtacctgcttggtcaggaggatgtgcaccatcttgcctttgcacaccagtcacctgaacaaggaaacttgtcacaagtgtttgtaaccatggggttgttcatcaagggcttttctattaagtacatgacttcacaaggaccgctcagcatggctcactggagagttccatgagagaacagcactcaagcttctggccgcatggacccgatggctcgcattctgtgtagtgttttacgtctccatggtaactgtgccctgcacccctcggtagccgccctgttagttttcagtctccttttctttctcaccatttatcacttccctcactgccctacccaggctttctctcccacttccctgactctgggaataactaatatttaagcaaggtaagatgagaagcaaggggtctcagttctaggaatacagtgctagttgattgtcaggtatgttgtaaatagaccctctttggccatacactccatgcctagatgcctcggagagcatcattctctgcctaggcaaggccctgcatcccttgcctcaggccgggctgagtgtgactgcagctcctgaggatgggcctgccctgtctggggtatgcgtgatccctagatacatgttcccacagaggtgcctgctccgtcttcgctcaccagacactcaggcaggctggcttagtctttgtgcgtggcgattttgtgctctgggccctttctctttttccagccagtttccattcacttgccttacagcctgccctggccgtcactccccagctttgttcagcaatggtgtggttggagagttgtgctgggatagcgcaggaaggtgggtcccggcaacacgcaggggatgagtggacctggaactgacaatggcgtgctgccaagtgttcctgagaggtgtttaggcacagcagaggggacgcggggggcaagaacagcaggacgctggtttaaaaataactcaccgccaaacctgtggagcagtgtggggcatcctgccagaggtgcacaggctggagtttcaggcactgcaggctgatgacacacagggagagtggccctgcctcctgtcctccccggggtttttgcagactcgaagtctcactgcaccagtgtctttgatggtggtgagggtgggtgatggtgcccagcaccaacagttttagtggcctgtccttgacctgccgtggtcctttgtaaactatggctccatgctgtgtgacagatcaacgtgctgatggtaagtagactaggcttccccaggcatgccgtccgtgggggcctgaagagacagtgagtgcacacactgcactccgaatctggtgaagggctgccagctccaggctgagcagaggggtccnaac

SEQ ID NO: 313265 - DNA, 1050 bp, Homo sapiens
gtctggggaaatgtgccagcagaagcggagcaactatcctgcttctgctcgggcccctcatgagacgcggcagaggccatcagccggcaacacgcaggggatgagtggacctggaactgacaatggcgtgctgccaagtgttcctgagaggtgtttaggcacagcagaggggacgcggggggcaagaacagcaggacgctggtttaaaaataactcaccgccaaacctgtggagcagtgtggggcatcctgccagaggtgcacaggctggagtttcaggcactgcaggctgatgacacacagggagagtggccctgcctcctgtcctccccggggtttttgcagactcgaagtctcactgcaccagtgtctttgatggtggtgagggtgggtgatggtgcccagcaccaacagttttagtggcctgtccttgacctgccgtggtcctttgtaaactatggctccatgctgtgtgacagatcaacgtgctgatggtaagtagactaggcttccccaggcatgccgtccgtgggggcctgaagagacagtgagtgccattggccccattcgcagatgtgggagactctgctcaggcctgtgaggctgggcagcccttcaccagagttcggaggagcagtgtgtggcgccacgtcccgactggccatacccacacagaagcagtgctgcccggggcctcatctgggccagcttggactctgcttcctccaggagcagcagggaagctctgggccacctccctggatagcaggaacttgacctgccatgtgtgccctgccttcctggccagctgtgcttgttatcttccattctcacaaactgtctttgaagcaatagaataaagaatgtgtgttttctttcctggtatacatacatgatcccatgctcccaagctccattcttccttccctcaactctctgccctccacagagctatggagaaggctggagatgaaagctttgtagtgaggactgataaagatctcatcactgctccttataataaacctaataaagcaagaaaccaaaaaaa

SEQ ID NO: 313266 - DNA, 2674 bp, Homo sapiens
ctaactagcaggaagtccggggttgacgatggctgtgttgttgaagggcctgtagccggggggttcctggccggatcccggtctacccttagcccagactcgttccggaccccagcccggcccggaacactctgggcgagacggcggtggcaactctccccttgccgccatgcacgacgctttcgagccagtgccgatcctagaaaagctgcctctgcaaatcgactgtctggctgcctgggaggaatggcttcttgtgggaaccaaacaaggacatcttcttctctataggattcggaaggacgttggttgcaacagatttgaagtgacactagagaaatccaataagaacttctccaaaaagattcagcagatccatgtggtttcccagtttaagattctggtcagcttgttagaaaataacatttatgtccatgacctattgacatttcaacaaatcactacggtttcaaaggcaaagggagcatcactgtttacttgtgacctccagcacacagagaccggtgaggaggtgttacggatgtgtgtggcagtaaaaaagaagctgcagctctatttctggaaggacagggaatttcatgaattgcagggggactttagtgtgccagatgtgcccaagtccatggcgtggtgtgaaaattctatctgtgtgggtttcaagagagactactacctaataagggtggatggaaaggggtccatcaaagagctctttccaacaggaaaacagctggagcccttagttgcacctctggcagatggaaaagtggctgtgggccaggatgatctcaccgtggtactcaatgaggaagggatctgcacacagaaatgtgccctgaactggacggacataccagtggccatggagcaccagcctccctacatcattgcagtgttgcctcgatatgttgagatccgaacatttgaaccgaggcttctggtccaaagcattgaattgcaaaggccccgtttcattacctcaggaggatcaaacattatctatgtggccagcaatcattttgtttggagactcatccctgtccccatggcaacccaaatccaacaacttctccaggacaagcagtttgaattggctctgcagctcgcagaaatgaaagatgattctgacagtgaaaagcagcaacaaattcatcacatcaagaacttgtatgccttcaacctcttctgccagaagcgttttgatgagtccatgcaggtctttgctaaacttggcacagatcccacccatgtgatgggcctgtaccctgacctgctgcccacagactacagaaagcagttgcagtatcccaacccattgcctgtgctctccggggctgaattggagaaggctcacttagctctgattgactacctgacacagaaacgaagtcaattggtaaagaagctgaatgactctgatcaccagtcaagcacctcaccgctcatggaaggcactcccaccatcaaatccaagaagaagctgctacaaatcatcgacaccaccctgctcaagtgctatctccatacaaatgtggccctggtggcccccttgctacgcctggagaacaatcactgccacatcgaggagagcgagcacgtgctaaagaaggctcacaagtacagtgagcttatcatcctgtatgagaagaaggggctccacgagaaagctctgcaggtgctcgtggaccagtccaagaaagccaactcccctctgaaaggccacgagaggacagtgcagtatctgcagcatctgggcacagaaaacctgcatttgattttctcctactcagtgtgggtgctgagagacttcccagaagatggcctgaagatatttactgaagatctcccggaagtggagtctctgccacgtgatcgagtcctcggcttcttaatagagaattttaagggtctggctattccttatctggaacacatcatccatgtttgggaggagacaggctctcggttccacaactgcctgatccagctatactgtgagaaggtgcaaggtctgatgaaggagtatctcctgtccttccctgcaggcaaaaccccagtcccagctggagaggaagagggtgagctgggagaataccggcaaaagctcctcatgttcttggagatttccagctactatgatccaggccggctcatctgtgattttccctttgatggcctcttagaagaacgagctctcctgttggggcgcatggggaaacatgaacaagctcttttcatttatgtccacatcttgaaggatacaaggatggctgaggagtactgccacaaacactatgaccgaaacaaagatggcaacaaagatgtgtatctgtccctgcttcggatgtacctgtcgccccccagcattcactgcctggggccaatcaagctggaactactggagccaaaagccaacctccaggccgctctgcaggtcctcgagctacaccacagcaaactggacaccaccaaggccctcaaccttctgctttagttcattccagcaggaaggaggagaagggcagggaggtagggagcttctcagcataagccagcttcagctttgataatctcacccacctaccccatttaaggagttccaggtttaagagttaaaacaggtgcacgtcacgtggctagggatctctagtcc

SEQ ID NO: 313267 - DNA, 1464 bp, Homo sapiens
ctaactagcaggaagtccggggttgacgatggctgtgttgttgaagggcctgtagccggggggttcctggccggatcccggtctacccttagcccagactcgttccggaccccagcccggcccggaacactctgggcgagacggcggtggcaactctccccttgccgccatgcacgacgctttcgagccagtgccgatcctagaaaagctgcctctgcaaatcgactgtctggctgcctgggaggaatggcttcttgtgggaaccaaacaaggacatcttcttctctataggattcggaaggacgttggttgcaacagatttgaagtgacactagagaaatccaataagaacttctccaaaaagattcagcagatccatgtggtttcccagtttaagattctggtcagcttgttagaaaataacatttatgtccatgacctattgacatttcaacaaatcactacggtttcaaaggcaaagggagcatcactgtttacttgtgacctccagcacacagagaccggtgaggaggtgttacggatgtgtgtggcagtaaaaaagaagctgcagctctatttctggaaggacagggaatttcatgaattgcagggggactttagtgtgccagatgtgcccaagtccatggcgtggtgtgaaaattctatctgtgtgggtttcaagagagactactacctaataagggtggatggaaaggggtccatcaaagagctctttccaacaggaaaacagctggagcccttagttgcacctctggcagatggaaaagtggctgtgggccaggatgatctcaccgtggtactcaatgaggaagggatctgcacacagaaatgtgccctgaactggacggacataccagtggccatggagcaccagcctccctacatcattgcagtgttgcctcgatatgttgagatccgaacatttgaaccgaggcttctggtccaaagcattgaattgcaaaggccccgtttcattacctcaggaggatcaaacattatctatgtggccagcaatcattttgtttggagactcatccctgtccccatggcaacccaaatccaacaacttctccaggacaagcagtttgaattggctctgcagctcgcagaaatgaaagatgattctgacagtgaaaagcagcaacaaattcatcacatcaagaacttgtatgccttcaacctcttctgccagaagcgttttgatgagtccatgcaggtctttgctaaacttggcacaggtaacaagtggtgaggcctttatataagggactaatggaggaggggagcctgaaaagtatggggagaaatgataacagacttctgagaatggagaaggtttaggctcagctaaattgatcctcatacctagcaagatcctgtggggtgaccacagtggttacatatctatactcctaatcctatgaatctggtcttctcaataaa

SEQ ID NO: 313268 - DNA, 2208 bp, Homo sapiens
ggcgcgctctcgccggcccgccccgaaccgccccgcgctgggaatttgcggcggcctccgccggggcagccgagctgaaccggtctcttcctcggaaaggcagggccgaggggcctgcggggcagccatggaggcgacgcggaggcggcagcacctgggagcgacgggcggcccaggcgcgcagctgggcgcctccttcctgcaggccaggcatggctctgtgagcgctgatgaggctgcccgcacggctcccttccacctcgacctctggttctacttcacactgcagaactgggttctggactttgggcgtcccattgccatgctggtattccctctcgagtggtttccactcaacaagcccagtgttggggactacttccacatggcctacaacgtcatcacgccctttctcttgctcaagctcatcgagcggtccccccgcaccctgccacgctccatcacgtacgtgagcatcatcatcttcatcatgggtgccagcatccacctggtgggtgactctgtcaaccaccgcctgctcttcagtggctaccagcaccacctgtctgtccgtgagaaccccatcatcaagaatctcaagccggagacgctgatcgactcctttgagctgctctactattatgatgagtacctgggtcactgcatgtggtacatccccttcttcctcatcctcttcatgtacttcagcggctgctttactgcctctaaagctgagagcttgattccagggcctgccctgctcctggtggcacccagtggcctgtactactggtacctggtcaccgagggccagatcttcatcctcttcatcttcaccttcttcgccatgctggccctcgtcctgcaccagaagcgcaagcgcctcttcctggacagcaacggcctcttcctcttctcctccttcgcactgaccctcttgcttgtggcgctctgggtcgcctggctgtggaatgaccctgttctcaggaagaagtacccgggtgtcatctacgtccctgagccctgggctttctacacccttcacgtcagcagtcggcactgagtccctggcaccaggctctggcgctctgctgggtgggagggtgggccatggagggcatctgaatacaggagtagggggggtgtgggtgtgtaaccagagaccgagagcatgagtggggtgtgcctcgtgtgcgtggattcgtgtgtgtgtgtgtgtcttgtatatgtgtgcgcagagtgcatcattttcagactctactatttccgtcaagtttctgtttgatttggatcatctcaggatcggattctgttttagagtgtttctgggccaggatccgggcccctgccctcctctgcacctgaccacactccctactcagggctagtctgttcttcccggacatcttctggtagccgtgcaggagagggctgggtggggcagaggccaggaggggacctggtgtgtcacctgcccaccacctggctcatccctcaggcccaccctgaccctacattacataggttacgtcagcctactgtggctgttgagcaaagcatttctcctttctgggcctcatttgcactagatgggcctgtggtcccaaagtaggtcagtaggttggggttgctgacaccccttgggtgcagctttgggacagatgagtggctctgtcctgtcactgccctctccctgcctgggggctatgtgcactccagacccctgcccaggctcaggcccatgaggtatggagacaccctggcccccaggagctggaggcaccgcccactcccctggcattccagctttgcaggtgaccctcctctacccaaagctctgtccccctgctcccactccagaagaactgcggcacgtgcttcgggcagcctagccacaggctttgagcgcctgcattcctgggggctggagggtggggtgccaaaggccctgagcaaaagccagagctcctctcatcaaagcctttacaaggtgctgggcccagaggctttgccttgacagagtggcccagggtttcaagggaggaggaacctccccctacctaggacccttcctgtggggggtctacagagtcagggacagaagggaagggacccacaggaagtcacagtggtgcccagggatgtgtcagcccccagccacggggacgcgggattcaagaatgaagtaaatacagtcacaggccccaa

SEQ ID NO: 313269 - DNA, 142 bp, Homo sapiens
gcctactctactattcgggtgcgagaagaggacagaagggaagggacccacaggaagtcacagtggtgcccagggatgtgtcagcccccagccacggggacgcgggattcaagaatgaagtaaatacagtcacaggccccaa

SEQ ID NO: 313270 - DNA, 2415 bp, Homo sapiens
ggcgcgctctcgccggcccgccccgaaccgccccgcgctgggaatttgcggcggcctccgccggggcagccgagctgaaccggtctcttcctcggaaaggcagggccgaggggcctgcggggcagccatggaggcgacgcggaggcggcagcacctgggagcgacgggcggcccaggcgcgcagctgggcgcctccttcctgcaggccaggcatggctctgtgagcgctgatgaggctgcccgcacggctcccttccacctcgacctctggttctacttcacactgcagaactgggttctggactttgggcgtcccattgccatgctggtattccctctcgagtggtttccactcaacaagcccagtgttggggactacttccacatggcctacaacgtcatcacgccctttctcttgctcaagctcatcgagcggtccccccgcaccctgccacgctccatcacgtacgtgagcatcatcatcttcatcatgggtgccagcatccacctggtgggtgactctgtcaaccaccgcctgctcttcagtggctaccagcaccacctgtctgtccgtgagaaccccatcatcaagaatctcaagccggagacgctgatcgactcctttgagctgctctactattatgatgagtacctgggtcactgcatgtggtacatccccttcttcctcatcctcttcatgtacttcagcggctgctttactgcctctaaagctgagagcttgattccagggcctgccctgctcctggtggcacccagtggcctgtactactggtacctggtcaccgagggccagatcttcatcctcttcatcttcaccttcttcgccatgctggccctcgtcctgcaccagaagcgcaagcgcctcttcctggacagcaacggcctcttcctcttctcctccttcgcactgaccctcttgcttgtggcgctctgggtcgcctggctgtggaatgaccctgttctcaggaagaagtacccgggtgtcatctacgtccctgagccctgggctttctacacccttcacgtcagcagtcggcactgagtccctggcaccaggctctggcgctctgctgggtgggagggtgggccatggagggcatctgaatacaggagtagggggggtgtgggtgtgtaaccagagaccgagagcatgagtggggtgtgcctcgtgtgcgtggattcgtgtgtgtgtgtgtgtcttgtatatgtgtgcgcagagtgcatcattttcagactctactatttccgtcaagtttctgtttgatttggatcatctcaggatcggattctgttttagagtgtttctgggccaggatccgggcccctgccctcctctgcacctgaccacactccctactcagggctagtctgttcttcccggacatcttctggtagccgtgcaggagagggctgggtggggcagaggccaggaggggacctggtgtgtcacctgcccaccacctggctcatccctcaggcccaccctgaccctacattacataggttacgtcagcctactgtggctgttgagcaaagcatttctcctttctgggcctcatttgcactagatgggcctgtggtcccaaagtaggtcagtaggttggggttgctgacaccccttgggtgcagctttgggacagatgagtggctctgtcctgtcactgccctctccctgcctgggggctatgtgcactccagacccctgcccaggctcaggcccatgaggtatggagacaccctggcccccaggagctggaggcaccgcccactcccctggcattccagctttgcaggtgaccctcctctacccaaagctctgtccccctgctcccactccagaagaactgcggcacgtgcttcgggcagcctagccacaggctttgagcgcctgcattcctgggggctggagggtggggtgccaaaggccctgagcaaaagccagagctcctctcatcaaagcctttacaaggtgctgggcccagaggctttgccttgacagagtggcccagggtttcaagggaggaggaacctccccctacctaggacccttcctgtggggggtctacagagtcagggacagaagggaagggacccacaggaagtcacagtggtgcccagggatgtgtcagcccccagccacggggacgcgggattcaagaatgaagtaaatacagtcacaggccccaaaaaaaaaagaagaaaaggaacacaaacaacgcacggcaaaccagaaaggagacacacgcgggggcaataataggggggggggagaaaaaaaaggaggaaacaggcgcgcgacggacaaagagtgtcgcgcccccgaacttggagcaacaggggggtaagcgcgggggccccaaaggggaggggaaactagagagcggcggacccgaa

SEQ ID NO: 313271 - DNA, 2019 bp, Homo sapiens
ggcgcgctctcgccggcccgccccgaaccgccccgcgctgggaatttgcggcggcctccgccggggcagccgagctgaaccggtctcttcctcggaaaggcagggccgaggggcctgcggggcagccatggaggcgacgcggaggcggcagcacctgggagcgacgggcggcccaggcgcgcagctgggcgcctccttcctgcaggccaggcatggctctgtgagcgctgatgaggctgcccgcacggctcccttccacctcgacctctggttctacttcacactgcagaactgggttctggactttgggcgtcccattgccatgctggtattccctctcgagtggtttccactcaacaagcccagtgttggggactacttccacatggcctacaacgtcatcacgccctttctcttgctcaagatcgactcctttgagctgctctactattatgatgagtacctgggtcactgcatgtggtacatccccttcttcctcatcctcttcatgtacttcagcggctgctttactgcctctaaagctgagagcttgattccagggcctgccctgctcctggtggcacccagtggcctgtactactggtacctggtcaccgagggccagatcttcatcctcttcatcttcaccttcttcgccatgctggccctcgtcctgcaccagaagcgcaagcgcctcttcctggacagcaacggcctcttcctcttctcctccttcgcactgaccctcttgcttgtggcgctctgggtcgcctggctgtggaatgaccctgttctcaggaagaagtacccgggtgtcatctacgtccctgagccctgggctttctacacccttcacgtcagcagtcggcactgagtccctggcaccaggctctggcgctctgctgggtgggagggtgggccatggagggcatctgaatacaggagtagggggggtgtgggtgtgtaaccagagaccgagagcatgagtggggtgtgcctcgtgtgcgtggattcgtgtgtgtgtgtgtgtcttgtatatgtgtgcgcagagtgcatcattttcagactctactatttccgtcaagtttctgtttgatttggatcatctcaggatcggattctgttttagagtgtttctgggccaggatccgggcccctgccctcctctgcacctgaccacactccctactcagggctagtctgttcttcccggacatcttctggtagccgtgcaggagagggctgggtggggcagaggccaggaggggacctggtgtgtcacctgcccaccacctggctcatccctcaggcccaccctgaccctacattacataggttacgtcagcctactgtggctgttgagcaaagcatttctcctttctgggcctcatttgcactagatgggcctgtggtcccaaagtaggtcagtaggttggggttgctgacaccccttgggtgcagctttgggacagatgagtggctctgtcctgtcactgccctctccctgcctgggggctatgtgcactccagacccctgcccaggctcaggcccatgaggtatggagacaccctggcccccaggagctggaggcaccgcccactcccctggcattccagctttgcaggtgaccctcctctacccaaagctctgtccccctgctcccactccagaagaactgcggcacgtgcttcgggcagcctagccacaggctttgagcgcctgcattcctgggggctggagggtggggtgccaaaggccctgagcaaaagccagagctcctctcatcaaagcctttacaaggtgctgggcccagaggctttgccttgacagagtggcccagggtttcaagggaggaggaacctccccctacctaggacccttcctgtggggggtctacagagtcagggacagaagggaagggacccacaggaagtcacagtggtgcccagggatgtgtcagcccccagccacggggacgcgggattcaagaatgaagtaaatacagtcacaggccccaa

SEQ ID NO: 313272 - DNA, 1749 bp, Homo sapiens
ggcgcgctctcgccggcccgccccgaaccgccccgcgctgggaatttgcggcggcctccgccggggcagccgagctgaaccggtctcttcctcggaaaggcagggccgaggggcctgcggggcagccatggaggcgacgcggaggcggcagcacctgggagcgacgggcggcccaggcgcgcagctgggcgcctccttcctgcaggccaggtacatccccttcttcctcatcctcttcatgtacttcagcggctgctttactgcctctaaagctgagagcttgattccagggcctgccctgctcctggtggcacccagtggcctgtactactggtacctggtcaccgagggccagatcttcatcctcttcatcttcaccttcttcgccatgctggccctcgtcctgcaccagaagcgcaagcgcctcttcctggacagcaacggcctcttcctcttctcctccttcgcactgaccctcttgcttgtggcgctctgggtcgcctggctgtggaatgaccctgttctcaggaagaagtacccgggtgtcatctacgtccctgagccctgggctttctacacccttcacgtcagcagtcggcactgagtccctggcaccaggctctggcgctctgctgggtgggagggtgggccatggagggcatctgaatacaggagtagggggggtgtgggtgtgtaaccagagaccgagagcatgagtggggtgtgcctcgtgtgcgtggattcgtgtgtgtgtgtgtgtcttgtatatgtgtgcgcagagtgcatcattttcagactctactatttccgtcaagtttctgtttgatttggatcatctcaggatcggattctgttttagagtgtttctgggccaggatccgggcccctgccctcctctgcacctgaccacactccctactcagggctagtctgttcttcccggacatcttctggtagccgtgcaggagagggctgggtggggcagaggccaggaggggacctggtgtgtcacctgcccaccacctggctcatccctcaggcccaccctgaccctacattacataggttacgtcagcctactgtggctgttgagcaaagcatttctcctttctgggcctcatttgcactagatgggcctgtggtcccaaagtaggtcagtaggttggggttgctgacaccccttgggtgcagctttgggacagatgagtggctctgtcctgtcactgccctctccctgcctgggggctatgtgcactccagacccctgcccaggctcaggcccatgaggtatggagacaccctggcccccaggagctggaggcaccgcccactcccctggcattccagctttgcaggtgaccctcctctacccaaagctctgtccccctgctcccactccagaagaactgcggcacgtgcttcgggcagcctagccacaggctttgagcgcctgcattcctgggggctggagggtggggtgccaaaggccctgagcaaaagccagagctcctctcatcaaagcctttacaaggtgctgggcccagaggctttgccttgacagagtggcccagggtttcaagggaggaggaacctccccctacctaggacccttcctgtggggggtctacagagtcagggacagaagggaagggacccacaggaagtcacagtggtgcccagggatgtgtcagcccccagccacggggacgcgggattcaagaatgaagtaaatacagtcacaggccccaa

SEQ ID NO: 313273 - DNA, 2154 bp, Homo sapiens
ggcgcgctctcgccggcccgccccgaaccgccccgcgctgggaatttgcggcggcctccgccggggcagccgagctgaaccggtctcttcctcggaaaggcagggccgaggggcctgcggggcagccatggaggcgacgcggaggcggcagcacctgggagcgacgggcggcccaggcgcgcagctgggcgcctccttcctgcaggccaggcatggctctgtgagcgctgatgaggctgcccgcacggctcccttccacctcgacctctggttctacttcacactgcagaactgggttctggactttgggcgtcccattgccatgctggtattccctctcgagtggtttccactcaacaagcccagtgttggggactacttccacatggcctacaacgtcatcacgccctttctcttgctcaagctcatcgagcggtccccccgcaccctgccacgctccatcacgtacgtgagcatcatcatcttcatcatgggtgccagcatccacctggtgggtgactctgtcaaccaccgcctgctcttcagtggctaccagcaccacctgtctgtccgtgagaaccccatcatcaagaatctcaagccggagacgctgatcgactcctttgagctgctctactattatgatgagtacctgggtcactgcatgtggtacatccccttcttcctcatcctcttcatgtacttcagcggctgctttactgcctctaaagctgagagcttgattccagggcctgccctgctcctggtggcacccagtggcctgtactactggtacctggtcaccgagggccagatcttcatcctcttcatcttcaccttcttcgccatgctggccctcgtcctgcaccagaagcgcaagcgcctcttcctggacagcaacggcctcttcctcttctcctccttcgcactgaccctcttgcttgtggcgctctgggtcgcctggctgtggaatgaccctgttctcaggaagaagtacccgggtgtcatctacgtccctgagccctgggctttctacacccttcacgtcagcagtcggcactgagtccctggcaccaggctctggcgctctgctgggtgggagggtgggccatggagggcatctgaatacaggagtagggggggtgtgggtgtgtaaccagagaccgagagcatgagtggggtgtgcctcgtgtgcgtggattcgtgtgtgtgtgtgtgtcttgtatatgtgtgcgcagagtgcatcattttcagactgttttagagtgtttctgggccaggatccgggcccctgccctcctctgcacctgaccacactccctactcagggctagtctgttcttcccggacatcttctggtagccgtgcaggagagggctgggtggggcagaggccaggaggggacctggtgtgtcacctgcccaccacctggctcatccctcaggcccaccctgaccctacattacataggttacgtcagcctactgtggctgttgagcaaagcatttctcctttctgggcctcatttgcactagatgggcctgtggtcccaaagtaggtcagtaggttggggttgctgacaccccttgggtgcagctttgggacagatgagtggctctgtcctgtcactgccctctccctgcctgggggctatgtgcactccagacccctgcccaggctcaggcccatgaggtatggagacaccctggcccccaggagctggaggcaccgcccactcccctggcattccagctttgcaggtgaccctcctctacccaaagctctgtccccctgctcccactccagaagaactgcggcacgtgcttcgggcagcctagccacaggctttgagcgcctgcattcctgggggctggagggtggggtgccaaaggccctgagcaaaagccagagctcctctcatcaaagcctttacaaggtgctgggcccagaggctttgccttgacagagtggcccagggtttcaagggaggaggaacctccccctacctaggacccttcctgtggggggtctacagagtcagggacagaagggaagggacccacaggaagtcacagtggtgcccagggatgtgtcagcccccagccacggggacgcgggattcaagaatgaagtaaatacagtcacaggccccaa

SEQ ID NO: 313274 - DNA, 1140 bp, Homo sapiens
tgcagcagcggtcgcttagagatccccagaggagggtgggccatggagggcatctgaatacaggagtagggggggtgtgggtgtgtaaccagagaccgagagcatgagtggggtgtgcctcgtgtgcgtggattcgtgtgtgtgtgtgtgtcttgtatatgtgtgcgcagagtgcatcattttcagactctactatttccgtcaagtttctgtttgatttggatcatctcaggatcggattctgttttagagtgtttctgggccaggatccgggcccctgccctcctctgcacctgaccacactccctactcagggctagtctgttcttcccggacatcttctggtagccgtgcaggagagggctgggtggggcagaggccaggaggggacctggtgtgtcacctgcccaccacctggctcatccctcaggcccaccctgaccctacattacataggttacgtcagcctactgtggctgttgagcaaagcatttctcctttctgggcctcatttgcactagatgggcctgtggtcccaaagtaggtcagtaggttggggttgctgacaccccttgggtgcagctttgggacagatgagtggctctgtcctgtcactgccctctccctgcctgggggctatgtgcactccagacccctgcccaggctcaggcccatgaggtatggagacaccctggcccccaggagctggaggcaccgcccactcccctggcattccagctttgcaggtgaccctcctctacccaaagctctgtccccctgctcccactccagaagaactgcggcacgtgcttcgggcagcctagccacaggctttgagcgcctgcattcctgggggctggagggtggggtgccaaaggccctgagcaaaagccagagctcctctcatcaaagcctttacaaggtgctgggcccagaggctttgccttgacagagtggcccagggtttcaagggaggaggaacctccccctacctaggacccttcctgtggggggtctacagagtcagggacagaagggaagggacccacaggaagtcacagtggtgcccagggatgtgtcagcccccagccacggggacgcgggattcaagaatgaagtaaatacagtcacaggccccaa

SEQ ID NO: 313275 - DNA, 1704 bp, Homo sapiens
ggcgcgctctcgccggcccgccccgaaccgccccgcgctgggaatttgcggcggcctccgccggggcagccgagctgaaccggtctcttcctcggaaaggcagggccgaggggcctgcggggcagccatggaggcgacgcggaggcggcagcacctgggagcgacgggcggcccaggcgcgcagctgggcgcctccttcctgcaggccaggcatggctctgtgagcgctgatgaggctgcccgcacggctcccttccacctcgacctctggttctacttcacactgcagaactgggttctggactttgggcgtcccattgccatgctggtattccctctcgagtggtttccactcaacaagcccagtgttggggactacttccacatggcctacaacgtcatcacgccctttctcttgctcaagctcatcgagcggtccccccgcaccctgccacgctccatcacgtacgtgagcatcatcatcttcatcatgggtgccagcatccacctggtgggtgactctgtcaaccaccgcctgctcttcagtggctaccagcaccacctgtctgtccgtgagaaccccatcatcaagaatctcaagccggagacgctgatcgactcctttgagctgctctactattatgatgagtacctgggtcactgcatgtggtacatccccttcttcctcatcctcttcatgtacttcagcggctgctttactgcctctaaagctgagagcttgattccagggcctgccctgctcctggtggcacccagtggcctgtactactggtacctggtcaccgagggccagatcttcatcctcttcatcttcaccttcttcgccatgctggccctcgtcctgcaccagaagcgcaagcgcctcttcctggacagcaacggcctcttcctcttctcctccttcgcactgaccctcttgcttgtggcgctctgggtcgcctggctgtggaatgaccctgttctcaggaagaagtacccgggtgtcatctacgtccctgagccctgggctttctacacccttcacgtcagcagtcggcactgagtccctggcaccaggctctggcgctctgctgggtgggagggtgggccatggagggcatctgaatacaggagtagggggggtgtgggtgtgtaaccagagaccgagagcatgagtggggtgtgcctcgtgtgcgtggattcgtgtgtgtgtgtgtgtcttgtatatgtgtgcgcagagtgcatcattttcagactctactatttccgtcaagtttctgtttgatttggatcatctcaggatcggattctgttttagagtgtttctgggccaggatccgggcccctgccctcctctgcacctgaccacactccctactcagggctagtctgttcttcccggacatcttctggtagccgtgcaggagagggctgggtggggcagaggccaggaggggacctggtgtgtcacctgcccaccacctggctcatccctcaggcccaccctgaccctacattacataggttacgtcagcctactgtggctgttgagcaaagcatttctcctttctgggcctcatttgcactagatgggcctgtggtcccaaagtaggtcagtaggttggggttgctgatcctctttgtaattactatttgtacttgttaattactataacttttcaattcttttaatattcatgattt

SEQ ID NO: 313276 - DNA, 947 bp, Homo sapiens
ggacgcgtgggtcgacccacgcgtccgggatcatctcaggatcggattctgttttagagtgtttctgggccaggatccgggcccctgccctcctctgcacctgaccacactccctactcagggctagtctgttcttcccggacatcttctggtagccgtgcaggagagggctgggtggggcagaggccaggaggggacctggtgtgtcacctgcccaccacctggctcatccctcaggcccaccctgaccctacattacataggttacgtcagcctactgtggctgttgagcaaagcatttctcctttctgggcctcatttgcactagatgggcctgtggtcccaaagtaggtcagtaggttggggttgctgacaccccttgggtgcagctttgggacagatgagtggctctgtcctgtcactgccctctccctgcctgggggctatgtgcactccagacccctgcccaggctcaggcccatgaggtatggagacaccctggcccccaggagctggaggcaccgcccactcccctggcattccagctttgcaggtgaccctcctctacccaaagctctgtccccctgctcccactccagaagaactgcggcacgtgcttcgggcagcctagccacaggctttgagcgcctgcattcctgggggctggagggtggggtgccaaaggccctgagcaaaagccagagctcctctcatcaaagcctttacaaggtgctgggcccagaggctttgccttgacagagtggcccagggtttcaagggaggaggaacctccccctacctaggacccttcctgtggggggtctacagagtcagggacagaagggaagggacccacaggaagtcacagtggtgcccagggatgtgtcagcccccagccacggggacgcgggattcaagaatgaagtaaatacagtcacaggccccaa

SEQ ID NO: 313277 - DNA, 288 bp, Homo sapiens
ggcgcgctctcgccggcccgccccgaaccgccccgcgctgggaatttgcggcggcctccgccggggcagccgagctgaaccggtctcttcctcggaaaggcagggccgaggggcctgcggggcagccatggaggcgacgcggaggcggcagcacctgggagcgacgggcggcccaggcgcgcagctgggcgcctccttcctgcaggccagaacggaaatgggggggggtggtgggagggggttggtgtgtgaatggtgaggggagggagggtggtgtgggtggagggg

SEQ ID NO: 313278 - DNA, 1056 bp, Homo sapiens
  misc_feature (981)..(982): n is a, c, g, or t
  misc_feature (1052)..(1052): n is a, c, g, or t
ggcgcgctctcgccggcccgccccgaaccgccccgcgctgggaatttgcggcggcctccgccggggcagccgagctgaaccggtctcttcctcggaaaggcagggccgaggggcctgcggggcagccatggaggcgacgcggaggcggcagcacctgggagcgacgggcggcccaggcgcgcagctgggcgcctccttcctgcaggccaggcatggctctgtgagcgctgatgaggctgcccgcacggctcccttccacctcgacctctggttctacttcacactgcagaactgggttctggactttgggcgtcccattgccatgctggtattccctctcgagtggtttccactcaacaagcccagtgttggggactacttccacatggcctacaacgtcatcacgccctttctcttgctcaagatcgactcctttgagctgctctactattatgatgagtacctgggtcactgcatgtggtacatccccttcttcctcatcctcttcatgtacttcagcggctgctttactgcctctaaagctgagagcttgattccagggcctgccctgctcctggtggcacccagtggcctgtactactggtacctggtcaccgagggccagatcttcatcctcttcatcttcaccttcttcgccatgctggccctcgtcctgcaccagaagcgcaagcgcctcttcctggacagcaacggcctcttcctcttctcctccttcgcactgaccctcttgcttgtggcgctctgggtcgcctggctgtggaatgaccctgttctcaggaagaagtacccgggtgtcatctacgtccctgagccctgggctttctacacccttcacgtcagcagtcggcactgagtccctggcaccaggctctggcgctctgctgggtgggagggtgggccatggagggcatctgaatacaggagtagggggggtgtgggtgtgtaaccagagaatccacnnttttttttttttttttttttttttttttttttttttttttttttttttttttttttttttttttatattnatta

SEQ ID NO: 313279 - DNA, 2234 bp, Homo sapiens
ggcgcgctctcgccggcccgccccgaaccgccccgcgctgggaatttgcggcggcctccgccggggcagccgagctgaaccggtctcttcctcggaaaggcagggccgaggggcctgcggggcagccatggaggcgacgcggaggcggcagcacctgggagcgacgggcggcccaggcgcgcagctgggcgcctccttcctgcaggccaggcatggctctgtgagcgctgatgaggctgcccgcacggctcccttccacctcgacctctggttctacttcacactgcagaactgggttctggactttgggcgtcccattgccatgctggtattccctctcgagtggtttccactcaacaagcccagtgttggggactacttccacatggcctacaacgtcatcacgccctttctcttgctcaagctcatcgagcggtccccccgcaccctgccacgctccatcacgtacgtgagcatcatcatcttcatcatgggtgccagcatccacctggtgggtgactctgtcaaccaccgcctgctcttcagtggctaccagcaccacctgtctgtccgtgagaaccccatcatcaagaatctcaagccggagacgctggtgaggccacctcctgctccctgcctatcgactcctttgagctgctctactattatgatgagtacctgggtcactgcatgtggtacatccccttcttcctcatcctcttcatgtacttcagcggctgctttactgcctctaaagctgagagcttgattccagggcctgccctgctcctggtggcacccagtggcctgtactactggtacctggtcaccgagggccagatcttcatcctcttcatcttcaccttcttcgccatgctggccctcgtcctgcaccagaagcgcaagcgcctcttcctggacagcaacggcctcttcctcttctcctccttcgcactgaccctcttgcttgtggcgctctgggtcgcctggctgtggaatgaccctgttctcaggaagaagtacccgggtgtcatctacgtccctgagccctgggctttctacacccttcacgtcagcagtcggcactgagtccctggcaccaggctctggcgctctgctgggtgggagggtgggccatggagggcatctgaatacaggagtagggggggtgtgggtgtgtaaccagagaccgagagcatgagtggggtgtgcctcgtgtgcgtggattcgtgtgtgtgtgtgtgtcttgtatatgtgtgcgcagagtgcatcattttcagactctactatttccgtcaagtttctgtttgatttggatcatctcaggatcggattctgttttagagtgtttctgggccaggatccgggcccctgccctcctctgcacctgaccacactccctactcagggctagtctgttcttcccggacatcttctggtagccgtgcaggagagggctgggtggggcagaggccaggaggggacctggtgtgtcacctgcccaccacctggctcatccctcaggcccaccctgaccctacattacataggttacgtcagcctactgtggctgttgagcaaagcatttctcctttctgggcctcatttgcactagatgggcctgtggtcccaaagtaggtcagtaggttggggttgctgacaccccttgggtgcagctttgggacagatgagtggctctgtcctgtcactgccctctccctgcctgggggctatgtgcactccagacccctgcccaggctcaggcccatgaggtatggagacaccctggcccccaggagctggaggcaccgcccactcccctggcattccagctttgcaggtgaccctcctctacccaaagctctgtccccctgctcccactccagaagaactgcggcacgtgcttcgggcagcctagccacaggctttgagcgcctgcattcctgggggctggagggtggggtgccaaaggccctgagcaaaagccagagctcctctcatcaaagcctttacaaggtgctgggcccagaggctttgccttgacagagtggcccagggtttcaagggaggaggaacctccccctacctaggacccttcctgtggggggtctacagagtcagggacagaagggaagggacccacaggaagtcacagtggtgcccagggatgtgtcagcccccagccacggggacgcgggattcaagaatgaagtaaatacagtcacaggccccaa

SEQ ID NO: 313280 - DNA, 2219 bp, Homo sapiens
  misc_feature (122)..(122): n is a, c, g, or t
  misc_feature (137)..(137): n is a, c, g, or t
  misc_feature (162)..(162): n is a, c, g, or t
  misc_feature (166)..(166): n is a, c, g, or t
  misc_feature (211)..(211): n is a, c, g, or t
  misc_feature (233)..(233): n is a, c, g, or t
  misc_feature (326)..(326): n is a, c, g, or t
  misc_feature (363)..(363): n is a, c, g, or t
  misc_feature (398)..(398): n is a, c, g, or t
  misc_feature (441)..(441): n is a, c, g, or t
  misc_feature (445)..(445): n is a, c, g, or t
  misc_feature (447)..(447): n is a, c, g, or t
  misc_feature (451)..(451): n is a, c, g, or t
  misc_feature (469)..(469): n is a, c, g, or t
  misc_feature (499)..(499): n is a, c, g, or t
  misc_feature (508)..(508): n is a, c, g, or t
  misc_feature (516)..(516): n is a, c, g, or t
  misc_feature (555)..(555): n is a, c, g, or t
ggcgcgctctcgccggcccgccccgaaccgccccgcgctgggaatttgcggcggcctccgccggggcagccgagctgaaccggtctcttcctcggaaaggcagggccgaggggggggggggngcgcggggggggggnggggggggggggggcggggcggggngggnggggggggggggggggggggggggggggggggggggggggggggnggggggggtcgggggggggggngggggggggggggggggcgccctgggagggggagggggggggggggggggagaggggggaagggggtgggggaggtgggggggggcagggggngggggggagggggggggggggggggggcagggaagangccgagggggggggaggagtgggagagggggtagnaggggagggggggggggggcggggggagggggagggggggggnccgncnggancgggggaggggccgaggnaggggaggtgaggggtgagcatgcgggagnagggggggnagcagggnagggggggggggagggggtgaaccaccgggctgggcggnagtggctaccagcaccacctgtctgtccgtgagaaccccatcatcaagaatctcaagccggagacgctgatcgactcctttgagctgctctactattatgatgagtacctgggtcactgcatgtggtacatccccttcttcctcatcctcttcatgtacttcagcggctgctttactgcctctaaagctgagagcttgattccagggcctgccctgctcctggtggcacccagtggcctgtactactggtacctggtcaccgagggccagatcttcatcctcttcatcttcaccttcttcgccatgctggccctcgtcctgcaccagaagcgcaagcgcctcttcctggacagcaacggcctcttcctcttctcctccttcgcactgaccctcttgcttgtggcgctctgggtcgcctggctgtggaatgaccctgttctcaggaagaagtacccgggtgtcatctacgtccctgagccctgggctttctacacccttcacgtcagcagtcggcactgagtccctggcaccaggctctggcgctctgctgggtgggagggtgggccatggagggcatctgaatacaggagtagggggggtgtgggtgtgtaaccagagaccgagagcatgagtggggtgtgcctcgtgtgcgtggattcgtgtgtgtgtgtgtgtcttgtatatgtgtgcgcagagtgcatcattttcagactctactatttccgtcaagtttctgtttgatttggatcatctcaggatcggattctgttttagagtgtttctgggccaggatccgggcccctgccctcctctgcacctgaccacactccctactcagggctagtctgttcttcccggacatcttctggtagccgtgcaggagagggctgggtggggcagaggccaggaggggacctggtgtgtcacctgcccaccacctggctcatccctcaggcccaccctgaccctacattacataggttacgtcagcctactgtggctgttgagcaaagcatttctcctttctgggcctcatttgcactagatgggcctgtggtcccaaagtaggtcagtaggttggggttgctgacaccccttgggtgcagctttgggacagatgagtggctctgtcctgtcactgccctctccctgcctgggggctatgtgcactccagacccctgcccaggctcaggcccatgaggtatggagacaccctggcccccaggagctggaggcaccgcccactcccctggcattccagctttgcaggtgaccctcctctacccaaagctctgtccccctgctcccactccagaagaactgcggcacgtgcttcgggcagcctagccacaggctttgagcgcctgcattcctgggggctggagggtggggtgccaaaggccctgagcaaaagccagagctcctctcatcaaagcctttacaaggtgctgggcccagaggctttgccttgacagagtggcccagggtttcaagggaggaggaacctccccctacctaggacccttcctgtggggggtctacagagtcagggacagaagggaagggacccacaggaagtcacagtggtgcccagggatgtgtcagcccccagccacggggacgcgggattcaagaatgaagtaaatacagtcacaggccccaa

SEQ ID NO: 313281 - DNA, 2248 bp, Homo sapiens
ggcgcgctctcgccggcccgccccgaaccgccccgcgctgggaatttgcggcggcctccgccggggcagccgagctgaaccggtctcttcctcggaaaggcagggccgaggggcctgcggggcagccatggaggcgacgcggaggcggcagcacctgggagcgacgggcggcccaggcgcgcagctgggcgcctccttcctgcaggccaggcatggctctgtgagcgctgatgaggctgcccgcacggctcccttccacctcgacctctggttctacttcacactgcagaactgggttctggactttgggcgtcccattgccatgctggtattccctctcgagtggtttccactcaacaagcccagtgttggggactacttccacatggcctacaacgtcatcacgccctttctcttgctcaagctcatcgagcggtccccccgcaccctgccacgctccatcacgtacgtgagcatcatcatcttcatcatgggtgccagcatccacctggtgggtgactctgtcaaccaccgcctgctcttcagtggctaccagcaccacctgtctgtccgtgagaaccccatcatcaagaatctcaagccggagacgctgatcgactcctttgagctgctctactattatgatgagtacctgggtcactgcatgtggtacatccccttcttcctcatcctcttcatgtacttcagcggctgctttactgcctctaaagctgagagcttgattccagggcctgccctgctcctggtggcacccagtggcctgtactactggtacctggtcaccgagggccagatcttcatcctcttcatcttcaccttcttcgccatgctggccctcgtcctgcaccagaagcgcaagcgcctcttcctggacagcaacggcctcttcctcttctcctccttcgcactgaccctcttgcttgtggcgctctgggtcgcctggctgtggaatgaccctgttctcaggaagaagtacccgggtgtcatctacgtccctgagccctgggctttctacacccttcacgtcagcagtcggcactgagtccctggcaccaggctctggcgctctgctgggtgggagggtgggccatggagggcatctgaatacaggagtagggggggtgtgggtgtgtaaccagagaccgagagcatgagtggggtgtgcctcgtgtgcgtggattcgtgtgtgtgtgtgtgtcttgtatatgtgtgcgcagagtgcatcattttcagactctactatttccgtcaagtttctgtttgatttggatcatctcaggatcggattctgttttagagtgtttctgggccaggatccgggcccctgccctcctctgcacctgaccacactccctactcagggctagtctgttcttcccggacatcttctggtagccgtgcaggagagggctgggtggggcagaggccaggaggggacctggtgtgtcacctgcccaccacctggctcatccctcaggcccaccctgaccctacattacataggttacgtcagcctactgtggctgttgagcaaagcatttctcctttctgggcctcatttgcactagatgggcctgtactgacctactttgggaccacaggcccatctagtgcaaatggtcccaaagtaggtcagtaggttggggttgctgacaccccttgggtgcagctttgggacagatgagtggctctgtcctgtcactgccctctccctgcctgggggctatgtgcactccagacccctgcccaggctcaggcccatgaggtatggagacaccctggcccccaggagctggaggcaccgcccactcccctggcattccagctttgcaggtgaccctcctctacccaaagctctgtccccctgctcccactccagaagaactgcggcacgtgcttcgggcagcctagccacaggctttgagcgcctgcattcctgggggctggagggtggggtgccaaaggccctgagcaaaagccagagctcctctcatcaaagcctttacaaggtgctgggcccagaggctttgccttgacagagtggcccagggtttcaagggaggaggaacctccccctacctaggacccttcctgtggggggtctacagagtcagggacagaagggaagggacccacaggaagtcacagtggtgcccagggatgtgtcagcccccagccacggggacgcgggattcaagaatgaagtaaatacagtcacaggccccaa

SEQ ID NO: 313282 - DNA, 1656 bp, Homo sapiens
ggcgcgctctcgccggcccgccccgaaccgccccgcgctgggaatttgcggcggcctccgccggggcagccgagctgaaccggtctcttcctcggaaaggcagggccgaggggcctgcggggcagccatggaggcgacgcggaggcggcagcacctgggagcgacgggcggcccaggcgcgcagctgggcgcctccttcctgcaggccaggcatggctctgtgagcgctgatgaggctgcccgcacggctcccttccacctcgacctctggttctacttcacactgcagaactgggttctggactttgggcgtcccattgccatgctggtattccctctcgagtggtttccactcaacaagcccagtgttggggactacttccacatggcctacaacgtcatcacgccctttctcttgctcaagctcatcgagcggtccccccgcaccctgccacgctccatcacgtacgtgagcatcatcatcttcatcatgggtgccagcatccacctggtgggtgactctgtcaaccaccgcctgctcttcagtggctaccagcaccacctgtctgtccgtgagaaccccatcatcaagaatctcaagccggagacgctgatcgactcctttgagctgctctactattatgatgagtacctgggtcactgcatgtggtacatccccttcttcctcatcctcttcatgtacttcagcggctgctttactgcctctaaagctgagagcttgattccagggcctgccctgctcctggtggcacccagtggcctgtactactggtacctggtcaccgagggccagatcttcatcctcttcatcttcaccttcttcgccatgctggccctcgtcctgcaccagaagcgcaagcgcctcttcctggacagcaacggcctcttcctcttctcctccttcgcactgaccctcttgcttgtggcgctctgggtcgcctggctgtggaatgaccctgttctcaggaagaagtacccgggtgtcatctacgtccctgagccctgggctttctacacccttcacgtcagcagtcggcactgagtccctggcaccaggctctggcgctctgctgggtgggagggtgggccatggagggcatctgaatacaggagtagggggggtgtgggtgtgtaaccagagaccgagagcatgagtggggtgtgcctcgtgtgcgtggattcgtgtgtgtgtgtgtgtcttgtatatgtgtgcgcagagtgcatcattttcagactctactatttccgtcaagtttctgtttgatttggatcatctcaggatcggattctgttttagagtgtttctgggccaggatccgggcccctgccctcctctgcacctgaccacactccctactcagggctagtctgttcttcccggacatcttctggtagccgtgcaggagagggctgggtggggcagaggccaggaggggacctggtgtgtcacctgcccaccacctggctcatccctcaggcccaccctgaccctacattacataggttacgtcagcctactgtggctgttgagcaaagcatttctcctttctgggcctcatttgcactagatgggcctgcccccagccacggggacgcgggattcaagaatgaagtaaatacagtcacaggccccaa

SEQ ID NO: 313283 - DNA, 6936 bp, Homo sapiens
  misc_feature (4185)..(4185): n is a, c, g, or t
gggcagccgcggcagaggagccgcagccgcagcggggccgggccgggccgggcgcgcaccagcggcagcggcagcggcagcggcggcggcagcatctcgctctcggagccggcgcaggtttccctgtacttagagcgtggactgtgaacccccaagcagacgagctgaacttcgtcacccagtccctagagccagcaagacatgggccccagtttccagaccctgacacctctcatttaaccagaagacgtggaggggagccaccacccctgaccatgtagatgccagttccagggagcagcatgggccccactgaatggagactcctgggtctacagccctgagcccctccggcccctggacctcgtcccacaccggaggacacctcttggagctcaccaccactgtcaccagcccgcctcggccacccccaccccccgggacccggagtcggccgcctggtgccacagctgaccagtgagggtgtgctgaggacagccacaagcagccatcacccggcagcctcttgtccagcgctgacccttgggcccagcccgagcaaggaccgcagcaaacatgggtgacatgaccaacagcgacttttactccaaaaaccaaagaaatgagtcgagccatgggggcgagttcgggtgcacaatggaggagctccgctccctcatggagctgcggggcactgaggctgtggtcaagatcaaggagacttatggggacaccgaagccatctgccggcgcctcaaaacctcacctgttgaaggtttgccgggcaccgctccagacctggaaaagagaaagcaaatttttgggcaaaactttatacctccaaagaagccaaaaaccttcctgcagctcgtgtgggaggcgctgcaggacgtgacgctcatcatcctggagattgccgccatcatctccctggggctgtccttctaccaccgccccggcgagggcaacgaaggatgtgcgacggcccagggtggggcagaggatgaaggagaggcagaggcaggttggatcgagggggccgccattctcctctcagttatctgtgtggtcctggtcacggccttcaatgactggagcaaagagaaacagttccggggcctgcagagccgcatcgagcaggaacagaaatttaccgtggtccgggctggccaggtggtccagatccctgtggctgagatcgtggttggggacatagcccaggtcaaatatggtgacctcctccctgccgacggactcttcatccagggcaatgacctcaagattgatgaaagctccctaactggagagtctgaccaggtgcgcaagtccgtggacaaggaccccatgctgctgtcaggaacccacgtgatggagggctcaggacggatgttggtgactgctgtgggtgtgaactctcagactggcatcatctttaccctcctgggggctggtggtgaagaggaagagaagaaagacaaaaaagccaaacagcaggacggggcagccgccatggagatgcagcccctcaagagtgccgagggcggcgacgctgacgacaggaagaaggccagcatgcacaagaaggagaagtccgtgctgcagggcaagctcaccaagctggctgtgcagatcgggaaggcgggcttggtgatgtcagccatcacggtgatcatcctggtgctctacttcactgtggacaccttcgtggtcaacaagaagccgtggctgcctgagtgcacgcccgtctacgtgcagtactttgtcaagttcttcatcattggcgtgacggtgctggtggtcgccgtgcccgaggggctccctctggccgtcaccatctcgttggcctattcggtgaagaaaatgatgaaggacaacaacctggtacgccacctggatgcctgtgagaccatgggcaatgccacagccatctgctcagacaagacaggcacgctgaccaccaatcgcatgacagtggtacaggcctatgtcgacgacgtccactataaagagatccccgaccccagctccatcaacaccaagactatggagctgctgatcaatgccatcgccatcaacagcgcctacaccaccaagattctgcccccagagaaggagggcgccctgcctcggcaggtgggcaacaagacggagtgcggcctgctgggcttcgtgctggacctgaagcaggactacgagcccgtgcgcagccagatgccagaggagaagttgtacaaagtgtacaccttcaactccgtgcgcaagtccatgagcactgtcatcaagctgcccgacgagagcttccgcatgtacagcaagggggcttctgagatcgtgctcaagaagtgctgcaaaatcctcaatggggcgggagagcctcgtgtcttccggccccgcgaccgggacgagatggtaaagaaggtgattgagcccatggcttgcgatgggctccgcactatctgcgtggcctaccgcgacttccccagcagcccggagccggactgggacaatgagaatgacatcctcaacgaactcacctgcatctgcgtggtgggcatcgaggacccggtgcggccagaggtcccagaagccatccgcaagtgccagcgggcaggcatcacggtccgcatggtcactggcgacaatatcaacacggctcgggccatcgccatcaagtgtggcatcatccatcctggggaggactttctgtgcctcgagggcaaggagttcaacaggaggatccgcaacgagaagggggagattgagcaggagcgaattgacaagatctggccaaagctgcgggtgctggctcgctcctccccaacggacaagcataccctggttaaaggcatcatcgacagcacacacactgagcagcggcaggtggtggccgtgacgggggacgggaccaacgacgggcctgcactcaagaaggccgacgtgggcttcgccatgggcatcgcaggcactgacgtggccaaggaggcctcagacatcatcctgacagacgacaatttcagcagcatcgtcaaggcagtgatgtggggccgcaacgtctatgacagcatctccaaattcttgcagttccagctcaccgtcaacgtggtggccgtgattgtggccttcacaggcgcctgcatcacgcaggactcccctctgaaggccgtgcagatgctctgggtgaacctcatcatggacacgtttgcctcgctggcactggccactgagccgcccacggagaccctgctgctgaggaagccgtacggccgcaacaagccgctcatctccaggaccatgatgaagaacatcctgggccatgctgtctaccagcttgccctcatcttcaccctgctctttgttggcgagaagatgttccagatcgacagcgggaggaacgcgcccctgcattcgccaccctcagaacattacaccatcatcttcaacaccttcgtcatgatgcagctcttcaacgagatcaacgcccgcaagatccacggcgagcgcaatgtctttgacggcatcttccggaaccccatcttctgcaccatcgtgctgggcacctttgccatccagatagtgatcgtgcagtttggagggaagccattcagctgctctccactgcagctggaccagtggatgtggtgcatattcattgggttaggagagctcgtttggggccaggtcatcgccaccatcccgaccagcagactcaagttcctcaaggaggcaggcaggctcacacagaaggaggagatcccggaggaggagctcaacgaggacgtggaggagatcgaccacgcagagcgggagctgcggcggggccagatcctgtggttccgaggcctgaatcggatccagacacagatccgcgtcgtgaaggcgttccgtagctctctctatgaaggtttagaaaagcctgaatctcgaacctccatccataacttcatggctcatcctgaattccggatcgaagattcccagccccacatccccctcattgatgacaccgacctggaagaagatgccgcgctcaagcagaactcgagcccgccgtcatccctcaacaagaacaacagcgccatcgacagtgggatcaacctgacgaccgacacaagcaaatcagctacctcttcaagtccagggagccccatccacagcctggagacgtcgctttagctgaggaccctntcgcctgcccgcccgccctcatggaccccgctgtcacccgctttccgggcacccatccatccaggcacccaactcacccaagcagcaacgagcaacaatcggaaaccaaatactggagagaaaaccaacgtttccacccacagaccctttctctggctgcgatgctgtttgaactctttttcacttcaaggcaaggggcgggatctccactgggggcttacgggagtgagcggttttcccaaaacaagcccttcctggctcccacccagacatggaccagccatgcacccgcccagccaccacgtcccccgcatgaatgtactgtacactttcaatcctccccttgtttggtttttgggggttggggaggggtttttgtttgtttgtttgttttcttaggcgggaactgcaaacagactcttttctgagactatttatccaatccactggtctgtgagtttttgaaatgcttgcacagcatggtctcagttgtatagattaatttaataactttttgaaattgcagagcttaactcgcctagtagatttgcaccaatggaaccgaagaacttcatagacactcacaaggttatatccatttctttgtatctatatcaacgtatacttttccgagactgtatacgtccatatagataggtagatatatatatatatatataaatatatatacatggatatataaagtttctttgccggcatgttgccttgtttccgcttaaattgctctattttaacttatttatgtcctaaaagaagaatgtaatttgtttacaaacctgtagataacgtctttggctatttgtatggtttaagaacactggtggctgagatgctataaaaacagctcggcccaacagacacttcccctgggttgcatcctggatgttttatgatagccatgctctgatttttgcctgctatttccgttcaataatgtcactaccgtgagaggctcaggcagaagccaaatgctaccgagttgccatcctgaggggtttaacaacatgctccgtagacgaagggagaggaggagagaaggcttcctgggtttgcaacactaacggccatccggcccaaggatgccaggatctgcaaagcactgctcgaagacttttctctcaatgaaactcgcttgagtttactaagagcatttcaaaaataggttctctttggcactgtctgtacagagattgaggtagtgttgaaatattataaatggtattgtgttgatttttttttttatttagtaacttacaggtttgtttccttattaatggcagcatctgagctgttggcatattggatgaggatcagtatggcttgctgcttttatttttatttttgaagaagaatagcctttttctctgcactatttagatccgaatgaaccttatgatgtgtatattgagatgtactcagtgtgattttaaaccaaattgtcttcctgtagtcacaatatatactgtagccttttaacagcaagtcttgctttcccaaacagaaagccattctgaaaccctacagtatcacaggtgagaaaaggtggttattttttccccaagacaacagcactagtaatcccacttaataagagcttatttaattggatgtcagcctcttaactgctaagcactttgtgggtctcagcgtttttcataaaagaacttttgtatttaatacaaagtttgctttgagacttttcagcatatgatcttttttccataaacttgtacagtgcaaaagacattttgaataccatgatcgatgatgtcccatgcttcgaggaaaaccaaacactttccgcctctcttgcaaaatccattcctcatgctgaccctcctcacgatggctgtgtcagcccagccccttcccttctccaggcccagagaactcttccacaaacaagatgagagccactcgggaaaagagccatagtcaactgggagggcctacatctggatggcggtggaaaaacttgagggtttggggttcaaagtcagcccatcccacctggcaaaatcctcctggaaggaggaccttcaagagcgcatcacctgaatgtcgtgaagaagtatctctgaatgtatccaggagaggaactgcataaccaaaggggtgaccagccctcagatgtgcttattggattccagtacaaacgccaccaaagccagcccactgctctcctacaaggaaggaaagatctgcacgtgtaaaacatggggcagccttggaacatggtgttttttggagtttcctttctcacagttttccatctccccacttctttgatcagtcatgtgtccgtgacctcgttccatgacatcaggatagctgtgtttgcacaccatgctgcatgttcatttggagccaggaggggttctcagtggagcctggcttagggaacagggagcgatggaagaatgccaacattagcgttggtcttctcttgtcaggaatgaaggatgcttgcacacatgcaccccctcactctcacacttgcacacatacacacacacacacacgaaatggttggtttgtcaaaactcactgtagtacataaagcttgcactctgcgtcctatatctagcagcatggggtacgtttggcagttcactccattagggggtaaataatttatgaccattcatctgtttttatgaatttttttatctagacaataattgtaaataaagaactcaccatctctgttcatttaaaaaaaaaatgcaa

SEQ ID NO: 313284 - DNA, 3311 bp, Homo sapiens
  misc_feature (2)..(2): n is a, c, g, or t
  misc_feature (4)..(6): n is a, c, g, or t
  misc_feature (177)..(177): n is a, c, g, or t
  misc_feature (560)..(560): n is a, c, g, or t
cngnnncagattgaagtagtcaatactttcaagagcggggcctcctttcagggggccctgcggagacagtcctcggtcaccagccagagccaggatgtagccaatctctctagccctagtcgcgtgtcgttgtccaatgctctttcctctccgaccagccttcctcctgctgcagcngggcagggctagagaaccctggacacagagttcagcaagagagagtgaaattaaaagagatccgcgtcgtgaaggcgttccgtagctctctctatgaaggtttagaaaagcctgaatctcgaacctccatccataacttcatggctcatcctgaattccggatcgaagattcccagccccacatccccctcattgatgacaccgacctggaagaagatgccgcgctcaagcagaactcgagcccgccgtcatccctcaacaagaacaacagcgccatcgacagtgggatcaacctgacgaccgacacaagcaaatcagctacctcttcaagtccagggagccccatccacagcctggagacgtcgctttagctgaggaccctntcgcctgcccgcccgccctcatggaccccgctgtcacccgctttccgggcacccatccatccaggcacccaactcacccaagcagcaacgagcaacaatcggaaaccaaatactggagagaaaaccaacgtttccacccacagaccctttctctggctgcgatgctgtttgaactctttttcacttcaaggcaaggggcgggatctccactgggggcttacgggagtgagcggttttcccaaaacaagcccttcctggctcccacccagacatggaccagccatgcacccgcccagccaccacgtcccccgcatgaatgtactgtacactttcaatcctccccttgtttggtttttgggggttggggaggggtttttgtttgtttgtttgttttcttaggcgggaactgcaaacagactcttttctgagactatttatccaatccactggtctgtgagtttttgaaatgcttgcacagcatggtctcagttgtatagattaatttaataactttttgaaattgcagagcttaactcgcctagtagatttgcaccaatggaaccgaagaacttcatagacactcacaaggttatatccatttctttgtatctatatcaacgtatacttttccgagactgtatacgtccatatagataggtagatatatatatatatatataaatatatatacatggatatataaagtttctttgccggcatgttgccttgtttccgcttaaattgctctattttaacttatttatgtcctaaaagaagaatgtaatttgtttacaaacctgtagataacgtctttggctatttgtatggtttaagaacactggtggctgagatgctataaaaacagctcggcccaacagacacttcccctgggttgcatcctggatgttttatgatagccatgctctgatttttgcctgctatttccgttcaataatgtcactaccgtgagaggctcaggcagaagccaaatgctaccgagttgccatcctgaggggtttaacaacatgctccgtagacgaagggagaggaggagagaaggcttcctgggtttgcaacactaacggccatccggcccaaggatgccaggatctgcaaagcactgctcgaagacttttctctcaatgaaactcgcttgagtttactaagagcatttcaaaaataggttctctttggcactgtctgtacagagattgaggtagtgttgaaatattataaatggtattgtgttgatttttttttttatttagtaacttacaggtttgtttccttattaatggcagcatctgagctgttggcatattggatgaggatcagtatggcttgctgcttttatttttatttttgaagaagaatagcctttttctctgcactatttagatccgaatgaaccttatgatgtgtatattgagatgtactcagtgtgattttaaaccaaattgtcttcctgtagtcacaatatatactgtagccttttaacagcaagtcttgctttcccaaacagaaagccattctgaaaccctacagtatcacaggtgagaaaaggtggttattttttccccaagacaacagcactagtaatcccacttaataagagcttatttaattggatgtcagcctcttaactgctaagcactttgtgggtctcagcgtttttcataaaagaacttttgtatttaatacaaagtttgctttgagacttttcagcatatgatcttttttccataaacttgtacagtgcaaaagacattttgaataccatgatcgatgatgtcccatgcttcgaggaaaaccaaacactttccgcctctcttgcaaaatccattcctcatgctgaccctcctcacgatggctgtgtcagcccagccccttcccttctccaggcccagagaactcttccacaaacaagatgagagccactcgggaaaagagccatagtcaactgggagggcctacatctggatggcggtggaaaaacttgagggtttggggttcaaagtcagcccatcccacctggcaaaatcctcctggaaggaggaccttcaagagcgcatcacctgaatgtcgtgaagaagtatctctgaatgtatccaggagaggaactgcataaccaaaggggtgaccagccctcagatgtgcttattggattccagtacaaacgccaccaaagccagcccactgctctcctacaaggaaggaaagatctgcacgtgtaaaacatggggcagccttggaacatggtgttttttggagtttcctttctcacagttttccatctccccacttctttgatcagtcatgtgtccgtgacctcgttccatgacatcaggatagctgtgtttgcacaccatgctgcatgttcatttggagccaggaggggttctcagtggagcctggcttagggaacagggagcgatggaagaatgccaacattagcgttggtcttctcttgtcaggaatgaaggatgcttgcacacatgcaccccctcactctcacacttgcacacatacacacacacacacacgaaatggttggtttgtcaaaactcactgtagtacataaagcttgcactctgcgtcctatatctagcagcatggggtacgtttggcagttcactccattagggggtaaataatttatgaccattcatctgtttttatgaatttttttatctagacaataattgtaaataaagaactcaccatctctgttcatttaaaaaaaaaatgcaa

SEQ ID NO: 313285 - DNA, 3260 bp, Homo sapiens
  misc_feature (509)..(509): n is a, c, g, or t
cataagccaggtccaagccacattctggacgccgtaccttgctagacagataaggcacctcctgctcccacttcccctgcagattcctggttctgacgactcctagggcaaggagtttgcactgttagggggagaaatgaagacaacaaaaagggaagaaagctggacttctcattagcgttttgatccgcgtcgtgaaggcgttccgtagctctctctatgaaggtttagaaaagcctgaatctcgaacctccatccataacttcatggctcatcctgaattccggatcgaagattcccagccccacatccccctcattgatgacaccgacctggaagaagatgccgcgctcaagcagaactcgagcccgccgtcatccctcaacaagaacaacagcgccatcgacagtgggatcaacctgacgaccgacacaagcaaatcagctacctcttcaagtccagggagccccatccacagcctggagacgtcgctttagctgaggaccctntcgcctgcccgcccgccctcatggaccccgctgtcacccgctttccgggcacccatccatccaggcacccaactcacccaagcagcaacgagcaacaatcggaaaccaaatactggagagaaaaccaacgtttccacccacagaccctttctctggctgcgatgctgtttgaactctttttcacttcaaggcaaggggcgggatctccactgggggcttacgggagtgagcggttttcccaaaacaagcccttcctggctcccacccagacatggaccagccatgcacccgcccagccaccacgtcccccgcatgaatgtactgtacactttcaatcctccccttgtttggtttttgggggttggggaggggtttttgtttgtttgtttgttttcttaggcgggaactgcaaacagactcttttctgagactatttatccaatccactggtctgtgagtttttgaaatgcttgcacagcatggtctcagttgtatagattaatttaataactttttgaaattgcagagcttaactcgcctagtagatttgcaccaatggaaccgaagaacttcatagacactcacaaggttatatccatttctttgtatctatatcaacgtatacttttccgagactgtatacgtccatatagataggtagatatatatatatatatataaatatatatacatggatatataaagtttctttgccggcatgttgccttgtttccgcttaaattgctctattttaacttatttatgtcctaaaagaagaatgtaatttgtttacaaacctgtagataacgtctttggctatttgtatggtttaagaacactggtggctgagatgctataaaaacagctcggcccaacagacacttcccctgggttgcatcctggatgttttatgatagccatgctctgatttttgcctgctatttccgttcaataatgtcactaccgtgagaggctcaggcagaagccaaatgctaccgagttgccatcctgaggggtttaacaacatgctccgtagacgaagggagaggaggagagaaggcttcctgggtttgcaacactaacggccatccggcccaaggatgccaggatctgcaaagcactgctcgaagacttttctctcaatgaaactcgcttgagtttactaagagcatttcaaaaataggttctctttggcactgtctgtacagagattgaggtagtgttgaaatattataaatggtattgtgttgatttttttttttatttagtaacttacaggtttgtttccttattaatggcagcatctgagctgttggcatattggatgaggatcagtatggcttgctgcttttatttttatttttgaagaagaatagcctttttctctgcactatttagatccgaatgaaccttatgatgtgtatattgagatgtactcagtgtgattttaaaccaaattgtcttcctgtagtcacaatatatactgtagccttttaacagcaagtcttgctttcccaaacagaaagccattctgaaaccctacagtatcacaggtgagaaaaggtggttattttttccccaagacaacagcactagtaatcccacttaataagagcttatttaattggatgtcagcctcttaactgctaagcactttgtgggtctcagcgtttttcataaaagaacttttgtatttaatacaaagtttgctttgagacttttcagcatatgatcttttttccataaacttgtacagtgcaaaagacattttgaataccatgatcgatgatgtcccatgcttcgaggaaaaccaaacactttccgcctctcttgcaaaatccattcctcatgctgaccctcctcacgatggctgtgtcagcccagccccttcccttctccaggcccagagaactcttccacaaacaagatgagagccactcgggaaaagagccatagtcaactgggagggcctacatctggatggcggtggaaaaacttgagggtttggggttcaaagtcagcccatcccacctggcaaaatcctcctggaaggaggaccttcaagagcgcatcacctgaatgtcgtgaagaagtatctctgaatgtatccaggagaggaactgcataaccaaaggggtgaccagccctcagatgtgcttattggattccagtacaaacgccaccaaagccagcccactgctctcctacaaggaaggaaagatctgcacgtgtaaaacatggggcagccttggaacatggtgttttttggagtttcctttctcacagttttccatctccccacttctttgatcagtcatgtgtccgtgacctcgttccatgacatcaggatagctgtgtttgcacaccatgctgcatgttcatttggagccaggaggggttctcagtggagcctggcttagggaacagggagcgatggaagaatgccaacattagcgttggtcttctcttgtcaggaatgaaggatgcttgcacacatgcaccccctcactctcacacttgcacacatacacacacacacacacgaaatggttggtttgtcaaaactcactgtagtacataaagcttgcactctgcgtcctatatctagcagcatggggtacgtttggcagttcactccattagggggtaaataatttatgaccattcatctgtttttatgaatttttttatctagacaataattgtaaataaagaactcaccatctctgttcatttaaaaaaaaaatgcaa

SEQ ID NO: 313286 - DNA, 5019 bp, Homo sapiens
  misc_feature (4320)..(4320): n is a, c, g, or t
gggcagccgcggcagaggagccgcagccgcagcggggccgggccgggccgggcgcgcaccagcggcagcggcagcggcagcggcggcggcagcatctcgctctcggagccggcgcaggtttccctgtacttagagcgtggactgtgaacccccaagcagacgagctgaacttcgtcacccagtccctagagccagcaagacatgggccccagtttccagaccctgacacctctcatttaaccagaagacgtggaggggagccaccacccctgaccatgtagatgccagttccagggagcagcatgggccccactgaatggagactcctgggtctacagccctgagcccctccggcccctggacctcgtcccacaccggaggacacctcttggagctcaccaccactgtcaccagcccgcctcggccacccccaccccccgggacccggagtcggccgcctggtgccacagctgaccagtgagggtgtgctgaggacagccacaagcagccatcacccggcagcctcttgtccagcgctgacccttgggcccagcccgagcaaggaccgcagcaaacatgggtgacatgaccaacagcgacttttactccaaaaaccaaagaaatgagtcgagccatgggggcgagttcgggtgcacaatggaggagctccgctccctcatggagctgcggggcactgaggctgtggtcaagatcaaggagacttatggggacaccgaagccatctgccggcgcctcaaaacctcacctgttgaaggtttgccgggcaccgctccagacctggaaaagagaaagcaaatttttgggcaaaactttatacctccaaagaagccaaaaaccttcctgcagctcgtgtgggaggcgctgcaggacgtgacgctcatcatcctggagattgccgccatcatctccctggggctgtccttctaccaccgccccggcgagggcaacgaaggatgtgcgacggcccagggtggggcagaggatgaaggagaggcagaggcaggttggatcgagggggccgccattctcctctcagttatctgtgtggtcctggtcacggccttcaatgactggagcaaagagaaacagttccggggcctgcagagccgcatcgagcaggaacagaaatttaccgtggtccgggctggccaggtggtccagatccctgtggctgagatcgtggttggggacatagcccaggtcaaatatggtgacctcctccctgccgacggactcttcatccagggcaatgacctcaagattgatgaaagctccctaactggagagtctgaccaggtgcgcaagtccgtggacaaggaccccatgctgctgtcaggaacccacgtgatggagggctcaggacggatgttggtgactgctgtgggtgtgaactctcagactggcatcatctttaccctcctgggggctggtggtgaagaggaagagaagaaagacaaaaaaggtgtgaagaagggggatggccttcagctaccagcagcagacggtgcggcagcttcaaacgctgcagatagtgcgaatgccagcctagtcaatggtaaaatgcaggatggcaatgtggacgccagccagagcaaagccaaacagcaggacggggcagccgccatggagatgcagcccctcaagagtgccgagggcggcgacgctgacgacaggaagaaggccagcatgcacaagaaggagaagtccgtgctgcagggcaagctcaccaagctggctgtgcagatcgggaaggcgggcttggtgatgtcagccatcacggtgatcatcctggtgctctacttcactgtggacaccttcgtggtcaacaagaagccgtggctgcctgagtgcacgcccgtctacgtgcagtactttgtcaagttcttcatcattggcgtgacggtgctggtggtcgccgtgcccgaggggctccctctggccgtcaccatctcgttggcctattcggtgaagaaaatgatgaaggacaacaacctggtacgccacctggatgcctgtgagaccatgggcaatgccacagccatctgctcagacaagacaggcacgctgaccaccaatcgcatgacagtggtacaggcctatgtcgacgacgtccactataaagagatccccgaccccagctccatcaacaccaagactatggagctgctgatcaatgccatcgccatcaacagcgcctacaccaccaagattctgcccccagagaaggagggcgccctgcctcggcaggtgggcaacaagacggagtgcggcctgctgggcttcgtgctggacctgaagcaggactacgagcccgtgcgcagccagatgccagaggagaagttgtacaaagtgtacaccttcaactccgtgcgcaagtccatgagcactgtcatcaagctgcccgacgagagcttccgcatgtacagcaagggggcttctgagatcgtgctcaagaagtgctgcaaaatcctcaatggggcgggagagcctcgtgtcttccggccccgcgaccgggacgagatggtaaagaaggtgattgagcccatggcttgcgatgggctccgcactatctgcgtggcctaccgcgacttccccagcagcccggagccggactgggacaatgagaatgacatcctcaacgaactcacctgcatctgcgtggtgggcatcgaggacccggtgcggccagaggtcccagaagccatccgcaagtgccagcgggcaggcatcacggtccgcatggtcactggcgacaatatcaacacggctcgggccatcgccatcaagtgtggcatcatccatcctggggaggactttctgtgcctcgagggcaaggagttcaacaggaggatccgcaacgagaagggggagattgagcaggagcgaattgacaagatctggccaaagctgcgggtgctggctcgctcctccccaacggacaagcataccctggttaaaggcatcatcgacagcacacacactgagcagcggcaggtggtggccgtgacgggggacgggaccaacgacgggcctgcactcaagaaggccgacgtgggcttcgccatgggcatcgcaggcactgacgtggccaaggaggcctcagacatcatcctgacagacgacaatttcagcagcatcgtcaaggcagtgatgtggggccgcaacgtctatgacagcatctccaaattcttgcagttccagctcaccgtcaacgtggtggccgtgattgtggccttcacaggcgcctgcatcacgcaggactcccctctgaaggccgtgcagatgctctgggtgaacctcatcatggacacgtttgcctcgctggcactggccactgagccgcccacggagaccctgctgctgaggaagccgtacggccgcaacaagccgctcatctccaggaccatgatgaagaacatcctgggccatgctgtctaccagcttgccctcatcttcaccctgctctttgttggcgagaagatgttccagatcgacagcgggaggaacgcgcccctgcattcgccaccctcagaacattacaccatcatcttcaacaccttcgtcatgatgcagctcttcaacgagatcaacgcccgcaagatccacggcgagcgcaatgtctttgacggcatcttccggaaccccatcttctgcaccatcgtgctgggcacctttgccatccagatagtgatcgtgcagtttggagggaagccattcagctgctctccactgcagctggaccagtggatgtggtgcatattcattgggttaggagagctcgtttggggccaggtcatcgccaccatcccgaccagcagactcaagttcctcaaggaggcaggcaggctcacacagaaggaggagatcccggaggaggagctcaacgaggacgtggaggagatcgaccacgcagagcgggagctgcggcggggccagatcctgtggttccgaggcctgaatcggatccagacacagatccgcgtcgtgaaggcgttccgtagctctctctatgaaggtttagaaaagcctgaatctcgaacctccatccataacttcatggctcatcctgaattccggatcgaagattcccagccccacatccccctcattgatgacaccgacctggaagaagatgccgcgctcaagcagaactcgagcccgccgtcatccctcaacaagaacaacagcgccatcgacagtgggatcaacctgacgaccgacacaagcaaatcagctacctcttcaagtccagggagccccatccacagcctggagacgtcgctttagctgaggaccctntcgcctgcccgcccgccctcatggaccccgctgtcacccgctttccgggcacccatccatccaggcacccaactcacccaagcagcaacgagcaacaatcggaaaccaaatactggagagaaaaccaacgtttccacccacagaccctttctctggctgcgatgctgtttgaactctttttcacttcaaggcaaggggcgggatctccactgggggcttacgggagtgagcggttttcccaaaacaagcccttcctggctcccacccagacatggaccagccatgcacccgcccagccaccacgtcccccgcatgaatgtactgtacactttcaatcctccccttgtttggtttttgggggttggggaggggtttttgtttgtttgtttgttttcttaggcgggaactgcaaacagactcttttctgagactatttatccaatccactggtctgtgagtttttgaaatgcttgcacagcatggtctcagttgtatagattaatttaataactttttgaaattgcagagcttaactcgcctagtagatttgcaccaatggaaccgaagaacttcatagacactcacaaggttatatccatttctttgtatctatatcaacgtatacttttccgagactgtatacgtccatatagataggtagatatatatatatatatataaatatatatacatggatat

SEQ ID NO: 313287 - DNA, 1127 bp, Homo sapiens
cacattgctttagcatcccttctgtcttttgacgtgggtctcagcgtttttcataaaagaacttttgtatttaatacaaagtttgctttgagacttttcagcatatgatcttttttccataaacttgtacagtgcaaaagacattttgaataccatgatcgatgatgtcccatgcttcgaggaaaaccaaacactttccgcctctcttgcaaaatccattcctcatgctgaccctcctcacgatggctgtgtcagcccagccccttcccttctccaggcccagagaactcttccacaaacaagatgagagccactcgggaaaagagccatagtcaactgggagggcctacatctggatggcggtggaaaaacttgagggtttggggttcaaagtcagcccatcccacctggcaaaatcctcctggaaggaggaccttcaagagcgcatcacctgaatgtcgtgaagaagtatctctgaatgtatccaggagaggaactgcataaccaaaggggtgaccagccctcagatgtgcttattggattccagtacaaacgccaccaaagccagcccactgctctcctacaaggaaggaaagatctgcacgtgtaaaacatggggcagccttggaacatggtgttttttggagtttcctttctcacagttttccatctccccacttctttgatcagtcatgtgtccgtgacctcgttccatgacatcaggatagctgtgtttgcacaccatgctgcatgttcatttggagccaggaggggttctcagtggagcctggcttagggaacagggagcgatggaagaatgccaacattagcgttggtcttctcttgtcaggaatgaaggatgcttgcacacatgcaccccctcactctcacacttgcacacatacacacacacacacacgaaatggttggtttgtcaaaactcactgtagtacataaagcttgcactctgcgtcctatatctagcagcatggggtacgtttggcagttcactccattagggggtaaataatttatgaccattcatctgtttttatgaatttttttatctagacaataattgtaaataaagaactcaccatctctgttcatttaaaaaaaaaatgcaa

SEQ ID NO: 313288 - DNA, 387 bp, Homo sapiens
agacaacaaaaagggaagaaagctggacttctcattagcgttttggtaactaatttagtgcaaccttgggttggcgagaaaatggcttgctttgtggggggaaccctagacctctccactgtctgaatattccatgtgtttgtttccctagagggctagagaaccctggacacagagttcagcaagagagagtgaaattaaaagaggttgtgagtctttaaccttgagcctgaaatgaatgtgaatcaatcccagactcttggcttccttgaagccgggtaaacattcgagtatgtagaacccatctcagaccagggcctgtgcgttttctcagagccctctgacaacgggcatgggtctccctgttccctttgtgctgacgaaacc

SEQ ID NO: 313289 - DNA, 6785 bp, Homo sapiens
  misc_feature (4034)..(4034): n is a, c, g, or t
gaattccccgctggctgggctcagccgcggcaccagctgccgcaccgcgattacggggctgcccgccgggaaaccgtgcaggattggtggtgattttcatagccaagagccaccacccctgaccatgtagatgccagttccagggagcagcatgggccccactgaatggagactcctgggtctacagccctgagcccctccggcccctggacctcgtcccacaccggaggacacctcttggagctcaccaccactgtcaccagcccgcctcggccacccccaccccccgggacccggagtcggccgcctggtgccacagctgaccagtgagggtgtgctgaggacagccacaagcagccatcacccggcagcctcttgtccagcgctgacccttgggcccagcccgagcaaggaccgcagcaaacatgggtgacatgaccaacagcgacttttactccaaaaaccaaagaaatgagtcgagccatgggggcgagttcgggtgcacaatggaggagctccgctccctcatggagctgcggggcactgaggctgtggtcaagatcaaggagacttatggggacaccgaagccatctgccggcgcctcaaaacctcacctgttgaaggtttgccgggcaccgctccagacctggaaaagagaaagcaaatttttgggcaaaactttatacctccaaagaagccaaaaaccttcctgcagctcgtgtgggaggcgctgcaggacgtgacgctcatcatcctggagattgccgccatcatctccctggggctgtccttctaccaccgccccggcgagggcaacgaaggatgtgcgacggcccagggtggggcagaggatgaaggagaggcagaggcaggttggatcgagggggccgccattctcctctcagttatctgtgtggtcctggtcacggccttcaatgactggagcaaagagaaacagttccggggcctgcagagccgcatcgagcaggaacagaaatttaccgtggtccgggctggccaggtggtccagatccctgtggctgagatcgtggttggggacatagcccaggtcaaatatggtgacctcctccctgccgacggactcttcatccagggcaatgacctcaagattgatgaaagctccctaactggagagtctgaccaggtgcgcaagtccgtggacaaggaccccatgctgctgtcaggaacccacgtgatggagggctcaggacggatgttggtgactgctgtgggtgtgaactctcagactggcatcatctttaccctcctgggggctggtggtgaagaggaagagaagaaagacaaaaaagccaaacagcaggacggggcagccgccatggagatgcagcccctcaagagtgccgagggcggcgacgctgacgacaggaagaaggccagcatgcacaagaaggagaagtccgtgctgcagggcaagctcaccaagctggctgtgcagatcgggaaggcgggcttggtgatgtcagccatcacggtgatcatcctggtgctctacttcactgtggacaccttcgtggtcaacaagaagccgtggctgcctgagtgcacgcccgtctacgtgcagtactttgtcaagttcttcatcattggcgtgacggtgctggtggtcgccgtgcccgaggggctccctctggccgtcaccatctcgttggcctattcggtgaagaaaatgatgaaggacaacaacctggtacgccacctggatgcctgtgagaccatgggcaatgccacagccatctgctcagacaagacaggcacgctgaccaccaatcgcatgacagtggtacaggcctatgtcgacgacgtccactataaagagatccccgaccccagctccatcaacaccaagactatggagctgctgatcaatgccatcgccatcaacagcgcctacaccaccaagattctgcccccagagaaggagggcgccctgcctcggcaggtgggcaacaagacggagtgcggcctgctgggcttcgtgctggacctgaagcaggactacgagcccgtgcgcagccagatgccagaggagaagttgtacaaagtgtacaccttcaactccgtgcgcaagtccatgagcactgtcatcaagctgcccgacgagagcttccgcatgtacagcaagggggcttctgagatcgtgctcaagaagtgctgcaaaatcctcaatggggcgggagagcctcgtgtcttccggccccgcgaccgggacgagatggtaaagaaggtgattgagcccatggcttgcgatgggctccgcactatctgcgtggcctaccgcgacttccccagcagcccggagccggactgggacaatgagaatgacatcctcaacgaactcacctgcatctgcgtggtgggcatcgaggacccggtgcggccagaggtcccagaagccatccgcaagtgccagcgggcaggcatcacggtccgcatggtcactggcgacaatatcaacacggctcgggccatcgccatcaagtgtggcatcatccatcctggggaggactttctgtgcctcgagggcaaggagttcaacaggaggatccgcaacgagaagggggagattgagcaggagcgaattgacaagatctggccaaagctgcgggtgctggctcgctcctccccaacggacaagcataccctggttaaaggcatcatcgacagcacacacactgagcagcggcaggtggtggccgtgacgggggacgggaccaacgacgggcctgcactcaagaaggccgacgtgggcttcgccatgggcatcgcaggcactgacgtggccaaggaggcctcagacatcatcctgacagacgacaatttcagcagcatcgtcaaggcagtgatgtggggccgcaacgtctatgacagcatctccaaattcttgcagttccagctcaccgtcaacgtggtggccgtgattgtggccttcacaggcgcctgcatcacgcaggactcccctctgaaggccgtgcagatgctctgggtgaacctcatcatggacacgtttgcctcgctggcactggccactgagccgcccacggagaccctgctgctgaggaagccgtacggccgcaacaagccgctcatctccaggaccatgatgaagaacatcctgggccatgctgtctaccagcttgccctcatcttcaccctgctctttgttggcgagaagatgttccagatcgacagcgggaggaacgcgcccctgcattcgccaccctcagaacattacaccatcatcttcaacaccttcgtcatgatgcagctcttcaacgagatcaacgcccgcaagatccacggcgagcgcaatgtctttgacggcatcttccggaaccccatcttctgcaccatcgtgctgggcacctttgccatccagatagtgatcgtgcagtttggagggaagccattcagctgctctccactgcagctggaccagtggatgtggtgcatattcattgggttaggagagctcgtttggggccaggtcatcgccaccatcccgaccagcagactcaagttcctcaaggaggcaggcaggctcacacagaaggaggagatcccggaggaggagctcaacgaggacgtggaggagatcgaccacgcagagcgggagctgcggcggggccagatcctgtggttccgaggcctgaatcggatccagacacagatccgcgtcgtgaaggcgttccgtagctctctctatgaaggtttagaaaagcctgaatctcgaacctccatccataacttcatggctcatcctgaattccggatcgaagattcccagccccacatccccctcattgatgacaccgacctggaagaagatgccgcgctcaagcagaactcgagcccgccgtcatccctcaacaagaacaacagcgccatcgacagtgggatcaacctgacgaccgacacaagcaaatcagctacctcttcaagtccagggagccccatccacagcctggagacgtcgctttagctgaggaccctntcgcctgcccgcccgccctcatggaccccgctgtcacccgctttccgggcacccatccatccaggcacccaactcacccaagcagcaacgagcaacaatcggaaaccaaatactggagagaaaaccaacgtttccacccacagaccctttctctggctgcgatgctgtttgaactctttttcacttcaaggcaaggggcgggatctccactgggggcttacgggagtgagcggttttcccaaaacaagcccttcctggctcccacccagacatggaccagccatgcacccgcccagccaccacgtcccccgcatgaatgtactgtacactttcaatcctccccttgtttggtttttgggggttggggaggggtttttgtttgtttgtttgttttcttaggcgggaactgcaaacagactcttttctgagactatttatccaatccactggtctgtgagtttttgaaatgcttgcacagcatggtctcagttgtatagattaatttaataactttttgaaattgcagagcttaactcgcctagtagatttgcaccaatggaaccgaagaacttcatagacactcacaaggttatatccatttctttgtatctatatcaacgtatacttttccgagactgtatacgtccatatagataggtagatatatatatatatatataaatatatatacatggatatataaagtttctttgccggcatgttgccttgtttccgcttaaattgctctattttaacttatttatgtcctaaaagaagaatgtaatttgtttacaaacctgtagataacgtctttggctatttgtatggtttaagaacactggtggctgagatgctataaaaacagctcggcccaacagacacttcccctgggttgcatcctggatgttttatgatagccatgctctgatttttgcctgctatttccgttcaataatgtcactaccgtgagaggctcaggcagaagccaaatgctaccgagttgccatcctgaggggtttaacaacatgctccgtagacgaagggagaggaggagagaaggcttcctgggtttgcaacactaacggccatccggcccaaggatgccaggatctgcaaagcactgctcgaagacttttctctcaatgaaactcgcttgagtttactaagagcatttcaaaaataggttctctttggcactgtctgtacagagattgaggtagtgttgaaatattataaatggtattgtgttgatttttttttttatttagtaacttacaggtttgtttccttattaatggcagcatctgagctgttggcatattggatgaggatcagtatggcttgctgcttttatttttatttttgaagaagaatagcctttttctctgcactatttagatccgaatgaaccttatgatgtgtatattgagatgtactcagtgtgattttaaaccaaattgtcttcctgtagtcacaatatatactgtagccttttaacagcaagtcttgctttcccaaacagaaagccattctgaaaccctacagtatcacaggtgagaaaaggtggttattttttccccaagacaacagcactagtaatcccacttaataagagcttatttaattggatgtcagcctcttaactgctaagcactttgtgggtctcagcgtttttcataaaagaacttttgtatttaatacaaagtttgctttgagacttttcagcatatgatcttttttccataaacttgtacagtgcaaaagacattttgaataccatgatcgatgatgtcccatgcttcgaggaaaaccaaacactttccgcctctcttgcaaaatccattcctcatgctgaccctcctcacgatggctgtgtcagcccagccccttcccttctccaggcccagagaactcttccacaaacaagatgagagccactcgggaaaagagccatagtcaactgggagggcctacatctggatggcggtggaaaaacttgagggtttggggttcaaagtcagcccatcccacctggcaaaatcctcctggaaggaggaccttcaagagcgcatcacctgaatgtcgtgaagaagtatctctgaatgtatccaggagaggaactgcataaccaaaggggtgaccagccctcagatgtgcttattggattccagtacaaacgccaccaaagccagcccactgctctcctacaaggaaggaaagatctgcacgtgtaaaacatggggcagccttggaacatggtgttttttggagtttcctttctcacagttttccatctccccacttctttgatcagtcatgtgtccgtgacctcgttccatgacatcaggatagctgtgtttgcacaccatgctgcatgttcatttggagccaggaggggttctcagtggagcctggcttagggaacagggagcgatggaagaatgccaacattagcgttggtcttctcttgtcaggaatgaaggatgcttgcacacatgcaccccctcactctcacacttgcacacatacacacacacacacacgaaatggttggtttgtcaaaactcactgtagtacataaagcttgcactctgcgtcctatatctagcagcatggggtacgtttggcagttcactccattagggggtaaataatttatgaccattcatctgtttttatgaatttttttatctagacaataattgtaaataaagaactcaccatctctgttcatttaaaaaaaaaatgcaa

SEQ ID NO: 313290 - DNA, 3148 bp, Homo sapiens
  misc_feature (397)..(397): n is a, c, g, or t
tgactcatagaggatccctgatgacggcgggacagatcctgtgttaccgaggctgaatcggatccagacacagatccgcgtcgtgaaggcgttccgtagctctctctatgaaggtttagaaaagcctgaatctcgaacctccatccataacttcatggctcatcctgaattccggatcgaagattcccagccccacatccccctcattgatgacaccgacctggaagaagatgccgcgctcaagcagaactcgagcccgccgtcatccctcaacaagaacaacagcgccatcgacagtgggatcaacctgacgaccgacacaagcaaatcagctacctcttcaagtccagggagccccatccacagcctggagacgtcgctttagctgaggaccctntcgcctgcccgcccgccctcatggaccccgctgtcacccgctttccgggcacccatccatccaggcacccaactcacccaagcagcaacgagcaacaatcggaaaccaaatactggagagaaaaccaacgtttccacccacagaccctttctctggctgcgatgctgtttgaactctttttcacttcaaggcaaggggcgggatctccactgggggcttacgggagtgagcggttttcccaaaacaagcccttcctggctcccacccagacatggaccagccatgcacccgcccagccaccacgtcccccgcatgaatgtactgtacactttcaatcctccccttgtttggtttttgggggttggggaggggtttttgtttgtttgtttgttttcttaggcgggaactgcaaacagactcttttctgagactatttatccaatccactggtctgtgagtttttgaaatgcttgcacagcatggtctcagttgtatagattaatttaataactttttgaaattgcagagcttaactcgcctagtagatttgcaccaatggaaccgaagaacttcatagacactcacaaggttatatccatttctttgtatctatatcaacgtatacttttccgagactgtatacgtccatatagataggtagatatatatatatatatataaatatatatacatggatatataaagtttctttgccggcatgttgccttgtttccgcttaaattgctctattttaacttatttatgtcctaaaagaagaatgtaatttgtttacaaacctgtagataacgtctttggctatttgtatggtttaagaacactggtggctgagatgctataaaaacagctcggcccaacagacacttcccctgggttgcatcctggatgttttatgatagccatgctctgatttttgcctgctatttccgttcaataatgtcactaccgtgagaggctcaggcagaagccaaatgctaccgagttgccatcctgaggggtttaacaacatgctccgtagacgaagggagaggaggagagaaggcttcctgggtttgcaacactaacggccatccggcccaaggatgccaggatctgcaaagcactgctcgaagacttttctctcaatgaaactcgcttgagtttactaagagcatttcaaaaataggttctctttggcactgtctgtacagagattgaggtagtgttgaaatattataaatggtattgtgttgatttttttttttatttagtaacttacaggtttgtttccttattaatggcagcatctgagctgttggcatattggatgaggatcagtatggcttgctgcttttatttttatttttgaagaagaatagcctttttctctgcactatttagatccgaatgaaccttatgatgtgtatattgagatgtactcagtgtgattttaaaccaaattgtcttcctgtagtcacaatatatactgtagccttttaacagcaagtcttgctttcccaaacagaaagccattctgaaaccctacagtatcacaggtgagaaaaggtggttattttttccccaagacaacagcactagtaatcccacttaataagagcttatttaattggatgtcagcctcttaactgctaagcactttgtgggtctcagcgtttttcataaaagaacttttgtatttaatacaaagtttgctttgagacttttcagcatatgatcttttttccataaacttgtacagtgcaaaagacattttgaataccatgatcgatgatgtcccatgcttcgaggaaaaccaaacactttccgcctctcttgcaaaatccattcctcatgctgaccctcctcacgatggctgtgtcagcccagccccttcccttctccaggcccagagaactcttccacaaacaagatgagagccactcgggaaaagagccatagtcaactgggagggcctacatctggatggcggtggaaaaacttgagggtttggggttcaaagtcagcccatcccacctggcaaaatcctcctggaaggaggaccttcaagagcgcatcacctgaatgtcgtgaagaagtatctctgaatgtatccaggagaggaactgcataaccaaaggggtgaccagccctcagatgtgcttattggattccagtacaaacgccaccaaagccagcccactgctctcctacaaggaaggaaagatctgcacgtgtaaaacatggggcagccttggaacatggtgttttttggagtttcctttctcacagttttccatctccccacttctttgatcagtcatgtgtccgtgacctcgttccatgacatcaggatagctgtgtttgcacaccatgctgcatgttcatttggagccaggaggggttctcagtggagcctggcttagggaacagggagcgatggaagaatgccaacattagcgttggtcttctcttgtcaggaatgaaggatgcttgcacacatgcaccccctcactctcacacttgcacacatacacacacacacacacgaaatggttggtttgtcaaaactcactgtagtacataaagcttgcactctgcgtcctatatctagcagcatggggtacgtttggcagttcactccattagggggtaaataatttatgaccattcatctgtttttatgaatttttttatctagacaataattgtaaataaagaactcaccatctctgttcatttaaaaaaaaaatgcaa

SEQ ID NO: 313291 - DNA, 735 bp, Homo sapiens
ggctactacagtagagacgagacagcagtggcctcaccaaggaggtagaaaacaggcgagaagaggttatattaggaatatgttttggcagagccaacaccattagctgatcaagcagatgtgcgttgtgacagaaggaaaggagtcaaggatgacactaagatctgtgcccggagacactggcccagtggcggtgccgcttcctgagaggaggaggagtggcaggaggagactccgtggggggaatcagagttctgttctggccaattacagctgagatgtctgcttgtagagacggtaattaaagccacaaggtggaacaagatatccatggaagcaggtattggataaacaagagaagaaaccaatggactcagaatcccagctccaaacttaacacagtgacctcaggcaagcatctctgagttttagattgctcacctgtaaaataggaaaaccaccataaatacgagtgtgcaatgagacaactagcagataggaagtgttgcccaaatattggcaaaagtagaactagatattacttctctaacacagctctgtgactgaaacacagttaaaacaaaagggaaatgatgaactaataaaacaaaaacaaaccagatgatcccaagtgacctccctgcaccaggggagcacagggcccctgtcaaacaggacagcagctggccaaagccttgggaaggcggctgacggaagctaacagagccacagcct

SEQ ID NO: 313292 - DNA, 928 bp, Homo sapiens
ctgaagcctaggggagccagtaaagattaaatgtgcttctcaaaggcagccacttcatgctgctatgtcgaaagggccattattattattatattttaatggtaaaagagaaaaggagagaggttgagcgagcgagagagaagctaggtgtgatgatgacagactagcttttctgagaggaaaaggaaaagggaagggagagaaaaaggagagcctctgagctcaacggaggattgtgcctgagaagaacccacagagtggatgctgtggggcaccacctccttgaggaccaaggcactccagctgccaggaatttggctgctaacctcacacagctgagccttccatgaaaattgctctctgccaaagagaacttcctagtccaaggtcatgtctactctccagagatgtgactggagtgatttgcacccggatgcctagactcgccatctgctcaaagactgctcagaaagccctcccatgcattcccctgctgcataccagcccactctgcctgcagctgctgtctgcaggacttcatatctatgccacactgtgtaaaagctgtgcttcaagaaatcacaaaaacattttcctgcacctactacacagcctgagtgcggcataagttgaccttgcttgctaagaaatggggcaagaaatgcttttttgtgtgtgtcatgtctgtttgtttttcaattaagagaggaaagcattaggcagatggaatgtacatgtgaggatgaggagacagaaaacaagtagccctttccatcaagatagagggttttctggggttgctggctattgaatgtcactcctgatttctctttccaaggcactgtaccaccagcctactgagattgtgtgggagctttcatgggggttgtatttcactgatgaaaataaattttttgcataatgtgaa

SEQ ID NO: 313293 - DNA, 281 bp, Homo sapiens
gagtagcattgctggatgtgcctcttttgttgaggtgattggatctttgggcaaaaaccagtgactgcaaaggatgagagaaacgatcagaaaaactgaaaagctgtaggagaccaaacactagtgtctcccctgcttcaggggacacccactgtcagagtgaacgacaaaggttagatttgaacaagcttgcttgcttgctttctttctttctttctttttctttctttctttctttctttctttctttctttctttctttctttctgtttctctttctt

SEQ ID NO: 313294 - DNA, 2800 bp, Homo sapiens
agtctcgagatttggtgtatcgcttcctgcccccgcctcccctccccgcccccgttctccgtcctctattgaaacacctcgcccagcctagcgcactgagagctctcattttccccccttgctcgggatggtgccacaggaggctgtgcgggccccgctccgcttcgaatggctggtcctatagtacccctcctcaggaatgtctccccagtgcaaggacaaagactgaagagactgctatattgatggactctcaagccaactatgaagttgaaacaaagaaagtgatcacctgaagacacctcctctgctaagaaacacccccaaattgtgcagcttctgccactagaactctcagaacaagagacaatcttttcaagaaacagaaaaactcaataatgacatctagattttcatgagccaagaactttcccttcctcatgtgtattcctctgtttgtacttaaattcatgtgacattcatttttttcctagtatggatatgcttattaatgcacttgtttcaaaatcccaaattgcacaaatgtgttaatattttaagaaacaaaatgaatcctacaaggagaatgatttttagccacacatagggttggatcttgagagtgacctacagaataaaagtacttttaaaataaagtagtcagaggctattcaaagggtaaaataatcatagtaccacattggtccacttgacactaaccaatcgatcatttttttttaatcaagaaagctagattctatcagataaaatcactgcttctaaagagtttaaatctagttagaaaaagttatagaaatgtttgcaaagataagtaacagatagagtcagtagaggataagatcaaaaacaaaaccaagcaaaagatgagttcaggggagtttgccatcaagttggcaaaactgacttacttagggaagaaagttataaaacaggaaaatatgagatgaaccttgagtgatgtggaagatttagataaatggaaaggaaggagaaaatggagttctttaggtggttgtaattggaggaggaaatgaatacacacatcttgttgacttaaacccagacattcagcagctctctatacatatctggaaaagactgcacagtcacctcctgtctctcaccccaggtattacttagaattattatcatatttcccttcctttaaagtaagtaagggtgattggtgacaatatggagaactatgatttttccattaacctaataataattggtatttattgagttctgttaagcattttacatattaactcacttaagcctttcaacagccttgcaaaataggtattattatccccattttacaggcaagaaaactgaggtttaagtaacttgccgaagtgccatatacagggctcacattcagtattgcagttgcaaagctcatgatctatagtgccaagttgcaatattgtagtcaatgtcacaattattacccctttttatattccttgatatttttccatggcaaacaattagctatttcatttaataatcacctaaaacttttcagtcttctgattaaaattacgctggagtgatagaatgtattttcatgatagaaattgggaaaaaaaatggggaatgaagtttatcagcatttcagacttgtttttttttttttttttttgcaagactttgatgagattgttcacttttgtctatgtaaaatcccaaatccttgagaataaaaaagggggaggtttaagtcacttgttgcaatgccctttttaatagaggcaataaatctaaaggccataaatttagagtgacttacagaagatcgaactttggagtgtggcagagtaagggatggaaaccgggccctccagttcactatcagtagcttttgcactggtctgcccttcctaaattaagtatgcacttcaatttgatgagtggaaacagtctatctgggcagtaaccagggagctttgtgcctagtagattgcttctgttctgcacttctttggtttcccacctcaatgtaaaaaatagctagcaatgaagtccagaagttgtcaatggttcatccccagaagaatgcataatgtccaaagttgtatgtgtatgatgtcttcaatggtattaagttatttcaaattcttagttcacctacataaatcatttctaacaagcatcttcttaaccaactttatgcacagtgtatgtttgtaagtgcttctgcacgaatgtttatacatgactgtttccatagtacttatgtttttaaaaatattcagtcatttcctactataatcctcatgtatccatgtaactgactcaaaaatacttcagccacagaaagctaaaactgagcaaatctcattcttcttttccatcccctttgcatgtggctggcatttagtaatgattaataatatggccagctgaataacagaggtttgagacacaattctttctcaaaggagtcagctaagctgggtctacttatggacaaacatctaaatgtgtggaagtatctgatatttgacaatggtaaatttccacttagctagctagcattgtcagacttcaatctcctcatggctctggccgtcctgttttaagcatgataattgttggccacatctcacatagttctcattgagtgagttcataaataaacagggtttttttttttttttaaagagcagccaagcacaaagtgtgactttgttgacattttatgtgactttgtcatatgttcctaacccccaataaaagcaatgttgcatcaactgtgaaaaaaaaatga

SEQ ID NO: 313295 - DNA, 2940 bp, Homo sapiens
ctgaagcctaggggagccagtaaagattaaatgtgcttctcaaaggcagccacttcatgctgctatgtcgaaagggccattattattattatattttaatggtaaaagagaaaaggagagaggttgagcgagcgagagagaagctaggtgtgatgatgacagactagcttttctgagaggaaaaggaaaagggaagggagagaaaaaggagagcctctgagctcaacggaggattgtgcctgagaagaacccacagaggaggctgtgcgggccccgctccgcttcgaatggttgtgttgatgttcctttcagctggtcctatagtacccctcctcaggaatgtctccccagtgcaaggacaaagactgaagagactgctatattgatggactctcaagccaactatgaagttgaaacaaagaaagtgatcacctgaagacacctcctctgctaagaaacacccccaaattgtgcagcttctgccactagaactctcagaacaagagacaatcttttcaagaaacagaaaaactcaataatgacatctagattttcatgagccaagaactttcccttcctcatgtgtattcctctgtttgtacttaaattcatgtgacattcatttttttcctagtatggatatgcttattaatgcacttgtttcaaaatcccaaattgcacaaatgtgttaatattttaagaaacaaaatgaatcctacaaggagaatgatttttagccacacatagggttggatcttgagagtgacctacagaataaaagtacttttaaaataaagtagtcagaggctattcaaagggtaaaataatcatagtaccacattggtccacttgacactaaccaatcgatcatttttttttaatcaagaaagctagattctatcagataaaatcactgcttctaaagagtttaaatctagttagaaaaagttatagaaatgtttgcaaagataagtaacagatagagtcagtagaggataagatcaaaaacaaaaccaagcaaaagatgagttcaggggagtttgccatcaagttggcaaaactgacttacttagggaagaaagttataaaacaggaaaatatgagatgaaccttgagtgatgtggaagatttagataaatggaaaggaaggagaaaatggagttctttaggtggttgtaattggaggaggaaatgaatacacacatcttgttgacttaaacccagacattcagcagctctctatacatatctggaaaagactgcacagtcacctcctgtctctcaccccaggtattacttagaattattatcatatttcccttcctttaaagtaagtaagggtgattggtgacaatatggagaactatgatttttccattaacctaataataattggtatttattgagttctgttaagcattttacatattaactcacttaagcctttcaacagccttgcaaaataggtattattatccccattttacaggcaagaaaactgaggtttaagtaacttgccgaagtgccatatacagggctcacattcagtattgcagttgcaaagctcatgatctatagtgccaagttgcaatattgtagtcaatgtcacaattattacccctttttatattccttgatatttttccatggcaaacaattagctatttcatttaataatcacctaaaacttttcagtcttctgattaaaattacgctggagtgatagaatgtattttcatgatagaaattgggaaaaaaaatggggaatgaagtttatcagcatttcagacttgtttttttttttttttttttgcaagactttgatgagattgttcacttttgtctatgtaaaatcccaaatccttgagaataaaaaagggggaggtttaagtcacttgttgcaatgccctttttaatagaggcaataaatctaaaggccataaatttagagtgacttacagaagatcgaactttggagtgtggcagagtaagggatggaaaccgggccctccagttcactatcagtagcttttgcactggtctgcccttcctaaattaagtatgcacttcaatttgatgagtggaaacagtctatctgggcagtaaccagggagctttgtgcctagtagattgcttctgttctgcacttctttggtttcccacctcaatgtaaaaaatagctagcaatgaagtccagaagttgtcaatggttcatccccagaagaatgcataatgtccaaagttgtatgtgtatgatgtcttcaatggtattaagttatttcaaattcttagttcacctacataaatcatttctaacaagcatcttcttaaccaactttatgcacagtgtatgtttgtaagtgcttctgcacgaatgtttatacatgactgtttccatagtacttatgtttttaaaaatattcagtcatttcctactataatcctcatgtatccatgtaactgactcaaaaatacttcagccacagaaagctaaaactgagcaaatctcattcttcttttccatcccctttgcatgtggctggcatttagtaatgattaataatatggccagctgaataacagaggtttgagacacaattctttctcaaaggagtcagctaagctgggtctacttatggacaaacatctaaatgtgtggaagtatctgatatttgacaatggtaaatttccacttagctagctagcattgtcagacttcaatctcctcatggctctggccgtcctgttttaagcatgataattgttggccacatctcacatagttctcattgagtgagttcataaataaacagggtttttttttttttttaaagagcagccaagcacaaagtgtgactttgttgacattttatgtgactttgtcatatgttcctaacccccaataaaagcaatgttgcatcaactgtgaaaaaaaaatga

SEQ ID NO: 313296 - DNA, 2903 bp, Homo sapiens
gagtagcattgctggatgtgcctcttttgttgaggtgattggatctttgggcaaaaaccagtgactgcaaaggatgagagaaacgatcagaaaaactgaaaagctgtaggagaccaaacactagtgtctcccctgcttcaggggacacccactgtcagagtgaacgacaaagacgcgtgtggatgatttgaagatattagcctaacaagatggaagcaggtttaaaattttacataagaagttacctttttcagttgtgttgatgttcctttcagctggtcctatagtacccctcctcaggaatgtctccccagtgcaaggacaaagactgaagagactgctatattgatggactctcaagccaactatgaagttgaaacaaagaaagtgatcacctgaagacacctcctctgctaagaaacacccccaaattgtgcagcttctgccactagaactctcagaacaagagacaatcttttcaagaaacagaaaaactcaataatgacatctagattttcatgagccaagaactttcccttcctcatgtgtattcctctgtttgtacttaaattcatgtgacattcatttttttcctagtatggatatgcttattaatgcacttgtttcaaaatcccaaattgcacaaatgtgttaatattttaagaaacaaaatgaatcctacaaggagaatgatttttagccacacatagggttggatcttgagagtgacctacagaataaaagtacttttaaaataaagtagtcagaggctattcaaagggtaaaataatcatagtaccacattggtccacttgacactaaccaatcgatcatttttttttaatcaagaaagctagattctatcagataaaatcactgcttctaaagagtttaaatctagttagaaaaagttatagaaatgtttgcaaagataagtaacagatagagtcagtagaggataagatcaaaaacaaaaccaagcaaaagatgagttcaggggagtttgccatcaagttggcaaaactgacttacttagggaagaaagttataaaacaggaaaatatgagatgaaccttgagtgatgtggaagatttagataaatggaaaggaaggagaaaatggagttctttaggtggttgtaattggaggaggaaatgaatacacacatcttgttgacttaaacccagacattcagcagctctctatacatatctggaaaagactgcacagtcacctcctgtctctcaccccaggtattacttagaattattatcatatttcccttcctttaaagtaagtaagggtgattggtgacaatatggagaactatgatttttccattaacctaataataattggtatttattgagttctgttaagcattttacatattaactcacttaagcctttcaacagccttgcaaaataggtattattatccccattttacaggcaagaaaactgaggtttaagtaacttgccgaagtgccatatacagggctcacattcagtattgcagttgcaaagctcatgatctatagtgccaagttgcaatattgtagtcaatgtcacaattattacccctttttatattccttgatatttttccatggcaaacaattagctatttcatttaataatcacctaaaacttttcagtcttctgattaaaattacgctggagtgatagaatgtattttcatgatagaaattgggaaaaaaaatggggaatgaagtttatcagcatttcagacttgtttttttttttttttttttgcaagactttgatgagattgttcacttttgtctatgtaaaatcccaaatccttgagaataaaaaagggggaggtttaagtcacttgttgcaatgccctttttaatagaggcaataaatctaaaggccataaatttagagtgacttacagaagatcgaactttggagtgtggcagagtaagggatggaaaccgggccctccagttcactatcagtagcttttgcactggtctgcccttcctaaattaagtatgcacttcaatttgatgagtggaaacagtctatctgggcagtaaccagggagctttgtgcctagtagattgcttctgttctgcacttctttggtttcccacctcaatgtaaaaaatagctagcaatgaagtccagaagttgtcaatggttcatccccagaagaatgcataatgtccaaagttgtatgtgtatgatgtcttcaatggtattaagttatttcaaattcttagttcacctacataaatcatttctaacaagcatcttcttaaccaactttatgcacagtgtatgtttgtaagtgcttctgcacgaatgtttatacatgactgtttccatagtacttatgtttttaaaaatattcagtcatttcctactataatcctcatgtatccatgtaactgactcaaaaatacttcagccacagaaagctaaaactgagcaaatctcattcttcttttccatcccctttgcatgtggctggcatttagtaatgattaataatatggccagctgaataacagaggtttgagacacaattctttctcaaaggagtcagctaagctgggtctacttatggacaaacatctaaatgtgtggaagtatctgatatttgacaatggtaaatttccacttagctagctagcattgtcagacttcaatctcctcatggctctggccgtcctgttttaagcatgataattgttggccacatctcacatagttctcattgagtgagttcataaataaacagggtttttttttttttttaaagagcagccaagcacaaagtgtgactttgttgacattttatgtgactttgtcatatgttcctaacccccaataaaagcaatgttgcatcaactgtgaaaaaaaaatga

SEQ ID NO: 313297 - DNA, 2886 bp, Homo sapiens
ctgaagcctaggggagccagtaaagattaaatgtgcttctcaaaggcagccacttcatgctgctatgtcgaaagggccattattattattatattttaatggtaaaagagaaaaggagagaggttgagcgagcgagagagaagctaggtgtgatgatgacagactagcttttctgagaggaaaaggaaaagggaagggagagaaaaaggagagcctctgagctcaacggaggattgtgcctgagaagaacccacagagctggtcctatagtacccctcctcaggaatgtctccccagtgcaaggacaaagactgaagagactgctatattgatggactctcaagccaactatgaagttgaaacaaagaaagtgatcacctgaagacacctcctctgctaagaaacacccccaaattgtgcagcttctgccactagaactctcagaacaagagacaatcttttcaagaaacagaaaaactcaataatgacatctagattttcatgagccaagaactttcccttcctcatgtgtattcctctgtttgtacttaaattcatgtgacattcatttttttcctagtatggatatgcttattaatgcacttgtttcaaaatcccaaattgcacaaatgtgttaatattttaagaaacaaaatgaatcctacaaggagaatgatttttagccacacatagggttggatcttgagagtgacctacagaataaaagtacttttaaaataaagtagtcagaggctattcaaagggtaaaataatcatagtaccacattggtccacttgacactaaccaatcgatcatttttttttaatcaagaaagctagattctatcagataaaatcactgcttctaaagagtttaaatctagttagaaaaagttatagaaatgtttgcaaagataagtaacagatagagtcagtagaggataagatcaaaaacaaaaccaagcaaaagatgagttcaggggagtttgccatcaagttggcaaaactgacttacttagggaagaaagttataaaacaggaaaatatgagatgaaccttgagtgatgtggaagatttagataaatggaaaggaaggagaaaatggagttctttaggtggttgtaattggaggaggaaatgaatacacacatcttgttgacttaaacccagacattcagcagctctctatacatatctggaaaagactgcacagtcacctcctgtctctcaccccaggtattacttagaattattatcatatttcccttcctttaaagtaagtaagggtgattggtgacaatatggagaactatgatttttccattaacctaataataattggtatttattgagttctgttaagcattttacatattaactcacttaagcctttcaacagccttgcaaaataggtattattatccccattttacaggcaagaaaactgaggtttaagtaacttgccgaagtgccatatacagggctcacattcagtattgcagttgcaaagctcatgatctatagtgccaagttgcaatattgtagtcaatgtcacaattattacccctttttatattccttgatatttttccatggcaaacaattagctatttcatttaataatcacctaaaacttttcagtcttctgattaaaattacgctggagtgatagaatgtattttcatgatagaaattgggaaaaaaaatggggaatgaagtttatcagcatttcagacttgtttttttttttttttttttgcaagactttgatgagattgttcacttttgtctatgtaaaatcccaaatccttgagaataaaaaagggggaggtttaagtcacttgttgcaatgccctttttaatagaggcaataaatctaaaggccataaatttagagtgacttacagaagatcgaactttggagtgtggcagagtaagggatggaaaccgggccctccagttcactatcagtagcttttgcactggtctgcccttcctaaattaagtatgcacttcaatttgatgagtggaaacagtctatctgggcagtaaccagggagctttgtgcctagtagattgcttctgttctgcacttctttggtttcccacctcaatgtaaaaaatagctagcaatgaagtccagaagttgtcaatggttcatccccagaagaatgcataatgtccaaagttgtatgtgtatgatgtcttcaatggtattaagttatttcaaattcttagttcacctacataaatcatttctaacaagcatcttcttaaccaactttatgcacagtgtatgtttgtaagtgcttctgcacgaatgtttatacatgactgtttccatagtacttatgtttttaaaaatattcagtcatttcctactataatcctcatgtatccatgtaactgactcaaaaatacttcagccacagaaagctaaaactgagcaaatctcattcttcttttccatcccctttgcatgtggctggcatttagtaatgattaataatatggccagctgaataacagaggtttgagacacaattctttctcaaaggagtcagctaagctgggtctacttatggacaaacatctaaatgtgtggaagtatctgatatttgacaatggtaaatttccacttagctagctagcattgtcagacttcaatctcctcatggctctggccgtcctgttttaagcatgataattgttggccacatctcacatagttctcattgagtgagttcataaataaacagggtttttttttttttttaaagagcagccaagcacaaagtgtgactttgttgacattttatgtgactttgtcatatgttcctaacccccaataaaagcaatgttgcatcaactgtgaaaaaaaaatga

SEQ ID NO: 313298 - DNA, 1122 bp, Homo sapiens
ctgaagcctaggggagccagtaaagattaaatgtgcttctcaaaggcagccacttcatgctgctatgtcgaaagggccattattattattatattttaatggtaaaagagaaaaggagagaggttgagcgagcgagagagaagctaggtgtgatgatgacagactagcttttctgagaggaaaaggaaaagggaagggagagaaaaaggagagcctctgagctcaacggaggattgtgcctgagaagaacccacagagtggatgctgtggggcaccacctccttgaggaccaaggcactccagctgccaggaatttggctgctaacctcacacagctgagccttccatgaaaattgctctctgccaaagagaacttcctagtccaaggtcatgtctactctccagagatgtgactggagtgatttgcacccggatgcctagactcgccatctgctcaaagactgctcagaaagccctcccatgcattcccctgctgcataccagcccactctgcctgcagctgctgtctgcaggacttcatatctatgccacactgtgtaaaagctgtgcttcaagaaatcacaaaaacattttcctgcacctactacacagcctgagtgcggcataagttgaccttgcttgctaagaaatggggcaagaaatgcttttttgtgtgtgtcatgtctgtttgtttttcaattaagagaggaaagcattaggcagatggaatgtacatgtgaggatgaggagacagaaaacaagtagccctttccatcaagatagagggttttctggggttgctggctattgaatgtcactcctgatttctctttccaaggcactgtaccaccagcctactgagattgtgtgggagctttcatgggggttgtatttcactgatgaaaataaattttttgcataatgtgaaaaaaaaaaaagaggcctcttggcctaccggggcttgcggcgtcccttagggggtaataataaccccccatgcccttgcctggcgtcggtgggggcggatcgtcctcaggcggattcggttcccaatcagggtcccccggaacactggacaaagctccaggccgacctaaagccggttggctttcaacgcgccct

SEQ ID NO: 313299 - DNA, 404 bp, Homo sapiens
ccaactgcccttttttctctcgtcaaagcataagctacagagttacagtctcgagatttggtgtatcgcttcctgcccccgcctcccctccccgcccccgttctccgtcctctattgaaacacctcgcccagcctagcgcactgagagctctcattttccccccttgctcgggatggtgccacaggaggctgtgcgggccccgctccgcttcgaatgggtgagttcagaacgctattcgtctttacacttctatagcctccgaatcctacttcttggtcttctcctttgaaaacccgatttctatgatttttgcatgcggcatacttgccctgggggaaagagatgcctcctattttctcttcagtcatttgtgctagtcgtaaattaaagctttgaaaagaca

SEQ ID NO: 313300 - DNA, 2821 bp, Homo sapiens
agtctcgagatttggtgtatcgcttcctgcccccgcctcccctccccgcccccgttctccgtcctctattgaaacacctcgcccagcctagcgcactgagagctctcattttccccccttgctcgggatggtgccacaggaggctgtgcgggccccgctccgcttcgaatggttgtgttgatgttcctttcagctggtcctatagtacccctcctcaggaatgtctccccagtgcaaggacaaagactgaagagactgctatattgatggactctcaagccaactatgaagttgaaacaaagaaagtgatcacctgaagacacctcctctgctaagaaacacccccaaattgtgcagcttctgccactagaactctcagaacaagagacaatcttttcaagaaacagaaaaactcaataatgacatctagattttcatgagccaagaactttcccttcctcatgtgtattcctctgtttgtacttaaattcatgtgacattcatttttttcctagtatggatatgcttattaatgcacttgtttcaaaatcccaaattgcacaaatgtgttaatattttaagaaacaaaatgaatcctacaaggagaatgatttttagccacacatagggttggatcttgagagtgacctacagaataaaagtacttttaaaataaagtagtcagaggctattcaaagggtaaaataatcatagtaccacattggtccacttgacactaaccaatcgatcatttttttttaatcaagaaagctagattctatcagataaaatcactgcttctaaagagtttaaatctagttagaaaaagttatagaaatgtttgcaaagataagtaacagatagagtcagtagaggataagatcaaaaacaaaaccaagcaaaagatgagttcaggggagtttgccatcaagttggcaaaactgacttacttagggaagaaagttataaaacaggaaaatatgagatgaaccttgagtgatgtggaagatttagataaatggaaaggaaggagaaaatggagttctttaggtggttgtaattggaggaggaaatgaatacacacatcttgttgacttaaacccagacattcagcagctctctatacatatctggaaaagactgcacagtcacctcctgtctctcaccccaggtattacttagaattattatcatatttcccttcctttaaagtaagtaagggtgattggtgacaatatggagaactatgatttttccattaacctaataataattggtatttattgagttctgttaagcattttacatattaactcacttaagcctttcaacagccttgcaaaataggtattattatccccattttacaggcaagaaaactgaggtttaagtaacttgccgaagtgccatatacagggctcacattcagtattgcagttgcaaagctcatgatctatagtgccaagttgcaatattgtagtcaatgtcacaattattacccctttttatattccttgatatttttccatggcaaacaattagctatttcatttaataatcacctaaaacttttcagtcttctgattaaaattacgctggagtgatagaatgtattttcatgatagaaattgggaaaaaaaatggggaatgaagtttatcagcatttcagacttgtttttttttttttttttttgcaagactttgatgagattgttcacttttgtctatgtaaaatcccaaatccttgagaataaaaaagggggaggtttaagtcacttgttgcaatgccctttttaatagaggcaataaatctaaaggccataaatttagagtgacttacagaagatcgaactttggagtgtggcagagtaagggatggaaaccgggccctccagttcactatcagtagcttttgcactggtctgcccttcctaaattaagtatgcacttcaatttgatgagtggaaacagtctatctgggcagtaaccagggagctttgtgcctagtagattgcttctgttctgcacttctttggtttcccacctcaatgtaaaaaatagctagcaatgaagtccagaagttgtcaatggttcatccccagaagaatgcataatgtccaaagttgtatgtgtatgatgtcttcaatggtattaagttatttcaaattcttagttcacctacataaatcatttctaacaagcatcttcttaaccaactttatgcacagtgtatgtttgtaagtgcttctgcacgaatgtttatacatgactgtttccatagtacttatgtttttaaaaatattcagtcatttcctactataatcctcatgtatccatgtaactgactcaaaaatacttcagccacagaaagctaaaactgagcaaatctcattcttcttttccatcccctttgcatgtggctggcatttagtaatgattaataatatggccagctgaataacagaggtttgagacacaattctttctcaaaggagtcagctaagctgggtctacttatggacaaacatctaaatgtgtggaagtatctgatatttgacaatggtaaatttccacttagctagctagcattgtcagacttcaatctcctcatggctctggccgtcctgttttaagcatgataattgttggccacatctcacatagttctcattgagtgagttcataaataaacagggtttttttttttttttaaagagcagccaagcacaaagtgtgactttgttgacattttatgtgactttgtcatatgttcctaacccccaataaaagcaatgttgcatcaactgtgaaaaaaaaatga

SEQ ID NO: 313301 - DNA, 2055 bp, Homo sapiens
agggggccgcggggagggaggcgggaagagcgcggcacttccgctggccgctggctcgctggccgctcctggaggcggcggcgggagcgcagggggcgcgcggcccggggactcgcattccccggttccccctccaccccacgcggcctggaccatggacgccagatggtgggcagtggtggtgctggctgcgttcccctccctaggggcaggtggggagactcccgaagcccctccggagtcatggacccagctatggttcttccgatttgtggtgaatgctgctggctatgccagctttatggtacctggctacctcctggtgcagtacttcaggcggaagaactacctggagaccggtaggggcctctgctttcccctggtgaaagcttgtgtgtttggcaatgagcccaaggcctctgatgaggttcccctggcgccccgaacagaggcggcagagaccaccccgatgtggcaggccctgaagctgctcttctgtgccacagggctccaggtgtcttatctgacttggggtgtgctgcaggaaagagtgatgacccgcagctatggggccacagccacatcaccgggtgagcgctttacggactcgcagttcctggtgctaatgaaccgagtgctggcactgattgtggctggcctctcctgtgttctctgcaagcagccccggcatggggcacccatgtaccggtactcctttgccagcctgtccaatgtgcttagcagctggtgccaatacgaagctcttaagttcgtcagcttccccacccaggtgctggccaaggcctctaaggtgatccctgtcatgctgatgggaaagcttgtgtctcggcgcagctacgaacactgggagtacctgacagccaccctcatctccattggggtcagcatgtttctgctatccagcggaccagagccccgcagctccccagccaccacactctcaggcctcatcttactggcaggttatattgcttttgacagcttcacctcaaactggcaggatgccctgtttgcctataagatgtcatcggtgcagatgatgtttggggtcaatttcttctcctgcctcttcacagtgggctcactgctagaacagggggccctactggagggaacccgcttcatggggcgacacagtgagtttgctgcccatgccctgctactctccatctgctccgcatgtggccagctcttcatcttttacaccattgggcagtttggggctgccgtcttcaccatcatcatgaccctccgccaggcctttgccatccttctttcctgccttctctatggccacactgtcactgtggtgggagggctgggggtggctgtggtctttgctgccctcctgctcagagtctacgcgcggggccgtctaaagcaacggggaaagaaggctgtgcctgttgagtctcctgtgcagaaggtttgagggtggaaagggcctgaggggtgaagtgaaataggaccctcccaccatccccttctgctgtaacctctgagggagctggctgaaagggcaaaatgcaggtgttttctcagtatcacagaccagctctgcagcaggggattggggagcccaggaggcagccttcccttttgccttaagtcacccatcttccagtaagcagtttattctgagccccgggggtagacagtcctcagtgaggggttttggggagtttggggtcaagagagcataggtaggttccacagttactcttcccacaagttcccttaagtcttgccctagctgtgctctgccaccttccagactcactcccctctgcaaatacctgcatttcttaccctggtgagaaaagcacaagcggtgtaggctccaatgctgctttcccaggagggtgaagatggtgctgtgctgaggaaaggggatgcagagccctgcccagcaccaccacctcctatgctcctggatccctaggctctgttccatgagcctgttgcaggttttggtactttagaaatgtaactttttgctcttataattttattttattaaattaaattactgca

SEQ ID NO: 313302 - DNA, 1978 bp, Homo sapiens
agcggagtggctgaaagggcaaaatgcaggtgttttctcagtatcacagaccagctctgcagcaggggattggggagcccaggaggcagccttccgttttgccttaagtcacccatcttccagtaagcagtttattctgagccccgggggtagacagtccggagtcatggacccagctatggttcttccgatttgtggtgaatgctgctggctatgccagctttatggtacctggctacctcctggtgcagtacttcaggcggaagaactacctggagaccggtaggggcctctgctttcccctggtgaaagcttgtgtgtttggcaatgagcccaaggcctctgatgaggttcccctggcgccccgaacagaggcggcagagaccaccccgatgtggcaggccctgaagctgctcttctgtgccacagggctccaggtgtcttatctgacttggggtgtgctgcaggaaagagtgatgacccgcagctatggggccacagccacatcaccgggtgagcgctttacggactcgcagttcctggtgctaatgaaccgagtgctggcactgattgtggctggcctctcctgtgttctctgcaagcagccccggcatggggcacccatgtaccggtactcctttgccagcctgtccaatgtgcttagcagctggtgccaatacgaagctcttaagttcgtcagcttccccacccaggtgctggccaaggcctctaaggtgatccctgtcatgctgatgggaaagcttgtgtctcggcgcagctacgaacactgggagtacctgacagccaccctcatctccattggggtcagcatgtttctgctatccagcggaccagagccccgcagctccccagccaccacactctcaggcctcatcttactggcaggttatattgcttttgacagcttcacctcaaactggcaggatgccctgtttgcctataagatgtcatcggtgcagatgatgtttggggtcaatttcttctcctgcctcttcacagtgggctcactgctagaacagggggccctactggagggaacccgcttcatggggcgacacagtgagtttgctgcccatgccctgctactctccatctgctccgcatgtggccagctcttcatcttttacaccattgggcagtttggggctgccgtcttcaccatcatcatgaccctccgccaggcctttgccatccttctttcctgccttctctatggccacactgtcactgtggtgggagggctgggggtggctgtggtctttgctgccctcctgctcagagtctacgcgcggggccgtctaaagcaacggggaaagaaggctgtgcctgttgagtctcctgtgcagaaggtttgagggtggaaagggcctgaggggtgaagtgaaataggaccctcccaccatccccttctgctgtaacctctgagggagctggctgaaagggcaaaatgcaggtgttttctcagtatcacagaccagctctgcagcaggggattggggagcccaggaggcagccttcccttttgccttaagtcacccatcttccagtaagcagtttattctgagccccgggggtagacagtcctcagtgaggggttttggggagtttggggtcaagagagcataggtaggttccacagttactcttcccacaagttcccttaagtcttgccctagctgtgctctgccaccttccagactcactcccctctgcaaatacctgcatttcttaccctggtgagaaaagcacaagcggtgtaggctccaatgctgctttcccaggagggtgaagatggtgctgtgctgaggaaaggggatgcagagccctgcccagcaccaccacctcctatgctcctggatccctaggctctgttccatgagcctgttgcaggttttggtactttagaaatgtaactttttgctcttataattttattttattaaattaaattactgca

SEQ ID NO: 313303 - DNA, 1861 bp, Homo sapiens
agggggccgcggggagggaggcgggaagagcgcggcacttccgctggccgctggctcgctggccgctcctggaggcggcggcgggagcgcagggggcgcgcggcccggggactcgcattccccggttccccctccaccccacgcggcctggaccatggacgccaggtaggggcctctgctttcccctggtgaaagcttgtgtgtttggcaatgagcccaaggcctctgatgaggttcccctggcgccccgaacagaggcggcagagaccaccccgatgtggcaggccctgaagctgctcttctgtgccacagggctccaggtgtcttatctgacttggggtgtgctgcaggaaagagtgatgacccgcagctatggggccacagccacatcaccgggtgagcgctttacggactcgcagttcctggtgctaatgaaccgagtgctggcactgattgtggctggcctctcctgtgttctctgcaagcagccccggcatggggcacccatgtaccggtactcctttgccagcctgtccaatgtgcttagcagctggtgccaatacgaagctcttaagttcgtcagcttccccacccaggtgctggccaaggcctctaaggtgatccctgtcatgctgatgggaaagcttgtgtctcggcgcagctacgaacactgggagtacctgacagccaccctcatctccattggggtcagcatgtttctgctatccagcggaccagagccccgcagctccccagccaccacactctcaggcctcatcttactggcaggttatattgcttttgacagcttcacctcaaactggcaggatgccctgtttgcctataagatgtcatcggtgcagatgatgtttggggtcaatttcttctcctgcctcttcacagtgggctcactgctagaacagggggccctactggagggaacccgcttcatggggcgacacagtgagtttgctgcccatgccctgctactctccatctgctccgcatgtggccagctcttcatcttttacaccattgggcagtttggggctgccgtcttcaccatcatcatgaccctccgccaggcctttgccatccttctttcctgccttctctatggccacactgtcactgtggtgggagggctgggggtggctgtggtctttgctgccctcctgctcagagtctacgcgcggggccgtctaaagcaacggggaaagaaggctgtgcctgttgagtctcctgtgcagaaggtttgagggtggaaagggcctgaggggtgaagtgaaataggaccctcccaccatccccttctgctgtaacctctgagggagctggctgaaagggcaaaatgcaggtgttttctcagtatcacagaccagctctgcagcaggggattggggagcccaggaggcagccttcccttttgccttaagtcacccatcttccagtaagcagtttattctgagccccgggggtagacagtcctcagtgaggggttttggggagtttggggtcaagagagcataggtaggttccacagttactcttcccacaagttcccttaagtcttgccctagctgtgctctgccaccttccagactcactcccctctgcaaatacctgcatttcttaccctggtgagaaaagcacaagcggtgtaggctccaatgctgctttcccaggagggtgaagatggtgctgtgctgaggaaaggggatgcagagccctgcccagcaccaccacctcctatgctcctggatccctaggctctgttccatgagcctgttgcaggttttggtactttagaaatgtaactttttgctcttataattttattttattaaattaaattactgca

SEQ ID NO: 313304 - DNA, 1668 bp, Homo sapiens
agggggccgcggggagggaggcgggaagagcgcggcacttccgctggccgctggctcgctggccgctcctggaggcggcggcgggagcgcagggggcgcgcggcccggggactcgcattccccggttccccctccaccccacgcggcctggaccatggacgccagatggtgggcagtggtggtgctggctgcgttcccctccctaggggcaggtggggagactcccgaagcccctccggagtcatggacccagctatggttcttccgatttgtggtgaatgctgctggctatgccagctttatggtacctggctacctcctggtgcagtacttcaggcggaagaactacctggagaccggtaggggcctctgctttcccctggtgaaagcttgtgtgtttggcaatgagcccaaggcctctgatgaggttcccctggcgccccgaacagaggcggcagagaccaccccgatgtggcaggccctgaagctgctcttctgtgccacagggctccaggtgtcttatctgacttggggtgtgctgcaggaaagagtgatgacccgcagctatggggccacagccacatcaccgggtgagcgctttacggactcgcagttcctggtgctaatgaaccgagtgctggcactgattgtggctggcctctcctgtgttctctgcaagcagccccggcatggggcacccatgtaccggtactcctttgccagcctgtccaatgtgcttagcagctggtgccaatacgaagctcttaagttcgtcagcttccccacccaggtgctggccaaggcctctaaggtgatccctgtcatgctgatgggaaagcttgtgtctcggcgcagctacgaacactgggagtacctgacagccaccctcatctccattggggtcagcatgtttctgctatccagcggaccagagccccgcagctccccagccaccacactctcaggcctcatcttactggcaggttatattgcttttgacagcttcacctcaaactggcaggatgccctgtttgcctataagatgtcatcggtgcagatgatgtttggggtcaatttcttctcctgcctcttcacagtgggctcactgctagaacagggggccctactggagggaacccgcttcatggggcgacacagtgagtttgctgcccatgccctgctactctccatctgctccgcatgtggccagctcttcatcttttacaccattgggcagtttggggctgccgtcttcaccatcatcatgaccctccgccaggcctttgccatccttctttcctgccttctctatggccacactgtcactgtggtgggagggctgggggtggctgtggtctttgctgccctcctgctcagagtctacgcgcggggccgtctaaagcaacggggaaagaaggctgtgcctgttgagtctcctgtgcagaaggtttgagggtggaaagggcctgaggggtgaagtgaaataggaccctcccaccatccccttctgctgtaacctctgagggagctggctgaaagggcaaaatgcaggtgttttctcagtatcacagaccagcttctgttccatgagcctgttgcaggttttggtactttagaaatgtaactttttgctcttataattttattttattaaattaaattactgca

SEQ ID NO: 313305 - DNA, 1073 bp, Homo sapiens
agggggccgcggggagggaggcgggaagagcgcggcacttccgctggccgctggctcgctggccgctcctggaggcggcggcgggagcgcagggggcgcgcggcccggggactcgcattccccggttccccctccaccccacgcggcctggaccatggacgccagatggtgggcagtggtggtgctggctgcgttcccctccctaggggcaggtggggagactcccgaagcccctccggagtcatggacccagctatggttcttccgatttgtggtgaatgctgctggctatgccagctttatggtacctggctacctcctggtgcagtacttcaggcggaagaactacctggagaccggtaggggcctctgctttcccctggtgaaagcttgtgtgtttggcaatgagcccaaggcctctgatgaggttcccctggcgccccgaacagaggcggcagagaccaccccgatgtggcaggccctgaagctgctcttctgtgccacagggctccaggtgtcttatctgacttggggtgtgctgcaggaaagagtgatgacccgcagctatggggccacagccacatcaccgggtgagcgctttacggactcgcagttcctggtgctaatgaaccgagtgctggcactgattgtggctggcctctcctgtgttctctgcaagcagccccggcatggggcacccatgtaccggtactcctttgccagcctgtccaatgtgcttagcagctggtgccaatacgaagctcttaagttcgtcagcttccccacccaggtgctggccaaggcctctaaggtgatccctgtcatgctgatgggaaagcttgtgtctcggcgcagctacgaacactgggagtacctgacagccaccctcatctccattggggtcagcatgtttctgctatccagcggaccagagccccgcagctccccagccaccacactctcaggcctcatcttactggcaggttatattgcttttgacagcttcacctcaaactggcaggatgccctgtttgcctataagatgtcaaaagcatgtggaaatgacccaaaca

SEQ ID NO: 313306 - DNA, 2537 bp, Homo sapiens
agggggccgcggggagggaggcgggaagagcgcggcacttccgctggccgctggctcgctggccgctcctggaggcggcggcgggagcgcagggggcgcgcggcccggggactcgcattccccggttccccctccaccccacgcggcctggaccatggacgccagatggtgggcagtggtggtgctggctgcgttcccctccctaggggcaggtggggagactcccgaagcccctccggagtcatggacccagctatggttcttccgatttgtggtgaatgctgctggctatgccagctttatggtacctggctacctcctggtgcagtacttcaggcggaagaactacctggagaccggtaggggcctctgctttcccctggtgaaagcttgtgtgtttggcaatgagcccaaggcctctgatgaggttcccctggcgccccgaacagaggcggcagagaccaccccgatgtggcaggccctgaagctgctcttctgtgccacagggctccaggtgtcttatctgacttggggtgtgctgcaggaaagagtgatgacccgcagctatggggccacagccacatcaccgggtgagcgctttacggactcgcagttcctggtgctaatgaaccgagtgctggcactgattgtggctggcctctcctgtgttctctgcaagcagccccggcatggggcacccatgtaccggtactcctttgccagcctgtccaatgtgcttagcagctggtgccaatacgaagctcttaagttcgtcagcttccccacccaggtgctggccaaggcctctaaggtgatccctgtcatgctgatgggaaagcttgtgtctcggcgcagctacgaacactgggagtacctgacagccaccctcatctccattggggtcagcatgtttctgctatccagcggaccagagccccgcagctccccagccaccacactctcaggcctcatcttactggcaggttatattgcttttgacagcttcacctcaaactggcaggatgccctgtttgcctataagatgtcatcggtgcagatgatgtttggggtcaatttcttctcctgcctcttcacagtgggctcactgctagaacagggggccctactggagggaacccgcttcatggggcgacacagtgagtttgctgcccatgccctgctactctccatctgctccgcatgtggccagctcttcatcttttacaccattgggcagtttggggctgccgtcttcaccatcatcatgaccctccgccaggcctttgccatccttctttcctgccttctctatggccacactgtcactgtggtgggagggctgggggtggctgtggtctttgctgccctcctgctcagagtctacgcgcggggccgtctaaagcaacggggaaagaaggctgtgcctgttgagtctcctgtgcagaaggtttgagggtggaaagggcctgaggggtgaagtgaaataggaccctcccaccatccccttctgctgtaacctctgagggagctggctgaaagggcaaaatgcaggtgttttctcagtatcacagaccagctctgcagcaggggattggggagcccaggaggcagccttcccttttgccttaagtcacccatcttccagtaagcagtttattctgagccccgggggtagacagtcctcagtgaggggttttggggagtttggggtcaagagagcataggtaggttccacagttactcttcccacaagttcccttaagtcttgccctagctgtgctctgccaccttccagactcactcccctctgcaaatacctgcatttcttaccctggtgagaaaagcacaagcggtgtaggctccaatgctgctttcccaggagggtgaagatggtgctgtgctgaggaaaggggatgcagagccctgcccagcaccaccacctcctatgctcctggatccctaggctctgttccatgagcctgttgcaggttttggtactttagaaatgtaactttttgctcttataattttattttattaaattaaattactgcaaaaaaaaaaaaaaaaaaaaaaaaaaaaaaaaaaaaaaaaaaaaaaaaaaaaaaaaaaaaaaaaaaaaaaaaaaaaaaaaaaaaaaaaaaaaaaggggggggggggcttaaaacttccccgccggggggggacgtaatatgatgcgtcgaccctgaagttttttttgaaaaggaggggcccccaaagaaaggaggtgattattttcaacacggaaccagacgcgccctttttatatataaccaattagtgcttggcgaggtggaaaaccacacatctggtgtagcgtggaagtacttattggagaagggaacccaataatgtgggtgggggagccaacattggtgcgacaacctcacataagggtattatactaccctgaggtgaattaattaacatatggcgatgttattgtgttcacccgcagttttatctcgcctgcagaaaatattcgtcactacgagttttttcgagaatattagccg

SEQ ID NO: 313307 - DNA, 1900 bp, Homo sapiens
agggggccgcggggagggaggcgggaagagcgcggcacttccgctggccgctggctcgctggccgctcctggaggcggcggcgggagcgcagggggcgcgcggcccggggactcgcattccccggttccccctccaccccacgcggcctggaccatggacgccagatggtgggcagtggtggtgctggctgcgttcccctccctaggggcaggtggggagactcccgaagcccctccggagtcatggacccagctatggttcttccgatttgtggtgaatgctgctggctatgccagctttatggtacctggctacctcctggtgcagtacttcaggcggaagaactacctggagaccggtgtcttatctgacttggggtgtgctgcaggaaagagtgatgacccgcagctatggggccacagccacatcaccgggtgagcgctttacggactcgcagttcctggtgctaatgaaccgagtgctggcactgattgtggctggcctctcctgtgttctctgcaagcagccccggcatggggcacccatgtaccggtactcctttgccagcctgtccaatgtgcttagcagctggtgccaatacgaagctcttaagttcgtcagcttccccacccaggtgctggccaaggcctctaaggtgatccctgtcatgctgatgggaaagcttgtgtctcggcgcagctacgaacactgggagtacctgacagccaccctcatctccattggggtcagcatgtttctgctatccagcggaccagagccccgcagctccccagccaccacactctcaggcctcatcttactggcaggttatattgcttttgacagcttcacctcaaactggcaggatgccctgtttgcctataagatgtcatcggtgcagatgatgtttggggtcaatttcttctcctgcctcttcacagtgggctcactgctagaacagggggccctactggagggaacccgcttcatggggcgacacagtgagtttgctgcccatgccctgctactctccatctgctccgcatgtggccagctcttcatcttttacaccattgggcagtttggggctgccgtcttcaccatcatcatgaccctccgccaggcctttgccatccttctttcctgccttctctatggccacactgtcactgtggtgggagggctgggggtggctgtggtctttgctgccctcctgctcagagtctacgcgcggggccgtctaaagcaacggggaaagaaggctgtgcctgttgagtctcctgtgcagaaggtttgagggtggaaagggcctgaggggtgaagtgaaataggaccctcccaccatccccttctgctgtaacctctgagggagctggctgaaagggcaaaatgcaggtgttttctcagtatcacagaccagctctgcagcaggggattggggagcccaggaggcagccttcccttttgccttaagtcacccatcttccagtaagcagtttattctgagccccgggggtagacagtcctcagtgaggggttttggggagtttggggtcaagagagcataggtaggttccacagttactcttcccacaagttcccttaagtcttgccctagctgtgctctgccaccttccagactcactcccctctgcaaatacctgcatttcttaccctggtgagaaaagcacaagcggtgtaggctccaatgctgctttcccaggagggtgaagatggtgctgtgctgaggaaaggggatgcagagccctgcccagcaccaccacctcctatgctcctggatccctaggctctgttccatgagcctgttgcaggttttggtactttagaaatgtaactttttgctcttataattttattttattaaattaaattactgca

SEQ ID NO: 313308 - DNA, 1505 bp, Homo sapiens
agggggccgcggggagggaggcgggaagagcgcggcacttccgctggccgctggctcgctggccgctcctggaggcggcggcgggagcgcagggggcgcgcggcccggggactcgcattccccggttccccctccaccccacgcggcctggaccatggacgccagatggtgggcagtggtggtgctggctgcgttcccctccctaggggcaggtggggagactcccgaagcccctccggagtcatggacccagctatggttcttccgatttgtggtgaatgctgctggctatgccagctttatggtacctggctacctcctggtgcagtacttcaggcggaagaactacctggagaccggtaggggcctctgctttcccctggtgaaagcttgtgtgtttggcaatgagcccaaggcctctgatgaggttcccctggcgccccgaacagaggcggcagagaccaccccgatgtggcaggccctgaagctgctcttctgtgccacagggctccaggtgtcttatctgacttggggtgtgctgcaggaaagagtgatgacccgcagctatggggccacagccacatcaccgggtgagcgctttacggactcgcagttcctggtgctaatgaaccgagtgctggcactgattgtggctggcctctcctgtgttctctgcaagcagccccggcatggggcacccatgtaccggtactcctttgccagcctgtccaatgtgcttagcagctggtgccaatacgaagctcttaagttcgtcagcttccccacccaggtgctggccaaggcctctaaggtgatccctgtcatgctgatgggaaagcttgtgtctcggcgcagctacgaacactgggagtacctgacagccaccctcatctccattggggtcagcatgtttctgctatccagcggaccagagccccgcagctccccagccaccacactctcaggcctcatcttactggcaggttatattgcttttgacagcttcacctcaaactggcaggatgccctgtttgcctataagatgtcatcggtgcagatgatgtttggggtcaatttcttctcctgcctcttcacagtgggctcactgctagaacagggggccctactggagggaacccgcttcatggggcgacacagtgagtttgctgcccatgccctgctactctccatctgctccgcatgtggccagctcttcatcttttacaccattgggcagtttggggctgccgtcttcaccatcatcatgaccctccgccaggcctttgccatccttctttcctgccttctctatggccacactgtcactgtggtgggagggctgggggtggctgtggtctttgctgccctcctgctcagagtctacgcgcggggccgtctaaagcaacggggaaagaaggctgtgcctgttgagtctcctgtgcagaagggtgactagatgaggttgtgtatcggggatcctcttgattcttcctcaaaatctaggc

SEQ ID NO: 313309 - DNA, 1326 bp, Homo sapiens
  misc_feature (1261)..(1261): n is a, c, g, or t
  misc_feature (1282)..(1282): n is a, c, g, or t
  misc_feature (1314)..(1314): n is a, c, g, or t
agggggccgcggggagggaggcgggaagagcgcggcacttccgctggccgctggctcgctggccgctcctggaggcggcggcgggagcgcagggggcgcgcggcccggggactcgcattccccggttccccctccaccccacgcggcctggaccatggacgccagatggtgggcagtggtggtgctggctgcgttcccctccctaggggcaggtggggagactcccgaagcccctccggagtcatggacccagctatggttcttccgatttgtggtgaatgctgctggctatgccagctttatggtacctggctacctcctggtgcagtacttcaggcggaagaactacctggagaccggtaggggcctctgctttcccctggtgaaagcttgtgtgtttggcaatgagcccaaggcctctgatgaggttcccctggcgccccgaacagaggcggcagagaccaccccgatgtggcaggccctgaagctgctcttctgtgccacagggctccaggtgtcttatctgacttggggtgtgctgcaggaaagagtgatgacccgcagctatggggccacagccacatcaccgggtgagcgctttacggactcgcagttcctggtgctaatgaaccgagtgctggcactgattgtggctggcctctcctgtgttctctgcaagcagccccggcatggggcacccatgtaccggtactcctttgccagcctgtccaatgtgcttagcagctggtgccaatacgaagctcttaagttcgtcagcttccccacccaggtgctggccaaggcctctaaggtgatccctgtcatgctgatgggaaagcttgtgtctcggcgcagctacgaacactgggagtacctgacagccaccctcatctccattggggtcagcatgtttctgctatccagcggaccagagccccgcagctccccagccaccacactctcaggcctcatcttactggcaggttatattgcttttgacagcttcacctcaaactggcaggatgccctgtttgcctataagatgtcatcggtgcagatgatgtttggggtcaatttcttctcctgcctcttcacagtgggctcactgctagaacagggggccctactggagggaacccgcttcatggggcgacacagtgagtttgctgcccatgccctgctactctccatctgctccgcatgtggccagctcttcatcttttacaccattgggcagtttggggctgccgtcttcaccaanctgcatcaccctgttcaacgnggtgactgcggttggacgtggccacacttgtngaggctggtaga

SEQ ID NO: 313310 - DNA, 555 bp, Homo sapiens
agcccccgggccacgtgactgccgcgcctcagcacgggggccgggtggggtcccggctgctcggccgtcggccagcatatcgctgcccggagccagcggggatgggagctgcggcttggttttgtgctccttggggagcttcgggcggaggggctggggaccctgacgtcccggatcgtggaggggagtgtgggggaaggggcgcttcctctgacctgagcagccggctagcgttggagggaacagaggagacctgtgtggccagaggggcggatccgcccccggggagggaggaagctctgcctggccagcgccggcgcaccccctccccgagagagagagagagagagaggctctttgtccgggccggagctgcagcggagggggcggggaggagactccgggcactactccagtgtggtcccctctggagggcggaggggatgaggagctgcgccctaatccttatgtccgctttccttacagatggtgggcagtggtggtgctggctgcgttcccctccctaggggcaggtggggagactcccgaagcccc

SEQ ID NO: 313311 - DNA, 1425 bp, Homo sapiens
agcggggaagtagggcctgatgtaaacacccgagccgggctccaaggcccgggaggtcagaaaaccgggccgcgggcggcaccgacagctggggcccgggtcagggacacgcggaggtcaggccggtgaaggcggcaggaagctggagcacgatcccaggaggaacaatcctgcaccatgactcaacagccacttcgaggagtgaccagcctgcgtttcaaccaagaccaaagctgcttttgctgcgccatggagacaggtgtgcgcatctacaacgtggagcccttgatggagaaggggcatctggaccacgagcaggtgggcagcatgggcttggtggagatgctgcaccgctccaaccttctggccttggtgggcggtggtagtagtcccaagttctcagagatctcagtgctgatctgggacgatgcccgggagggcaaggactccaaggagaagctggtgctggagttcaccttcaccaagccagtgctttctgtgcgcatgcgccatgacaagatcgtgatcgtgctgaagaaccgcatctatgtgtactccttccccgacaatccccgaaagctgtttgagtttgatacccgggacaaccccaaggggctctgtgacctctgccccagcctggagaagcaactgctagtgttcccgggacacaagtgtgggagtctgcaacttgtggacctggcgagcacaaagcctggcacctcgtctgctccattcacgatcaatgcacatcagagtgacatagcctgtgtgtctctaaaccagccaggcactgtagtggcctcagcctcccagaagggtacccttattcgcctctttgacacacaatccaaggagaaactggtggagctgcgccgaggcactgaccctgccaccctctactgcattaacttcagccacgactcctccttcctctgcgcttccagtgataagggtactgtccatatctttgctctcaaggatacccgcctcaaccgccgctccgcgctggctcgcgtgggcaaggtggggcctatgattgggcagtacgtggactctcagtggagcctggcgagcttcactgtgcctgctgagtcagcttgcatctgcgccttcggtcgcaatacttccaagaacgtcaactctgtcattgccatctgcgtagatgggaccttccacaaatatgtcttcactcctgatggaaactgcaacagagaggctttcgacgtgtaccttgacatctgtgatgatgatgacttttaaggaccctgggggctgtgctagggacctgcagtggcagaactgcagagctgagccttggcagtggggcgtgcttggaagccaccagccagcaagcattaatggggctggtgcccactttccactcagcagagctatgtctaaataaagagctcacttccccccagc

SEQ ID NO: 313312 - DNA, 2450 bp, Homo sapiens
agcggggaagtagggcctgatgtaaacacccgagccgggctccaaggcccgggaggtcagaaaaccgggccgcgggcggcaccgacagctggggcccgggtcagggacacgcggaggtcaggccggtgaaggcggcaggaagctggagcacgatcccaggaggaacaatcctgcaccatgactcaacagccacttcgaggagtgaccagcctgcgtttcaaccaagaccaaagctgcttttgctgcgccatggagacaggtgtgcgcatctacaacgtggagcccttgatggagaaggggcatctgggtgagctgttggcaggggaggggcaatgggcagaagagctgggctgggcattggctcccacctccactgacaccctggtccctgtccagaccacgagcaggtgggcagcatgggcttggtggagatgctgcaccgctccaaccttctggccttggtgggcggtggtagtagtcccaagttctcagagatctcaggtaagtgccctcatcctgccctttggcccagatttctcggattcctggcctcccacaggcaccccaaggtactggcagatgaagacgtcagagtacttcagagtcacacagagaggaggcctacagcttggaagtcatggatcttatagcttgagaagcttggtgctttgttttcattttaaaaattctgattgagtgcctcctgtgtgccatgccctagagcacttactgtgagcctggaactgccctaagcactttacgtttattaactcatttaatcctcacagtaactctatggggtaggaaggatcattatccccatctttaccgatgaggaaactgaggcccagtgcagttaagtgactcatccaaggtcacacaagcaataggttttaaaatcttggagccgtcttcccaatacccccttggcttgagcctcaagtgccatcttactttaagggtttttcttgatgatcccatctggacaaggcaggagttgccctaggtgagtcacagagccctaggattcctcacggaaatctccagggtgcatggactaggaccctggaggcagaaatagttaccgaggggaagttacaggcctgagtgtgagtccctgtttggttgctgatgagctttgaggtccttggccagacactcaaccactttgaacctcagtttcctcatctgtagatgagtgtaacagtctagaacactcctctcagggatcatatccacaagtgctcgtgctgtgcgaggatctcactggttgtttattgaaaggctaagcaagtaggttgaggtccctgggaagcaggggtggatcctgtgtcaccagggctgccccttaccctaaaccttggccccgacaacccacccacctgcccagctgctgatctgggacgatgcccgggagggcaaggactccaaggagaagctggtgctggagttcaccttcaccaagccagtgctttctgtgcgcatgcgccatgacaagatcgtgatcgtgctgaagaaccgcatctatgtgtactccttccccgacaatccccgaaagctgtttgagtttgatacccgggacaaccccaaggggctctgtgacctctgccccagcctggagaagcaactgctagtgttcccgggacacaagtgtgggagtctgcaacttgtggacctggcgagcacaaagcctggcacctcgtctgctccattcacgatcaatgcacatcagagtgacatagcctgtgtgtctctaaaccagccaggcactgtagtggcctcagcctcccagaagggtacccttattcgcctctttgacacacaatccaaggagaaactggtggagctgcgccgaggcactgaccctgccaccctctactgcattaacttcagccacgactcctccttcctctgcgcttccagtgataagggtactgtccatatctttgctctcaaggatacccgcctcaaccgccgctccgcgctggctcgcgtgggcaaggtggggcctatgattgggcagtacgtggactctcagtggagcctggcgagcttcactgtgcctgctgagtcagcttgcatctgcgccttcggtcgcaatacttccaagaacgtcaactctgtcattgtgcagagctgagccttggcagtggggcgtgcttggaagccaccagccagcaagcattaatggggctggtgcccactttccactcagcagagctatgtctaaataaagagctcacttccccccagcacttcttgatgactgtgtgccccaagggccaggccagagacccaggaaggcagcgaccccttgggatccctaacctggaggaaattgccagggacccagagggagtgccctaatccaacctggggattttttaaaagcttcctaggaagagatgatctccgatgtgatgaatacgaataaaaggcccttaatggca

SEQ ID NO: 313313 - DNA, 1420 bp, Homo sapiens
agcggggaagtagggcctgatgtaaacacccgagccgggctccaaggcccgggaggtcagaaaaccgggccgcgggcggcaccgacagctggggcccgggtcagggacacgcggaggtcaggccggtgaaggcggcaggaagctggagcacgatcccaggaggaacaatcctgcaccatgactcaacagccacttcgaggagtgaccagcctgcgtttcaaccaagaccaaagctgcttttgctgcgccatggagacaggtgtgcgcatctacaacgtggagcccttgatggagaaggggcatctggaccacgagcaggtgggcagcatgggcttggtggagatgctgcaccgctccaaccttctggccttggtgggcggtggtagtagtcccaagttctcagagatctcagggctctgtgacctctgccccagcctggagaagcaactgctagtgttcccgggacacaagtgtgggagtctgcaacttgtggacctggcgagcacaaagcctggcacctcgtctgctccattcacgatcaatgcacatcagagtgacatagcctgtgtgtctctaaaccagccaggcactgtagtggcctcagcctcccagaagggtacccttattcgcctctttgacacacaatccaaggagaaactggtggagctgcgccgaggcactgaccctgccaccctctactgcattaacttcagccacgactcctccttcctctgcgcttccagtgataagggtactgtccatatctttgctctcaaggatacccgcctcaaccgccgctccgcgctggctcgcgtgggcaaggtggggcctatgattgggcagtacgtggactctcagtggagcctggcgagcttcactgtgcctgctgagtcagcttgcatctgcgccttcggtcgcaatacttccaagaacgtcaactctgtcattgccatctgcgtagatgggaccttccacaaatatgtcttcactcctgatggaaactgcaacagagaggctttcgacgtgtaccttgacatctgtgatgatgatgacttttaaggaccctgggggctgtgctagggacctgcagtggcagaactgcagagctgagccttggcagtggggcgtgcttggaagccaccagccagcaagcattaatggggctggtgcccactttccactcagcagagctatgtctaaataaagagctcacttccccccagcacttcttgatgactgtgtgccccaagggccaggccagagacccaggaaggcagcgaccccttgggatccctaacctggaggaaattgccagggacccagagggagtgccctaatccaacctggggattttttaaaagcttcctaggaagagatgatctccgatgtgatgaatacgaataaaaggcccttaatggca

SEQ ID NO: 313314 - DNA, 1650 bp, Homo sapiens
  misc_feature (1626)..(1626): n is a, c, g, or t
  misc_feature (1628)..(1628): n is a, c, g, or t
agcggggaagtagggcctgatgtaaacacccgagccgggctccaaggcccgggaggtcagaaaaccgggccgcgggcggcaccgacagctggggcccgggtcagggacacgcggaggtcaggccggtgaaggcggcaggaagctggagcacgatcccaggaggaacaatcctgcaccatgactcaacagccacttcgaggagtgaccagcctgcgtttcaaccaagaccaaagctgcttttgctgcgccatggagacaggtgtgcgcatctacaacgtggagcccttgatggagaaggggcatctggaccacgagcaggtgggcagcatgggcttggtggagatgctgcaccgctccaaccttctggccttggtgggcggtggtagtagtcccaagttctcagagatctcagtgctgatctgggacgatgcccgggagggcaaggactccaaggagaagctggtgctggagttcaccttcaccaagccagtgctttctgtgcgcatgcgccatgacaagatcgtgatcgtgctgaagaaccgcatctatgtgtactccttccccgacaatccccgaaagctgtttgagtttgatacccgggacaaccccaaggggctctgtgacctctgccccagcctggagaagcaactgctagtgttcccgggacacaagtgtgggagtctgcaacttgtggacctggcgagcacaaagcctggcacctcgtctgctccattcacgatcaatgcacatcagagtgacatagcctgtgtgtctctaaaccagccaggcactgtagtggcctcagcctcccagaagggtacccttattcgcctctttgacacacaatccaaggagaaactggtggagctgcgccgaggcactgaccctgccaccctctactgcattaacttcagccacgactcctccttcctctgcgcttccagtgataagggtactgtccatatctttgctctcaaggatacccgcctcaaccgccgctccgcgctggctcgcgtgggcaaggtggggcctatgattgggcagtacgtggactctcagtggagcctggcgagcttcactgtgcctgctgagtcagcttgcatctgcgccttcggtcgcaatacttccaagaacgtcaactctgtcattgccatctgcgtagatgggaccttccacaaatatgtcttcactcctgatggaaactgcaacagagaggctttcgacgtgtaccttgacatctgtgatgatgatgacttttaaggaccctgggggctgtgctagggacctgcagtggcagaactgcagagctgagccttggcagtggggcgtgcttggaagccaccagccagcaagcattaatggggctggtgcccactttccactcagcagagctatgtctaaataaagagctcacttccccccagcacttcttgatgactgtgtgccccaagggccaggccagagacccaggaaggcagcgaccccttgggatccctaacctggaggaaattgccagggacccagagggagtgccctaatccaacctggggattttttaaaagcttcctaggaagagatgatctccgatgtgatgaatacgaataaaaggcccttaatggcaaaaanancaaccagacaaaaaaccagaca

SEQ ID NO: 313315 - DNA, 2404 bp, Homo sapiens
agcggggaagtagggcctgatgtaaacacccgagccgggctccaaggcccgggaggtcagaaaaccgggccgcgggcggcaccgacagctggggcccgggtcagggacacgcggaggtcaggccggtgaaggcggcaggaagctggagcacgatcccaggaggaacaatcctgcaccatgactcaacagccacttcgaggagtgaccagcctgcgtttcaaccaagaccaaagctgcttttgctgcgccatggagacaggtgtgcgcatctacaacgtggagcccttgatggagaaggggcatctgggtgagctgttggcaggggaggggcaatgggcagaagagctgggctgggcattggctcccacctccactgacaccctggtccctgtccagaccacgagcaggtgggcagcatgggcttggtggagatgctgcaccgctccaaccttctggccttggtgggcggtggtagtagtcccaagttctcagagatctcaggtaagtgccctcatcctgccctttggcccagatttctcggattcctggcctcccacaggcaccccaaggtactggcagatgaagacgtcagagtacttcagagtcacacagagaggaggcctacagcttggaagtcatggatcttatagcttgagaagcttggtgctttgttttcattttaaaaattctgattgagtgcctcctgtgtgccatgccctagagcacttactgtgagcctggaactgccctaagcactttacgtttattaactcatttaatcctcacagtaactctatggggtaggaaggatcattatccccatctttaccgatgaggaaactgaggcccagtgcagttaagtgactcatccaaggtcacacaagcaataggttttaaaatcttggagccgtcttcccaatacccccttggcttgagcctcaagtgccatcttactttaagggtttttcttgatgatcccatctggacaaggcaggagttgccctaggtgagtcacagagccctaggattcctcacggaaatctccagggtgcatggactaggaccctggaggcagaaatagttaccgaggggaagttacaggcctgagtgtgagtccctgtttggttgctgatgagctttgaggtccttggccagacactcaaccactttgaacctcagtttcctcatctgtagatgagtgtaacagtctagaacactcctctcagggatcatatccacaagtgctcgtgctgtgcgaggatctcactggttgtttattgaaaggctaagcaagtaggttgaggtccctgggaagcaggggtggatcctgtgtcaccagggctgccccttaccctaaaccttggccccgacaacccacccacctgcccagctgctgatctgggacgatgcccgggagggcaaggactccaaggagaagctggtgctggagttcaccttcaccaagccagtgctttctgtgcgcatgcgccatgacaagatcgtgatcgtgctgaagaaccgcatctatgtgtactccttccccgacaatccccgaaagctgtttgagtttgatacccgggacaaccccaaggggctctgtgacctctgccccagcctggagaagcaactgctagtgttcccgggacacaagtgtgggagtctgcaacttgtggacctggcgagcacaaagcctggcacctcgtctgctccattcacgatcaatgcacatcagagtgacatagcctgtgtgtctctaaaccagccaggcactgtagtggcctcagcctcccagaagggtacccttattcgcctctttgacacacaatccaaggagaaactggtggagctgcgccgaggcactgaccctgccaccctctactgcattaacttcagccacgactcctccttcctctgcgcttccagtgataagggtactgtccatatctttgctctcaaggatacccgcctcaaccgccgctccgcgctggctcgcgtgggcaaggtggggcctatgattgggcagtacgtggactctcagtggagcctggcgagcttcactgtgcctgctgagtcagcttgcatctgcgccttcggtcgcaatacttccaagaacgtcaactctgtcattgccatctgcgtagatgggaccttccacaaatatgtcttcactcctgatggaaactgcaacagagaggctttcgacgtgtaccttgacatctgtgatgatgatgacttttaaggaccctgggggctgtgctagggacctgcagtggcagaactgcagagctgagccttggcagtggggcgtgcttggaagccaccagccagcaagcattaatggggctggtgcccactttccactcagcagagctatgtctaaataaagagctcacttccccccagc

SEQ ID NO: 313316 - DNA, 2864 bp, Homo sapiens
ctgggctccgggaaagtcgtgcttttacggttccgggtactggctcccacaccactgcctcgtgtggggttgttcgcccgtgaaggggcaggacagggtgcgcgctggtggaggttgaaattgttacattttggccgggcgcggtggctcacgcctgtaatcccagcactttgggaggccgaggcaggtggatcacgaggtcaggagatcgagaccatcctggctaacacagtgaaaccccgtctctactaaaaaaatacaaaaaatcagccgggcgtggtgacgggcgcctgtagtcccagctactcaggaggctgaggcaggaggatggcgtgaacccgggaggcggagcttgcagtgagccgagatcgcgccagtgcactccagcctgggcgacagagcgaaactacgtctcaaaaaaaaaaaaaaagaaagaaaagaaattgttacattttatatatatacagtctcggccttgaggaacccccttcgcctccggtcccccagccaaccttcctccgctccccgcgccctccccggagaaccccactgtcactcgcgatgctccgaagacccgggaactaggcgaggaaggcggtggccgcctttttccagctgggaggaacaatcctgcaccatgactcaacagccacttcgaggagtgaccagcctgcgtttcaaccaagaccaaagctgcttttgctgcgccatggagacaggtgtgcgcatctacaacgtggagcccttgatggagaaggggcatctgggtgagctgttggcaggggaggggcaatgggcagaagagctgggctgggcattggctcccacctccactgacaccctggtccctgtccagaccacgagcaggtgggcagcatgggcttggtggagatgctgcaccgctccaaccttctggccttggtgggcggtggtagtagtcccaagttctcagagatctcaggtaagtgccctcatcctgccctttggcccagatttctcggattcctggcctcccacaggcaccccaaggtactggcagatgaagacgtcagagtacttcagagtcacacagagaggaggcctacagcttggaagtcatggatcttatagcttgagaagcttggtgctttgttttcattttaaaaattctgattgagtgcctcctgtgtgccatgccctagagcacttactgtgagcctggaactgccctaagcactttacgtttattaactcatttaatcctcacagtaactctatggggtaggaaggatcattatccccatctttaccgatgaggaaactgaggcccagtgcagttaagtgactcatccaaggtcacacaagcaataggttttaaaatcttggagccgtcttcccaatacccccttggcttgagcctcaagtgccatcttactttaagggtttttcttgatgatcccatctggacaaggcaggagttgccctaggtgagtcacagagccctaggattcctcacggaaatctccagggtgcatggactaggaccctggaggcagaaatagttaccgaggggaagttacaggcctgagtgtgagtccctgtttggttgctgatgagctttgaggtccttggccagacactcaaccactttgaacctcagtttcctcatctgtagatgagtgtaacagtctagaacactcctctcagggatcatatccacaagtgctcgtgctgtgcgaggatctcactggttgtttattgaaaggctaagcaagtaggttgaggtccctgggaagcaggggtggatcctgtgtcaccagggctgccccttaccctaaaccttggccccgacaacccacccacctgcccagctgctgatctgggacgatgcccgggagggcaaggactccaaggagaagctggtgctggagttcaccttcaccaagccagtgctttctgtgcgcatgcgccatgacaagatcgtgatcgtgctgaagaaccgcatctatgtgtactccttccccgacaatccccgaaagctgtttgagtttgatacccgggacaaccccaaggggctctgtgacctctgccccagcctggagaagcaactgctagtgttcccgggacacaagtgtgggagtctgcaacttgtggacctggcgagcacaaagcctggcacctcgtctgctccattcacgatcaatgcacatcagagtgacatagcctgtgtgtctctaaaccagccaggcactgtagtggcctcagcctcccagaagggtacccttattcgcctctttgacacacaatccaaggagaaactggtggagctgcgccgaggcactgaccctgccaccctctactgcattaacttcagccacgactcctccttcctctgcgcttccagtgataagggtactgtccatatctttgctctcaaggatacccgcctcaaccgccgctccgcgctggctcgcgtgggcaaggtggggcctatgattgggcagtacgtggactctcagtggagcctggcgagcttcactgtgcctgctgagtcagcttgcatctgcgccttcggtcgcaatacttccaagaacgtcaactctgtcattgccatctgcgtagatgggaccttccacaaatatgtcttcactcctgatggaaactgcaacagagaggctttcgacgtgtaccttgacatctgtgatgatgatgacttttaaggaccctgggggctgtgctagggacctgcagtggcagaactgcagagctgagccttggcagtggggcgtgcttggaagccaccagccagcaagcattaatggggctggtgcccactttccactcagcagagctatgtctaaataaagagctcacttccccccagc

SEQ ID NO: 313317 - DNA, 2152 bp, Homo sapiens
agcggggaagtagggcctgatgtaaacacccgagccgggctccaaggcccgggaggtcagaaaaccgggccgcgggcggcaccgacagctggggcccgggtcagggacacgcggaggtcaggccggtgaaggcggcaggaagctggagcacgatcccaggaggaacaatcctgcaccatgactcaacagccacttcgaggagtgaccagcctgcgtttcaaccaagaccaaagctgcttttgctgcgccatggagacaggtgtgcgcatctacaacgtggagcccttgatggagaaggggcatctgggcaccccaaggtactggcagatgaagacgtcagagtacttcagagtcacacagagaggaggcctacagcttggaagtcatggatcttatagcttgagaagcttggtgctttgttttcattttaaaaattctgattgagtgcctcctgtgtgccatgccctagagcacttactgtgagcctggaactgccctaagcactttacgtttattaactcatttaatcctcacagtaactctatggggtaggaaggatcattatccccatctttaccgatgaggaaactgaggcccagtgcagttaagtgactcatccaaggtcacacaagcaataggttttaaaatcttggagccgtcttcccaatacccccttggcttgagcctcaagtgccatcttactttaagggtttttcttgatgatcccatctggacaaggcaggagttgccctaggtgagtcacagagccctaggattcctcacggaaatctccagggtgcatggactaggaccctggaggcagaaatagttaccgaggggaagttacaggcctgagtgtgagtccctgtttggttgctgatgagctttgaggtccttggccagacactcaaccactttgaacctcagtttcctcatctgtagatgagtgtaacagtctagaacactcctctcagggatcatatccacaagtgctcgtgctgtgcgaggatctcactggttgtttattgaaaggctaagcaagtaggttgaggtccctgggaagcaggggtggatcctgtgtcaccagggctgccccttaccctaaaccttggccccgacaacccacccacctgcccagctgctgatctgggacgatgcccgggagggcaaggactccaaggagaagctggtgctggagttcaccttcaccaagccagtgctttctgtgcgcatgcgccatgacaagatcgtgatcgtgctgaagaaccgcatctatgtgtactccttccccgacaatccccgaaagctgtttgagtttgatacccgggacaaccccaaggggctctgtgacctctgccccagcctggagaagcaactgctagtgttcccgggacacaagtgtgggagtctgcaacttgtggacctggcgagcacaaagcctggcacctcgtctgctccattcacgatcaatgcacatcagagtgacatagcctgtgtgtctctaaaccagccaggcactgtagtggcctcagcctcccagaagggtacccttattcgcctctttgacacacaatccaaggagaaactggtggagctgcgccgaggcactgaccctgccaccctctactgcattaacttcagccacgactcctccttcctctgcgcttccagtgataagggtactgtccatatctttgctctcaaggatacccgcctcaaccgccgctccgcgctggctcgcgtgggcaaggtggggcctatgattgggcagtacgtggactctcagtggagcctggcgagcttcactgtgcctgctgagtcagcttgcatctgcgccttcggtcgcaatacttccaagaacgtcaactctgtcattgccatctgcgtagatgggaccttccacaaatatgtcttcactcctgatggaaactgcaacagagaggctttcgacgtgtaccttgacatctgtgatgatgatgacttttaaggaccctgggggctgtgctagggacctgcagtggcagaactgcagagctgagccttggcagtggggcgtgcttggaagccaccagccagcaagcattaatggggctggtgcccactttccactcagcagagctatgtctaaataaagagctcacttccccccagc

SEQ ID NO: 313318 - DNA, 1930 bp, Homo sapiens
agcggggaagtagggcctgatgtaaacacccgagccgggctccaaggcccgggaggtcagaaaaccgggccgcgggcggcaccgacagctggggcccgggtcagggacacgcggaggtcaggccggtgaaggcggcaggaagctggagcacgatcccaggaggaacaatcctgcaccatgactcaacagccacttcgaggagtgaccagcctgcgtttcaaccaagaccaaagctgcttttgctgcgccatggagacaggtgtgcgcatctacaacgtggagcccttgatggagaaggggcatctggaccacgagcaggtgggcagcatgggcttggtggagatgctgcaccgctccaaccttctggccttggtgggcggtggtagtagtcccaagttctcagagatctcagtgctgatctgggacgatgcccgggagggcaaggactccaaggagaagctggtgctggagttcaccttcaccaagccagtgctttctgtgcgcatgcgccatgacaagatcgtgatcgtgctgaagaaccgcatctatgtgtactccttccccgacaatccccgaaagctgtttgagtttgatacccgggacaaccccaaggggctctgtgacctctgccccagcctggagaagcaactgctagtgttcccgggacacaagtgtgggagtctgcaacttgtggacctggcgagcacaaagcctggcacctcgtctgctccattcacgatcaatgcacatcagagtgacatagcctgtgtgtctctaaaccagccaggcactgtagtggcctcagcctcccagaagggtacccttattcgcctctttgacacacaatccaaggagaaactggtggagctgcgccgaggcactgaccctgccaccctctactgcattaacttcagccacgactcctccttcctctgcgcttccagtgataagggtactgtccatatctttgctctcaaggatacccgcctcaaccgccgctccgcgcgtgagtaccccctccccaccctaccgtgtccctgtccccctgcccatttaccatacctgggcttagccagtgctgcctgcaggctggctcgcgtgggcaaggtggggcctatgattgggcagtacgtggactctcagtggagcctggcgagcttcactgtgcctgctgagtcagcttgcatctgcgccttcggtcgcaatacttccaagaacgtcaactctgtcattgtggtgagtgggaacagccccttggttgggggtactgcatggggcaaaggcctgcaggttggacctgaaaggattttagggccatgtgaggctcagcttcatcatcagtaagggggacagcactgggcaaaggcctggaggcagaccctaggtcctgagatgcctgagaggactggagcctgtggctgtggcagcctctgaccttttaccaccccccctcccccagccatctgcgtagatgggaccttccacaaatatgtcttcactcctgatggaaactgcaacagagaggctttcgacgtgtaccttgacatctgtgatgatgatgacttttaaggaccctgggggctgtgctagggacctgcagtggcagaactgcagagctgagccttggcagtggggcgtgcttggaagccaccagccagcaagcattaatggggctggtgcccactttccactcagcagagctatgtctaaataaagagctcacttccccccagcacttcttgatgactgtgtgccccaagggccaggccagagacccaggaaggcagcgaccccttgggatccctaacctggaggaaattgccagggacccagagggagtgccctaatccaacctggggattttttaaaagcttcctaggaagagatgatctccgatgtgatgaatacgaataaaaggcccttaatggca

SEQ ID NO: 313319 - DNA, 1320 bp, Homo sapiens
agcggggaagtagggcctgatgtaaacacccgagccgggctccaaggcccgggaggtcagaaaaccgggccgcgggcggcaccgacagctggggcccgggtcagggacacgcggaggtcaggccggtgaaggcggcaggaagctggagcacgatcccaggaggaacaatcctgcaccatgactcaacagccacttcgaggagtgaccagcctgcgtttcaaccaagaccaaagctgcttttgctgcgccatggagacaggtgtgcgcatctacaacgtggagcccttgatggagaaggggcatctggtgctgatctgggacgatgcccgggagggcaaggactccaaggagaagctggtgctggagttcaccttcaccaagccagtgctttctgtgcgcatgcgccatgacaagatcgtgatcgtgctgaagaaccgcatctatgtgtactccttccccgacaatccccgaaagctgtttgagtttgatacccgggacaaccccaaggggctctgtgacctctgccccagcctggagaagcaactgctagtgttcccgggacacaagtgtgggagtctgcaacttgtggacctggcgagcacaaagcctggcacctcgtctgctccattcacgatcaatgcacatcagagtgacatagcctgtgtgtctctaaaccagccaggcactgtagtggcctcagcctcccagaagggtacccttattcgcctctttgacacacaatccaaggagaaactggtggagctgcgccgaggcactgaccctgccaccctctactgcattaacttcagccacgactcctccttcctctgcgcttccagtgataagggtactgtccatatctttgctctcaaggatacccgcctcaaccgccgctccgcgctggctcgcgtgggcaaggtggggcctatgattgggcagtacgtggactctcagtggagcctggcgagcttcactgtgcctgctgagtcagcttgcatctgcgccttcggtcgcaatacttccaagaacgtcaactctgtcattgccatctgcgtagatgggaccttccacaaatatgtcttcactcctgatggaaactgcaacagagaggctttcgacgtgtaccttgacatctgtgatgatgatgacttttaaggaccctgggggctgtgctagggacctgcagtggcagaactgcagagctgagccttggcagtggggcgtgcttggaagccaccagccagcaagcattaatggggctggtgcccactttccactcagcagagctatgtctaaataaagagctcacttccccccagc

SEQ ID NO: 313320 - DNA, 1650 bp, Homo sapiens
agcggggaagtagggcctgatgtaaacacccgagccgggctccaaggcccgggaggtcagaaaaccgggccgcgggcggcaccgacagctggggcccgggtcagggacacgcggaggtcaggccggtgaaggcggcaggaagctggagcacgatcccaggaggaacaatcctgcaccatgactcaacagccacttcgaggagtgaccagcctgcgtttcaaccaagaccaaagctgcttttgctgcgccatggagacaggtgtgcgcatctacaacgtggagcccttgatggagaaggggcatctggaccacgagcaggtgggcagcatgggcttggtggagatgctgcaccgctccaaccttctggccttggtgggcggtggtagtagtcccaagttctcagagatctcagtgctgatctgggacgatgcccgggagggcaaggactccaaggagaagctggtgctggagttcaccttcaccaagccagtgctttctgtgcgcatgcgccatgacaagatcgtgatcgtgctgaagaaccgcatctatgtgtactccttccccgacaatccccgaaagctgtttgagtttgatacccgggacaaccccaaggggctctgtgacctctgccccagcctggagaagcaactgctagtgttcccgggacacaagtgtgggagtctgcaacttgtggacctggcgagcacaaagcctggcacctcgtctgctccattcacgatcaatgcacatcagagtgacatagcctgtgtgtctctaaaccagccaggcactgtagtggcctcagcctcccagaagggtacccttattcgcctctttgacacacaatccaaggagaaactggtggagctgcgccgaggcactgaccctgccaccctctactgcattaacttcagccacgactcctccttcctctgcgcttccagtgataagggtactgtccatatctttgctctcaaggatacccgcctcaaccgccgctccgcgctggctcgcgtgggcaaggtggggcctatgattgggcagtacgtggactctcagtggagcctggcgagcttcactgtgcctgctgagtcagcttgcatctgcgccttcggtcgcaatacttccaagaacgtcaactctgtcattgtggtgagtgggaacagccccttggttgggggtactgcatggggcaaaggcctgcaggttggacctgaaaggattttagggccatgtgaggctcagcttcatcatcagtaagggggacagcactgggcaaaggcctggaggcagaccctaggtcctgagatgcctgagaggactggagcctgtggctgtggcagcctctgaccttttaccaccccccctcccccagccatctgcgtagatgggaccttccacaaatatgtcttcactcctgatggaaactgcaacagagaggctttcgacgtgtaccttgacatctgtgatgatgatgacttttaaggaccctgggggctgtgctagggacctgcagtggcagaactgcagagctgagccttggcagtggggcgtgcttggaagccaccagccagcaagcattaatggggctggtgcccactttccactcagcagagctatgtctaaataaagagctcacttccccccagc

SEQ ID NO: 313321 - DNA, 2510 bp, Homo sapiens
agcggggaagtagggcctgatgtaaacacccgagccgggctccaaggcccgggaggtcagaaaaccgggccgcgggcggcaccgacagctggggcccgggtcagggacacgcggaggtcaggccggtgaaggcggcaggaagctggagcacgatcccaggaggaacaatcctgcaccatgactcaacagccacttcgaggagtgaccagcctgcgtttcaaccaagaccaaagctgcttttgctgcgccatggagacaggtgtgcgcatctacaacgtggagcccttgatggagaaggggcatctgggtgagctgttggcaggggaggggcaatgggcagaagagctgggctgggcattggctcccacctccactgacaccctggtccctgtccagaccacgagcaggtgggcagcatgggcttggtggagatgctgcaccgctccaaccttctggccttggtgggcggtggtagtagtcccaagttctcagagatctcaggtaagtgccctcatcctgccctttggcccagatttctcggattcctggcctcccacaggcaccccaaggtactggcagatgaagacgtcagagtacttcagagtcacacagagaggaggcctacagcttggaagtcatggatcttatagcttgagaagcttggtgctttgttttcattttaaaaattctgattgagtgcctcctgtgtgccatgccctagagcacttactgtgagcctggaactgccctaagcactttacgtttattaactcatttaatcctcacagtaactctatggggtaggaaggatcattatccccatctttaccgatgaggaaactgaggcccagtgcagttaagtgactcatccaaggtcacacaagcaataggttttaaaatcttggagccgtcttcccaatacccccttggcttgagcctcaagtgccatcttactttaagggtttttcttgatgatcccatctggacaaggcaggagttgccctaggtgagtcacagagccctaggattcctcacggaaatctccagggtgcatggactaggaccctggaggcagaaatagttaccgaggggaagttacaggcctgagtgtgagtccctgtttggttgctgatgagctttgaggtccttggccagacactcaaccactttgaacctcagtttcctcatctgtagatgagtgtaacagtctagaacactcctctcagggatcatatccacaagtgctcgtgctgtgcgaggatctcactggttgtttattgaaaggctaagcaagtaggttgaggtccctgggaagcaggggtggatcctgtgtcaccagggctgccccttaccctaaaccttggccccgacaacccacccacctgcccagctgctgatctgggacgatgcccgggagggcaaggactccaaggagaagctggtgctggagttcaccttcaccaagccagtgctttctgtgcgcatgcgccatgacaagatcgtgatcgtgctgaagaaccgcatctatgtgtactccttccccgacaatccccgaaagctgtttgagtttgatacccgggacaaccccaaggggctctgtgacctctgccccagcctggagaagcaactgctagtgttcccgggacacaagtgtgggagtctgcaacttgtgccaggcactgtagtggcctcagcctcccagaagggtacccttattcgcctctttgacacacaatccaaggagaaactggtggagctgcgccgaggcactgaccctgccaccctctactgcattaacttcagccacgactcctccttcctctgcgcttccagtgataagggtactgtccatatctttgctctcaaggatacccgcctcaaccgccgctccgcgctggctcgcgtgggcaaggtggggcctatgattgggcagtacgtggactctcagtggagcctggcgagcttcactgtgcctgctgagtcagcttgcatctgcgccttcggtcgcaatacttccaagaacgtcaactctgtcattgccatctgcgtagatgggaccttccacaaatatgtcttcactcctgatggaaactgcaacagagaggctttcgacgtgtaccttgacatctgtgatgatgatgacttttaaggaccctgggggctgtgctagggacctgcagtggcagaactgcagagctgagccttggcagtggggcgtgcttggaagccaccagccagcaagcattaatggggctggtgcccactttccactcagcagagctatgtctaaataaagagctcacttccccccagcacttcttgatgactgtgtgccccaagggccaggccagagacccaggaaggcagcgaccccttgggatccctaacctggaggaaattgccagggacccagagggagtgccctaatccaacctggggattttttaaaagcttcctaggaagagatgatctccgatgtgatgaatacgaataaaaggcccttaatggca

SEQ ID NO: 313322 - DNA, 2712 bp, Homo sapiens
agcggggaagtagggcctgatgtaaacacccgagccgggctccaaggcccgggaggtcagaaaaccgggccgcgggcggcaccgacagctggggcccgggtcagggacacgcggaggtcaggccggtgaaggcggcaggaagctggagcacgatcccaggaggaacaatcctgcaccatgactcaacagccacttcgaggagtgaccagcctgcgtttcaaccaagaccaaagctgcttttgctgcgccatggagacaggtgtgcgcatctacaacgtggagcccttgatggagaaggggcatctgggtgagctgttggcaggggaggggcaatgggcagaagagctgggctgggcattggctcccacctccactgacaccctggtccctgtccagaccacgagcaggtgggcagcatgggcttggtggagatgctgcaccgctccaaccttctggccttggtgggcggtggtagtagtcccaagttctcagagatctcaggtaagtgccctcatcctgccctttggcccagatttctcggattcctggcctcccacaggcaccccaaggtactggcagatgaagacgtcagagtacttcagagtcacacagagaggaggcctacagcttggaagtcatggatcttatagcttgagaagcttggtgctttgttttcattttaaaaattctgattgagtgcctcctgtgtgccatgccctagagcacttactgtgagcctggaactgccctaagcactttacgtttattaactcatttaatcctcacagtaactctatggggtaggaaggatcattatccccatctttaccgatgaggaaactgaggcccagtgcagttaagtgactcatccaaggtcacacaagcaataggttttaaaatcttggagccgtcttcccaatacccccttggcttgagcctcaagtgccatcttactttaagggtttttcttgatgatcccatctggacaaggcaggagttgccctaggtgagtcacagagccctaggattcctcacggaaatctccagggtgcatggactaggaccctggaggcagaaatagttaccgaggggaagttacaggcctgagtgtgagtccctgtttggttgctgatgagctttgaggtccttggccagacactcaaccactttgaacctcagtttcctcatctgtagatgagtgtaacagtctagaacactcctctcagggatcatatccacaagtgctcgtgctgtgcgaggatctcactggttgtttattgaaaggctaagcaagtaggttgaggtccctgggaagcaggggtggatcctgtgtcaccagggctgccccttaccctaaaccttggccccgacaacccacccacctgcccagctgctgatctgggacgatgcccgggagggcaaggactccaaggagaagctggtgctggagttcaccttcaccaagccagtgctttctgtgcgcatgcgccatgacaagatcgtgatcgtgctgaagaaccgcatctatgtgtactccttccccgacaatccccgaaagctgtttgagtttgatacccgggacaaccccaaggggctctgtgacctctgccccagcctggagaagcaactgctagtgttcccgggacacaagtgtgggagtctgcaacttgtggtgagccgtccagtggacaagggtgggtaggttggtggactggcttccttgtggactcttggccccttccctccataccaccccaacctcagactcctccctcctaccccaggacctggcgagcacaaagcctggcacctcgtctgctccattcacgatcaatgcacatcagagtgacatagcctgtgtgtctctaaaccagccaggcactgtagtggcctcagcctcccagaagggtacccttattcgcctctttgacacacaatccaaggagaaactggtggagctgcgccgaggcactgaccctgccaccctctactgcattaacttcagccacgactcctccttcctctgcgcttccagtgataagggtactgtccatatctttgctctcaaggatacccgcctcaaccgccgctccgcgctggctcgcgtgggcaaggtggggcctatgattgggcagtacgtggactctcagtggagcctggcgagcttcactgtgcctgctgagtcagcttgcatctgcgccttcggtcgcaatacttccaagaacgtcaactctgtcattgccatctgcgtagatgggaccttccacaaatatgtcttcactcctgatggaaactgcaacagagaggctttcgacgtgtaccttgacatctgtgatgatgatgacttttaaggaccctgggggctgtgctagggacctgcagtggcagaactgcagagctgagccttggcagtggggcgtgcttggaagccaccagccagcaagcattaatggggctggtgcccactttccactcagcagagctatgtctaaataaagagctcacttccccccagcacttcttgatgactgtgtgccccaagggccaggccagagacccaggaaggcagcgaccccttgggatccctaacctggaggaaattgccagggacccagagggagtgccctaatccaacctggggattttttaaaagcttcctaggaagagatgatctccgatgtgatgaatacgaataaaaggcccttaatggca

SEQ ID NO: 313323 - DNA, 1859 bp, Homo sapiens
agcggggaagtagggcctgatgtaaacacccgagccgggctccaaggcccgggaggtcagaaaaccgggccgcgggcggcaccgacagctggggcccgggtcagggacacgcggaggtcaggccggtgaaggcggcaggaagctggagcacgatcccaggaggaacaatcctgcaccatgactcaacagccacttcgaggagtgaccagcctgcgtttcaaccaagaccaaagctgcttttgctgcgccatggagacaggtgtgcgcatctacaacgtggagcccttgatggagaaggggcatctgggtgagctgttggcaggggaggggcaatgggcagaagagctgggctgggcattggctcccacctccactgacaccctggtccctgtccagaccacgagcaggtgggcagcatgggcttggtggagatgctgcaccgctccaaccttctggccttggtgggcggtggtagtagtcccaagttctcagagatctcaggtaagtgccctcatcctgccctttggcccagatttctcggattcctggcctcccacaggcaccccaaggtactggcagatgaagacgtcagagtacttcagagtcacacagagaggaggcctacagcttggaagtcatggatcttatagcttgagaagcttggtgctttgttttcattttaaaaattctgattgagtgcctcctgtgtgccatgccctagagcacttactgtgagcctggaactgccctaagcactttacgtttattaactcatttaatcctcacagtaactctatggggtaggaaggatcattatccccatctttaccgatgaggaaactgaggcccagtgcagttaagtgactcatccaaggtcacacaagcaataggttttaaaatcttggagccgtcttcccaatacccccttggcttgagcctcaagtgccatcttactttaagggtttttcttgatgatcccatctggacaaggcaggagttgccctaggtgagtcacagagccctaggattcctcacggaaatctccagggtgcatggactaggaccctggaggcagaaatagttaccgaggggaagttacaggcctgagtgtgagtccctgtttggttgctgatgagctttgaggtccttggccagacagcgtgagtaccccctccccaccctaccgtgtccctgtccccctgcccatttaccatacctgggcttagccagtgctgcctgcaggctggctcgcgtgggcaaggtggggcctatgattgggcagtacgtggactctcagtggagcctggcgagcttcactgtgcctgctgagtcagcttgcatctgcgccttcggtcgcaatacttccaagaacgtcaactctgtcattgccatctgcgtagatgggaccttccacaaatatgtcttcactcctgatggaaactgcaacagagaggctttcgacgtgtaccttgacatctgtgatgatgatgacttttaaggaccctgggggctgtgctagggacctgcagtggcagaactgcagagctgagccttggcagtggggcgtgcttggaagccaccagccagcaagcattaatggggctggtgcccactttccactcagcagagctatgtctaaataaagagctcacttccccccagcacttcttgatgactgtgtgccccaagggccaggccagagacccaggaaggcagcgaccccttgggatccctaacctggaggaaattgccagggacccagagggagtgccctaatccaacctggggattttttaaaagcttcctaggaagagatgatctccgatgtgatgaatacgaataaaaggcccttaatggca

SEQ ID NO: 313324 - DNA, 796 bp, Homo sapiens
tatctttgctctcaaggatatggacagtacccttatcactggaagcgcagaggaaggaggagtcgtggctgaagttaatgcagtagagggtggcagggtcagtgcctctgcgcttccagtgataagggtactgtccatatctttgctctcaaggatacccgcctcaaccgccgctccgcgctggctcgcgtgggcaaggtggggcctatgattgggcagtacgtggactctcagtggagcctggcgagcttcactgtgcctgctgagtcagcttgcatctgcgccttcggtcgcaatacttccaagaacgtcaactctgtcattgccatctgcgtagatgggaccttccacaaatatgtcttcactcctgatggaaactgcaacagagaggctttcgacgtgtaccttgacatctgtgatgatgatgacttttaaggaccctgggggctgtgctagggacctgcagtggcagaactgcagagctgagccttggcagtggggcgtgcttggaagccaccagccagcaagcattaatggggctggtgcccactttccactcagcagagctatgtctaaataaagagctcacttccccccagcacttcttgatgactgtgtgccccaagggccaggccagagacccaggaaggcagcgaccccttgggatccctaacctggaggaaattgccagggacccagagggagtgccctaatccaacctggggattttttaaaagcttcctaggaagagatgatctccgatgtgatgaatacgaataaaaggcccttaatggca

SEQ ID NO: 313325 - DNA, 387 bp, Homo sapiens
ctagctggcggggcgtgcagctgagctgagccccctcagggttcttcgggttaagcttatcgtggagggttgaagtctggtcctcatccagctctgtccattctgagatgctgcctcctcttcagccgcccaccccaccccccatcttcacaccctagggctctgtgacctctgccccagcctggagaagcaactgctagtgttcccgggacacaagtgtgggagtctgcaacttgtggtgagccgtccagtggacaagggtgggtaggttggtggactggcttccttgtggactcttggccccttccctccataccaccccaacctcagactcctccctcctaccccaggacctggcgagcacaaagcctggcacctcgtctgctc

SEQ ID NO: 313326 - DNA, 368 bp, Homo sapiens
agtagggcctgatgtaaacacccgagccgggctccaaggcccgggaggtcagaaaaccgggccgcgggcggcaccgacagctggggcccgggtcagggacacgcggaggtcaggccggtgaaggcggcaggaagctggagcacgatcccagggttggttgggtctgggggaggctggaagtctttcgagtaggggtctaaggcagaggtcttgagtgggtgctggcgttggaaggagcatgcggctggtcttgggagaggggcgaggcatcccggacagagtcttggaatggaggtgcaaaaaaggggtgttgaaagttggagctgtccagagaataactctaaggcagagctgtccaaagaaagagc

SEQ ID NO: 313327 - DNA, 1621 bp, Homo sapiens
agcggggaagtagggcctgatgtaaacacccgagccgggctccaaggcccgggaggtcagaaaaccgggccgcgggcggcaccgacagctggggcccgggtcagggacacgcggaggtcaggccggtgaaggcggcaggaagctggagcacgatcccaggaggaacaatcctgcaccatgactcaacagccacttcgaggagtgaccagcctgcgtttcaaccaagaccaaagctgcttttgctgcgccatggagacaggtgtgcgcatctacaacgtggagcccttgatggagaaggggcatctggaccacgagcaggtgggcagcatgggcttggtggagatgctgcaccgctccaaccttctggccttggtgggcggtggtagtagtcccaagttctcagagatctcagtgctgatctgggacgatgcccgggagggcaaggactccaaggagaagctggtgctggagttcaccttcaccaagccagtgctttctgtgcgcatgcgccatgacaagatcgtgatcgtgctgaagaaccgcatctatgtgtactccttccccgacaatccccgaaagctgtttgagtttgatacccgggacaaccccaaggggctctgtgacctctgccccagcctggagaagcaactgctagtgttcccgggacacaagtgtgggagtctgcaacttgtggacctggcgagcacaaagcctggcacctcgtctgctccattcacgatcaatgcacatcagagtgacatagcctgtgtgtctctaaaccagccaggcactgtagtggcctcagcctcccagaagggtacccttattcgcctctttgacacacaatccaaggagaaactggtggagctgcgccgaggcactgaccctgccaccctctactgcattaacttcagccacgactcctccttcctctgcgcttccagtgataagggtactgtccatatctttgctctcaaggatacccgcctcaaccgccgctccgcgctggctcgcgtgggcaaggtggggcctatgattgggcagtacgtggactctcagtggagcctggcgagcttcactgtgcctgctgagtcagcttgcatctgcgccttcggtcgcaatacttccaagaacgtcaactctgtcattgccatctgcgtagatgggaccttccacaaatatgtcttcactcctgatggaaactgcaacagagaggctttcgacgtgtaccttgacatctgtgatgatgatgacttttaaggaccctgggggctgtgctagggacctgcagtggcagaactgcagagctgagccttggcagtggggcgtgcttggaagccaccagccagcaagcattaatggggctggtgcccactttccactcagcagagctatgtctaaataaagagctcacttccccccagcacttcttgatgactgtgtgccccaagggccaggccagagacccaggaaggcagcgaccccttgggatccctaacctggaggaaattgccagggacccagagggagtgccctaatccaacctggggattttttaaaagcttcctaggaagagatgatctccgatgtgatgaatacgaataaaaggcccttaatggca

SEQ ID NO: 313328 - DNA, 1170 bp, Homo sapiens
  misc_feature (1002)..(1002): n is a, c, g, or t
  misc_feature (1008)..(1010): n is a, c, g, or t
  misc_feature (1014)..(1014): n is a, c, g, or t
  misc_feature (1019)..(1019): n is a, c, g, or t
  misc_feature (1023)..(1024): n is a, c, g, or t
  misc_feature (1040)..(1040): n is a, c, g, or t
  misc_feature (1051)..(1051): n is a, c, g, or t
  misc_feature (1078)..(1078): n is a, c, g, or t
  misc_feature (1080)..(1080): n is a, c, g, or t
  misc_feature (1086)..(1086): n is a, c, g, or t
  misc_feature (1093)..(1094): n is a, c, g, or t
  misc_feature (1100)..(1100): n is a, c, g, or t
  misc_feature (1104)..(1104): n is a, c, g, or t
  misc_feature (1107)..(1107): n is a, c, g, or t
  misc_feature (1110)..(1110): n is a, c, g, or t
  misc_feature (1164)..(1164): n is a, c, g, or t
agcggggaagtagggcctgatgtaaacacccgagccgggctccaaggcccgggaggtcagaaaaccgggccgcgggcggcaccgacagctggggcccgggtcagggacacgcggaggtcaggccggtgaaggcggcaggaagctggagcacgatcccaggaggaacaatcctgcaccatgactcaacagccacttcgaggagtgaccagcctgcgtttcaaccaagaccaaagctgcttttgctgcgccatggagacaggtgtgcgcatctacaacgtggagcccttgatggagaaggggcatctggtgctgatctgggacgatgcccgggagggcaaggactccaaggagaagctggtgctggagttcaccttcaccaagccagtgctttctgtgcgcatgcgccatgacaagatcgtgatcgtgctgaagaaccgcatctatgtgtactccttccccgacaatccccgaaagctgtttgagtttgatacccgggacaaccccaaggggctctgtgacctctgccccagcctggagaagcaactgctagtgttcccgggacacaagtgtgggagtctgcaacttgtggacctggcgagcacaaagcctggcacctcgtctgctccattcacgatcaatgcacatcagagtgacatagcctgtgtgtctctaaaccagccaggcactgtagtggcctcagcctcccagaagggtacccttattcgcctctttgacacacaatccaaggagaaactggtggagctgcgccgaggcactgaccctgccaccctctactgcattaacttcagccacgactcctccttcctctgcgcttccagtgataagggtactgtccatatctttgctctcaaggatacccgcctcaaccgccgctccgcgctggctcgcgtgggcaaggtggggcctatgattgggcagtacgtggactctcagtggagcctggcgagcttcactgtgcctgctgagtcagcttgcatctcncttcgnnnatantccanacgnnactctgtattgcatcncgtgatggacntcacaatattttcactctgatgaactnanaaaagnttcgcgnntcttanactntanatntacttaagacctgggctgtcaggactcagtgaactcaactaccttgagtggggntgacac

SEQ ID NO: 313329 - DNA, 2038 bp, Homo sapiens
agcggggaagtagggcctgatgtaaacacccgagccgggctccaaggcccgggaggtcagaaaaccgggccgcgggcggcaccgacagctggggcccgggtcagggacacgcggaggtcaggccggtgaaggcggcaggaagctggagcacgatcccaggaggaacaatcctgcaccatgactcaacagccacttcgaggagtgaccagcctgcgtttcaaccaagaccaaagctgcttttgctgcgccatggagacaggtgtgcgcatctacaacgtggagcccttgatggagaaggggcatctggaccacgagcaggtgggcagcatgggcttggtggagatgctgcaccgctccaaccttctggccttggtgggcggtggtagtagtcccaagttctcagagatctcagtgctgatctgggacgatgcccgggagggcaaggactccaaggagaagctggtgctggagttcaccttcaccaagccagtgctttctgtgcgcatgcgccatgacaagatcgtgatcgtgctgaagaaccgcatctatgtgtactccttccccgacaatccccgaaagctgtttgagtttgatacccgggacaaccccaaggggctctgtgacctctgccccagcctggagaagcaactgctagtgttcccgggacacaagtgtgggagtctgcaacttgtggacctggcgagcacaaagcctggcacctcgtctgctccattcacgatcaatgcacatcagagtgacatagcctgtgtgtctctaaaccagccaggcactgtagtggcctcagcctcccagaagggtacccttattcgcctctttgacacacaatccaaggagaaactggtggagctgcgccgaggcactgaccctgccaccctctactgcattaacttcagccacgactcctccttcctctgcgcttccagtgataagggtactgtccatatctttgctctcaaggatacccgcctcaaccgccgctccgcgctggctcgcgtgggcaaggtggggcctatgattgggcagtacgtggactctcagtggagcctggcgagcttcactgtgcctgctgagtcagcttgcatctgcgccttcggtcgcaatacttccaagaacgtcaactctgtcattgccatctgcgtagatgggaccttccacaaatatgtcttcactcctgatggaaactgcaacagagaggctttcgacgtgtaccttgacatctgtgatgatgatgacttttaaggaccctgggggctgtgctagggacctgcagtggcagaactgcagagctgagccttggcagtggggcgtgcttggaagccaccagccagcaagcattaatggggctggtgcccactttccactcagcagagctatgtctaaataaagagctcacttccccccagcacttcttgatgactgtgtgccccaagggccaggccagagacccaggaaggcagcgaccccttgggatccctaacctggaggaaattgccagggacccagagggagtgccctaatccaacctggggattttttaaaagcttcctaggaagagatgatctccgatgtgatgaatacgaataaaaggcccttaatggcaaaaaaaaaaacaaacaacacacaaaaagaaacaaaaaacaaacacacaaacaaaaaaaacacaacaaaaaacaaccaaaacccaacaagaccaacaatcacaccaacactagacaaacacacaacaacacaacaaacacaacccacacaacactacagcgaggcggagcgtcgcgccgtacacacgccacaagtaaatacctccgttcgcagagaggccgccccccaccgttatttggcacgcacagcgtcaccacactaagatctaaagtactcgcagacgcacgcagccagtcccctcataatgtagtggtctaacaattatataaactacagcctcagagatagagggcggctgagcctcagatatacaaaaaataccaagtaataagtgggaagagaaaaatccctctgtaca

SEQ ID NO: 313330 - DNA, 3216 bp, Homo sapiens
ctgggctccgggaaagtcgtgcttttacggttccgggtactggctcccacaccactgcctcgtgtggggttgttcgcccgtgaaggggcaggacagggtgcgcgctggtggaggttagtgaggtcacacaccgggccgtggcgcctggtgcgctgggcgcttccacctcaaccttcgtagcaaacccagcggggttctgtgcctgcgcaccgtggttcctgcgttcatttactgtcccgtttctcactccggaaagtgtggctttgagtttgatctgcaggagtaggacgggcacagcgggtgtctggtcttcctcgcaccataaatcgcagagcgagccctctgtggtctctggatacagtataccaaagttagattaactgtactccttctcacaagccggtccaacgtttgcagcagtgaaaaagccctaagtgtcagggcctttggcgaagcctgtgtaagggaataaacactttccccagttttccaggcgcaaactgatggttttggagcattcaaggtctggtcggatggggcaggatggctgcgttgacacgtcttatttaatccacatcataggtctccaggtccgcccccgcctgtaacccccagcgccgcccctctggaagcctgggaggactgtgtgttgcgaaccggtgcggctactctcggccgccgcggaggtccgcgtcttgttagcagggaaggtttactcccccattgtgggtgaccaaggggctgagggcttggccggtttcgctttgctgggggcaaggcacgctctctctccccacccttccgggttccctcagacagtctcggccttgaggaacccccttcgcctccggtcccccagccaaccttcctccgctccccgcgccctccccggagaaccccactgtcactcgcgatgctccgaagacccgggaactaggcgaggaaggcggtggccgcctttttccagctgggaggaacaatcctgcaccatgactcaacagccacttcgaggagtgaccagcctgcgtttcaaccaagaccaaagctgcttttgctgcgccatggagacaggtgtgcgcatctacaacgtggagcccttgatggagaaggggcatctgggtgagctgttggcaggggaggggcaatgggcagaagagctgggctgggcattggctcccacctccactgacaccctggtccctgtccagaccacgagcaggtgggcagcatgggcttggtggagatgctgcaccgctccaaccttctggccttggtgggcggtggtagtagtcccaagttctcagagatctcaggtaagtgccctcatcctgccctttggcccagatttctcggattcctggcctcccacaggcaccccaaggtactggcagatgaagacgtcagagtacttcagagtcacacagagaggaggcctacagcttggaagtcatggatcttatagcttgagaagcttggtgctttgttttcattttaaaaattctgattgagtgcctcctgtgtgccatgccctagagcacttactgtgagcctggaactgccctaagcactttacgtttattaactcatttaatcctcacagtaactctatggggtaggaaggatcattatccccatctttaccgatgaggaaactgaggcccagtgcagttaagtgactcatccaaggtcacacaagcaataggttttaaaatcttggagccgtcttcccaatacccccttggcttgagcctcaagtgccatcttactttaagggtttttcttgatgatcccatctggacaaggcaggagttgccctaggtgagtcacagagccctaggattcctcacggaaatctccagggtgcatggactaggaccctggaggcagaaatagttaccgaggggaagttacaggcctgagtgtgagtccctgtttggttgctgatgagctttgaggtccttggccagacactcaaccactttgaacctcagtttcctcatctgtagatgagtgtaacagtctagaacactcctctcagggatcatatccacaagtgctcgtgctgtgcgaggatctcactggttgtttattgaaaggctaagcaagtaggttgaggtccctgggaagcaggggtggatcctgtgtcaccagggctgccccttaccctaaaccttggccccgacaacccacccacctgcccagctgctgatctgggacgatgcccgggagggcaaggactccaaggagaagctggtgctggagttcaccttcaccaagccagtgctttctgtgcgcatgcgccatgacaagatcgtgatcgtgctgaagaaccgcatctatgtgtactccttccccgacaatccccgaaagctgtttgagtttgatacccgggacaaccccaaggggctctgtgacctctgccccagcctggagaagcaactgctagtgttcccgggacacaagtgtgggagtctgcaacttgtggacctggcgagcacaaagcctggcacctcgtctgctccattcacgatcaatgcacatcagagtgacatagcctgtgtgtctctaaaccagccaggcactgtagtggcctcagcctcccagaagggtacccttattcgcctctttgacacacaatccaaggagaaactggtggagctgcgccgaggcactgaccctgccaccctctactgcattaacttcagccacgactcctccttcctctgcgcttccagtgataagggtactgtccatatctttgctctcaaggatacccgcctcaaccgccgctccgcgctggctcgcgtgggcaaggtggggcctatgattgggcagtacgtggactctcagtggagcctggcgagcttcactgtgcctgctgagtcagcttgcatctgcgccttcggtcgcaatacttccaagaacgtcaactctgtcattgccatctgcgtagatgggaccttccacaaatatgtcttcactcctgatggaaactgcaacagagaggctttcgacgtgtaccttgacatctgtgatgatgatgacttttaaggaccctgggggctgtgctagggacctgcagtggcagaactgcagagctgagccttggcagtggggcgtgcttggaagccaccagccagcaagcattaatggggctggtgcccactttccactcagcagagctatgtctaaataaagagctcacttccccccagc

SEQ ID NO: 313331 - DNA, 3127 bp, Homo sapiens
ctgggctccgggaaagtcgtgcttttacggttccgggtactggctcccacaccactgcctcgtgtggggttgttcgcccgtgaaggggcaggacagggtgcgcgctggtggaggttagtgaggtcacacaccgggccgtggcgcctggtgcgctgggcgcttccacctcaaccttcgtagcaaacccagcggggttctgtgcctgcgcaccgtggttcctgcgttcatttactgtcccgtttctcactccggaaagtgtggctttgagtttgatctgcaggagtaggacgggcacagcgggtgtctggtcttcctcgcaccataaatcgcagagcgagccctctgtggtctctggatacagtataccaaagttagattaactgtactccttctcacaagccggtccaacgtttgcagcagtgaaaaagccctaagtgtcagggcctttggcgaagcctgtgtaagggaataaacactttccccagttttccaggcgcaaactgatggttttggagcattcaaggtctggtcggatggggcaggatggctgcgttgacacgtcttatttaatccacatcataggtctccaggtccgcccccgcctgtaacccccagcgccgcccctctggaagcctgggaggactgtgtgttgcgaaccggtgcggctactctcggccgccgcggaggtccgcgtcttgttagcagggaaggtttactcccccattgtgggtgaccaaggggctgagggcttggccggtttcgctttgctgggggcaaggcacgctctctctccccacccttccgggttccctcagacagtctcggccttgaggaacccccttcgcctccggtcccccagccaaccttcctccgctccccgcgccctccccggagaaccccactgtcactcgcgatgctccgaagacccgggaactaggcgaggaaggcggtggccgcctttttccagctgggaggaacaatcctgcaccatgactcaacagccacttcgaggagtgaccagcctgcgtttcaaccaagaccaaagctgcttttgctgcgccatggagacaggtgtgcgcatctacaacgtggagcccttgatggagaaggggcatctggaccacgagcaggtgggcagcatgggcttggtggagatgctgcaccgctccaaccttctggccttggtgggcggtggtagtagtcccaagttctcagagatctcaggtaagtgccctcatcctgccctttggcccagatttctcggattcctggcctcccacaggcaccccaaggtactggcagatgaagacgtcagagtacttcagagtcacacagagaggaggcctacagcttggaagtcatggatcttatagcttgagaagcttggtgctttgttttcattttaaaaattctgattgagtgcctcctgtgtgccatgccctagagcacttactgtgagcctggaactgccctaagcactttacgtttattaactcatttaatcctcacagtaactctatggggtaggaaggatcattatccccatctttaccgatgaggaaactgaggcccagtgcagttaagtgactcatccaaggtcacacaagcaataggttttaaaatcttggagccgtcttcccaatacccccttggcttgagcctcaagtgccatcttactttaagggtttttcttgatgatcccatctggacaaggcaggagttgccctaggtgagtcacagagccctaggattcctcacggaaatctccagggtgcatggactaggaccctggaggcagaaatagttaccgaggggaagttacaggcctgagtgtgagtccctgtttggttgctgatgagctttgaggtccttggccagacactcaaccactttgaacctcagtttcctcatctgtagatgagtgtaacagtctagaacactcctctcagggatcatatccacaagtgctcgtgctgtgcgaggatctcactggttgtttattgaaaggctaagcaagtaggttgaggtccctgggaagcaggggtggatcctgtgtcaccagggctgccccttaccctaaaccttggccccgacaacccacccacctgcccagctgctgatctgggacgatgcccgggagggcaaggactccaaggagaagctggtgctggagttcaccttcaccaagccagtgctttctgtgcgcatgcgccatgacaagatcgtgatcgtgctgaagaaccgcatctatgtgtactccttccccgacaatccccgaaagctgtttgagtttgatacccgggacaaccccaaggggctctgtgacctctgccccagcctggagaagcaactgctagtgttcccgggacacaagtgtgggagtctgcaacttgtggacctggcgagcacaaagcctggcacctcgtctgctccattcacgatcaatgcacatcagagtgacatagcctgtgtgtctctaaaccagccaggcactgtagtggcctcagcctcccagaagggtacccttattcgcctctttgacacacaatccaaggagaaactggtggagctgcgccgaggcactgaccctgccaccctctactgcattaacttcagccacgactcctccttcctctgcgcttccagtgataagggtactgtccatatctttgctctcaaggatacccgcctcaaccgccgctccgcgctggctcgcgtgggcaaggtggggcctatgattgggcagtacgtggactctcagtggagcctggcgagcttcactgtgcctgctgagtcagcttgcatctgcgccttcggtcgcaatacttccaagaacgtcaactctgtcattgccatctgcgtagatgggaccttccacaaatatgtcttcactcctgatggaaactgcaacagagaggctttcgacgtgtaccttgacatctgtgatgatgatgacttttaaggaccctgggggctgtgctagggacctgcagtggcagaactgcagagctgagccttggcagtggggcgtgcttggaagccaccagccagcaagcattaatggggctggtgcccactttccactcagcagagctatgtctaaataaagagctcacttccccccagc

SEQ ID NO: 313332 - DNA, 1471 bp, Homo sapiens
agcggggaagtagggcctgatgtaaacacccgagccgggctccaaggcccgggaggtcagaaaaccgggccgcgggcggcaccgacagctggggcccgggtcagggacacgcggaggtcaggccggtgaaggcggcaggaagctggagcacgatcccaggaggaacaatcctgcaccatgactcaacagccacttcgaggagtgaccagcctgcgtttcaaccaagaccaaagctgcttttgctgcgccatggagacaggtgtgcgcatctacaacgtggagcccttgatggagaaggggcatctggaccacgagcaggtgggcagcatgggcttggtggagatgctgcaccgctccaaccttctggccttggtgggcggtggtagtagtcccaagttctcagagatctcagtgctgatctgggacgatgcccgggagggcaaggactccaaggagaagctggtgctggagttcaccttcaccaagccagtgctttctgtgcgcatgcgccatgacaagatcgtgatcgtgctgaagaaccgcatctatgtgtactccttccccgacaatccccgaaagctgtttgagtttgatacccgggacaaccccaaggggctctgtgacctctgccccagcctggagaagcaactgctagtgttcccgggacacaagtgtgggagtctgcaacttgtggacctggcgagcacaaagcctggcacctcgtctgctccattcacgatcaatgcacatcagagtgacatagcctgtgtgtctctaaaccagccaggcactgtagtggcctcagcctcccagaagggtacccttattcgcctctttgacacacaatccaaggagaaactggtggagctgcgccgaggcactgaccctgccaccctctactgcattaacttcagccacgactcctccttcctctgcgcttccagtgataagggtactgtccatatctttgctctcaaggatacccgcctcaaccgccgctccgcgctggctcgcgtgggcaaggtggggcctatgattgggcagtacgtggactctcagtggagcctggcgagcttcactgtgcctgctgagtcagcttgcatctgcgccttcggtcgcaatacttccaagaacgtcaactctgtcattgtgcagagctgagccttggcagtggggcgtgcttggaagccaccagccagcaagcattaatggggctggtgcccactttccactcagcagagctatgtctaaataaagagctcacttccccccagcacttcttgatgactgtgtgccccaagggccaggccagagacccaggaaggcagcgaccccttgggatccctaacctggaggaaattgccagggacccagagggagtgccctaatccaacctggggattttttaaaagcttcctaggaagagatgatctccgatgtgatgaatacgaataaaaggcccttaatggca

SEQ ID NO: 313333 - DNA, 1458 bp, Homo sapiens
agcggggaagtagggcctgatgtaaacacccgagccgggctccaaggcccgggaggtcagaaaaccgggccgcgggcggcaccgacagctggggcccgggtcagggacacgcggaggtcaggccggtgaaggcggcaggaagctggagcacgatcccaggaggaacaatcctgcaccatgactcaacagccacttcgaggagtgaccagcctgcgtttcaaccaagaccaaagctgcttttgctgcgccatggagacaggtgtgcgcatctacaacgtggagcccttgatggagaaggggcatctggaccacgagcaggtgggcagcatgggcttggtggagatgctgcaccgctccaaccttctggccttggtgggcggtggtagtagtcccaagttctcagagatctcagtgctgatctgggacgatgcccgggagggcaaggactccaaggagaagctggtgctggagttcaccttcaccaagccagtgctttctgtgcgcatgcgccatgacaagatcgtgatcgtgctgaagaaccgcatctatgtgtactccttccccgacaatccccgaaagctgtttgagtttgatacccgggacaaccccaaggccgcccaccccaccccccatcttcacaccctagggctctgtgacctctgccccagcctggagaagcaactgctagtgttcccgggacacaagtgtgggagtctgcaacttgtggacctggcgagcacaaagcctggcacctcgtctgctccattcacgatcaatgcacatcagagtgacatagcctgtgtgtctctaaaccagccaggcactgtagtggcctcagcctcccagaagggtacccttattcgcctctttgacacacaatccaaggagaaactggtggagctgcgccgaggcactgaccctgccaccctctactgcattaacttcagccacgactcctccttcctctgcgcttccagtgataagggtactgtccatatctttgctctcaaggatacccgcctcaaccgccgctccgcgctggctcgcgtgggcaaggtggggcctatgattgggcagtacgtggactctcagtggagcctggcgagcttcactgtgcctgctgagtcagcttgcatctgcgccttcggtcgcaatacttccaagaacgtcaactctgtcattgccatctgcgtagatgggaccttccacaaatatgtcttcactcctgatggaaactgcaacagagaggctttcgacgtgtaccttgacatctgtgatgatgatgacttttaaggaccctgggggctgtgctagggacctgcagtggcagaactgcagagctgagccttggcagtggggcgtgcttggaagccaccagccagcaagcattaatggggctggtgcccactttccactcagcagagctatgtctaaataaagagctcacttccccccagc

SEQ ID NO: 313334 - DNA, 1888 bp, Homo sapiens
agcggggaagtagggcctgatgtaaacacccgagccgggctccaaggcccgggaggtcagaaaaccgggccgcgggcggcaccgacagctggggcccgggtcagggacacgcggaggtcaggccggtgaaggcggcaggaagctggagcacgatcccaggaggaacaatcctgcaccatgactcaacagccacttcgaggagtgaccagcctgcgtttcaaccaagaccaaagctgcttttgctgcgccatggagacaggtgtgcgcatctacaacgtggagcccttgatggagaaggggcatctggaccacgagcaggtgggcagcatgggcttggtggagatgctgcaccgctccaaccttctggccttggtgggcggtggtagtagtcccaagttctcagagatctcagtgctgatctgggacgatgcccgggagggcaaggactccaaggagaagctggtgctggagttcaccttcaccaagccagtgctttctgtgcgcatgcgccatgacaagatcgtgatcgtgctgaagaaccgcatctatgtgtactccttccccgacaatccccgaaagctgtttgagtttgatacccgggacaaccccaaggggctctgtgacctctgccccagcctggagaagcaactgctagtgttcccgggacacaagtgtgggagtctgcaacttgtggacctggcgagcacaaagcctggcacctcgtctgctccattcacgatcaatgcacatcagagtgacatagcctgtgtgtctctaaaccagccaggcactgtagtggcctcagcctcccagaagggtacccttattcgcctctttgacacacaatccaaggagaaactggtggagctgcgccgaggcactgaccctgccaccctctactgcattaacttcagccacgactcctccttcctctgcgcttccagtgataagggtactgtccatatctttgctctcaaggatacccgcctcaaccgccgctccgcgctggctcgcgtgggcaaggtggggcctatgattgggcagtacgtggactctcagtggagcctggcgagcttcactgtgcctgctgagtcagcttgcatctgcgccttcggtcgcaatacttccaagaacgtcaactctgtcattgtgcagagctgagccttggcagtggggcgtgcttggaagccaccagccagcaagcattaatggggctggtgcccactttccactcagcagagctatgtctaaataaagagctcacttccccccagcacttcttgatgactgtgtgccccaagggccaggccagagacccaggaaggcagcgaccccttgggatccctaacctggaggaaattgccagggacccagagggagtgccctaatccaacctggggattttttaaaagcttcctaggaagagatgatctccgatgtgatgaatacgaataaaaggcccttaatggcaaaaaaaaaaacaaacaacacacaaaaagaaacaaaaaacaaacacacaaacaaaaaaaacacaacaaaaaacaaccaaaacccaacaagaccaacaatcacaccaacactagacaaacacacaacaacacaacaaacacaacccacacaacactacagcgaggcggagcgtcgcgccgtacacacgccacaagtaaatacctccgttcgcagagaggccgccccccaccgttatttggcacgcacagcgtcaccacactaagatctaaagtactcgcagacgcacgcagccagtcccctcataatgtagtggtctaacaattatataaactacagcctcagagatagagggcggctgagcctcagatatacaaaaaataccaagtaataagtgggaagagaaaaatccctctgtaca

SEQ ID NO: 313335 - DNA, 2684 bp, Homo sapiens
agcggggaagtagggcctgatgtaaacacccgagccgggctccaaggcccgggaggtcagaaaaccgggccgcgggcggcaccgacagctggggcccgggtcagggacacgcggaggtcaggccggtgaaggcggcaggaagctggagcacgatcccaggaggaacaatcctgcaccatgactcaacagccacttcgaggagtgaccagcctgcgtttcaaccaagaccaaagctgcttttgctgcgccatggagacaggtgtgcgcatctacaacgtggagcccttgatggagaaggggcatctgggtgagctgttggcaggggaggggcaatgggcagaagagctgggctgggcattggctcccacctccactgacaccctggtccctgtccagaccacgagcaggtgggcagcatgggcttggtggagatgctgcaccgctccaaccttctggccttggtgggcggtggtagtagtcccaagttctcagagatctcaggtaagtgccctcatcctgccctttggcccagatttctcggattcctggcctcccacaggcaccccaaggtactggcagatgaagacgtcagagtacttcagagtcacacagagaggaggcctacagcttggaagtcatggatcttatagcttgagaagcttggtgctttgttttcattttaaaaattctgattgagtgcctcctgtgtgccatgccctagagcacttactgtgagcctggaactgccctaagcactttacgtttattaactcatttaatcctcacagtaactctatggggtaggaaggatcattatccccatctttaccgatgaggaaactgaggcccagtgcagttaagtgactcatccaaggtcacacaagcaataggttttaaaatcttggagccgtcttcccaatacccccttggcttgagcctcaagtgccatcttactttaagggtttttcttgatgatcccatctggacaaggcaggagttgccctaggtgagtcacagagccctaggattcctcacggaaatctccagggtgcatggactaggaccctggaggcagaaatagttaccgaggggaagttacaggcctgagtgtgagtccctgtttggttgctgatgagctttgaggtccttggccagacactcaaccactttgaacctcagtttcctcatctgtagatgagtgtaacagtctagaacactcctctcagggatcatatccacaagtgctcgtgctgtgcgaggatctcactggttgtttattgaaaggctaagcaagtaggttgaggtccctgggaagcaggggtggatcctgtgtcaccagggctgccccttaccctaaaccttggccccgacaacccacccacctgcccagctgctgatctgggacgatgcccgggagggcaaggactccaaggagaagctggtgctggagttcaccttcaccaagccagtgctttctgtgcgcatgcgccatgacaagatcgtgatcgtgctgaagaaccgcatctatgtgtactccttccccgacaatccccgaaagctgtttgagtttgatacccgggacaaccccaaggggctctgtgacctctgccccagcctggagaagcaactgctagtgttcccgggacacaagtgtgggagtctgcaacttgtggacctggcgagcacaaagcctggcacctcgtctgctccattcacgatcaatgcacatcagagtgacatagcctgtgtgtctctaaaccagccaggcactgtagtggcctcagcctcccagaagggtacccttattcgcctctttgacacacaatccaaggagaaactggtggagctgcgccgaggcactgaccctgccaccctctactgcattaacttcagccacgactcctccttcctctgcgcttccagtgataagggtactgtccatatctttgctctcaaggatacccgcctcaaccgccgctccgcgcgtgagtaccccctccccaccctaccgtgtccctgtccccctgcccatttaccatacctgggcttagccagtgctgcctgcaggctggctcgcgtgggcaaggtggggcctatgattgggcagtacgtggactctcagtggagcctggcgagcttcactgtgcctgctgagtcagcttgcatctgcgccttcggtcgcaatacttccaagaacgtcaactctgtcattgccatctgcgtagatgggaccttccacaaatatgtcttcactcctgatggaaactgcaacagagaggctttcgacgtgtaccttgacatctgtgatgatgatgacttttaaggaccctgggggctgtgctagggacctgcagtggcagaactgcagagctgagccttggcagtggggcgtgcttggaagccaccagccagcaagcattaatggggctggtgcccactttccactcagcagagctatgtctaaataaagagctcacttccccccagcacttcttgatgactgtgtgccccaagggccaggccagagacccaggaaggcagcgaccccttgggatccctaacctggaggaaattgccagggacccagagggagtgccctaatccaacctggggattttttaaaagcttcctaggaagagatgatctccgatgtgatgaatacgaataaaaggcccttaatggca

SEQ ID NO: 313336 - DNA, 2566 bp, Homo sapiens
agcggggaagtagggcctgatgtaaacacccgagccgggctccaaggcccgggaggtcagaaaaccgggccgcgggcggcaccgacagctggggcccgggtcagggacacgcggaggtcaggccggtgaaggcggcaggaagctggagcacgatcccaggaggaacaatcctgcaccatgactcaacagccacttcgaggagtgaccagcctgcgtttcaaccaagaccaaagctgcttttgctgcgccatggagacaggtgtgcgcatctacaacgtggagcccttgatggagaaggggcatctgggtgagctgttggcaggggaggggcaatgggcagaagagctgggctgggcattggctcccacctccactgacaccctggtccctgtccagaccacgagcaggtgggcagcatgggcttggtggagatgctgcaccgctccaaccttctggccttggtgggcggtggtagtagtcccaagttctcagagatctcaggtaagtgccctcatcctgccctttggcccagatttctcggattcctggcctcccacaggcaccccaaggtactggcagatgaagacgtcagagtacttcagagtcacacagagaggaggcctacagcttggaagtcatggatcttatagcttgagaagcttggtgctttgttttcattttaaaaattctgattgagtgcctcctgtgtgccatgccctagagcacttactgtgagcctggaactgccctaagcactttacgtttattaactcatttaatcctcacagtaactctatggggtaggaaggatcattatccccatctttaccgatgaggaaactgaggcccagtgcagttaagtgactcatccaaggtcacacaagcaataggttttaaaatcttggagccgtcttcccaatacccccttggcttgagcctcaagtgccatcttactttaagggtttttcttgatgatcccatctggacaaggcaggagttgccctaggtgagtcacagagccctaggattcctcacggaaatctccagggtgcatggactaggaccctggaggcagaaatagttaccgaggggaagttacaggcctgagtgtgagtccctgtttggttgctgatgagctttgaggtccttggccagacactcaaccactttgaacctcagtttcctcatctgtagatgagtgtaacagtctagaacactcctctcagggatcatatccacaagtgctcgtgctgtgcgaggatctcactggttgtttattgaaaggctaagcaagtaggttgaggtccctgggaagcaggggtggatcctgtgtcaccagggctgccccttaccctaaaccttggccccgacaacccacccacctgcccagctgctgatctgggacgatgcccgggagggcaaggactccaaggagaagctggtgctggagttcaccttcaccaagccagtgctttctgtgcgcatgcgccatgacaagatcgtgatcgtgctgaagaaccgcatctatgtgtactccttccccgacaatccccgaaagctgtttgagtttgatacccgggacaaccccaaggggctctgtgacctctgccccagcctggagaagcaactgctagtgttcccgggacacaagtgtgggagtctgcaacttgtggtgagccgtccagtggacaagggtgggtaggttggtggactggcttccttgtggactcttggccccttccctccataccaccccaacctcagactcctccctcctaccccaggacctggcgagcacaaagcctggcacctcgtctgctccattcacgatcaatgcacatcagagtgacatagcctgtgtgtctctaaaccagccaggcactgtagtggcctcagcctcccagaagggtacccttattcgcctctttgacacacaatccaaggagaaactggtggagctgcgccgaggcactgaccctgccaccctctactgcattaacttcagccacgactcctccttcctctgcgcttccagtgataagggtactgtccatatctttgctctcaaggatacccgcctcaaccgccgctccgcccatctgcgtagatgggaccttccacaaatatgtcttcactcctgatggaaactgcaacagagaggctttcgacgtgtaccttgacatctgtgatgatgatgacttttaaggaccctgggggctgtgctagggacctgcagtggcagaactgcagagctgagccttggcagtggggcgtgcttggaagccaccagccagcaagcattaatggggctggtgcccactttccactcagcagagctatgtctaaataaagagctcacttccccccagcacttcttgatgactgtgtgccccaagggccaggccagagacccaggaaggcagcgaccccttgggatccctaacctggaggaaattgccagggacccagagggagtgccctaatccaacctggggattttttaaaagcttcctaggaagagatgatctccgatgtgatgaatacgaataaaaggcccttaatggca

SEQ ID NO: 313337 - DNA, 1638 bp, Homo sapiens
agcggggaagtagggcctgatgtaaacacccgagccgggctccaaggcccgggaggtcagaaaaccgggccgcgggcggcaccgacagctggggcccgggtcagggacacgcggaggtcaggccggtgaaggcggcaggaagctggagcacgatcccaggaggaacaatcctgcaccatgactcaacagccacttcgaggagtgaccagcctgcgtttcaaccaagaccaaagctgcttttgctgcgccatggagacaggtgtgcgcatctacaacgtggagcccttgatggagaaggggcatctgggtgagctgttggcaggggaggggcaatgggcagaagagctgggctgggcattggctcccacctccactgacaccctggtccctgtccagaccacgagcaggtgggcagcatgggcttggtggagatgctgcaccgctccaaccttctggccttggtgggcggtggtagtagtcccaagttctcagagatctcaggtaagtgccctcatcctgccctttggcccagatttctcggattcctggcctcccacaggcaccccaaggtactggcagatgaagacgtcagagtacttcagagtcacacagagaggaggcctacagcttggaagtcatggatcttatagcttgagaagcttggtgctttgttttcattttaaaaattctgattgagtgcctcctgtgtgccatgccctagagcacttactgtgagcctggaactgccctaagcactttacgtttattaactcatttaatcctcacagtaactctatggggtaggaaggatcattatccccatctttaccgatgaggaaactgaggcccagtgcagttaagtgactcatccaaggtcacacaagcaataggttttaaaatcttggagccgtcttcccaatacccccttggcttgagcctcaagtgccatcttactttaagggtttttcttgatgatcccatctggacaaggcaggagttgccctaggtgagtcacagagccctaggattcctcacggaaatctccagggtgcatggactaggaccctggaggcagaaatagttaccgaggggaagttacaggcctgagtgtgagtccctgtttggttgctgatgagctttgaggtccttggccagacactcaaccactttgaacctcagtttcctcatctgtagatgagtgtaacagtctagaacactcctctcagggatcatatccacaagtgctcgtgctgtgcgaggatctcactggttgtttattgaaaggctaagcaagtaggttgaggtccctgggaagcaggggtggatcctgtgtcaccagggctgccccttaccctaaaccttggccccgacaacccacccacctgcccagctgctgatctgggacgatgcccgggagggcaaggactccaaggagaagctggtgctggagttcaccttcaccaagccagtgctttctgtgcgcatgcgccatgacaagatcgtgatcgtgctgaagaaccgcatctatgtgtactccttccccgacaatccccgaaagctgtttgagtttgatacccgggacaaccccaaggctctgtgacctcgtcctgcctgagatgggatcctctagatcgcctc

SEQ ID NO: 313338 - DNA, 3456 bp, Homo sapiens
gaattcggcacgagttcccgagcctgggagcaacctcagcttctagtatccagactccagcgccgccccgggcgcggaccccaaccccgacccagagcttctccagcggcggcgcagcgagcagggctccccgccttaacttcctccgcggggcccagccaccttcgggagtccgggttgcccacctgcaaactctccgccttctgcacctgccacccctgagccagcgcgggcgcccgagcgagtcatggccaacgcggggctgcagctgttgggcttcattctcgccttcctgggatggatcggcgccatcgtcagcactgccctgccccagtggaggatttactcctatgccggcgacaacatcgtgaccgcccaggccatgtacgaggggctgtggatgtcctgcgtgtcgcagagcaccgggcagatccagtgcaaagtctttgactccttgctgaatctgagcagcacattgcaagcaacccgtgccttgatggtggttggcatcctcctgggagtgatagcaatctttgtggccaccgttggcatgaagtgtatgaagtgcttggaagacgatgaggtgcagaagatgaggatggctgtcattgggggcgcgatatttcttcttgcaggtctggctattttagttgccacagcatggtatggcaatagaatcgttcaagaattctatgaccctatgaccccagtcaatgccaggtacgaatttggtcaggctctcttcactggctgggctgctgcttctctctgccttctgggaggtgccctactttgctgttcctgtccccgaaaaacaacctcttacccaacaccaaggccctatccaaaacctgcaccttccagcgggaaagactacgtgtgacacagaggcaaaaggagaaaatcatgttgaaacaaaccgaaaatggacattgagatactatcattaacattaggaccttagaattttgggtattgtaatctgaagtatggtattacaaaacaaacaaacaaacaaaaaacccatgtgttaaaatactcagtgctaaacatggcttaatcttattttatcttctttcctcaatataggagggaagatttttccatttgtattactgcttcccattgagtaatcatactcaaatgggggaaggggtgctccttaaatatatatagatatgtatatatacatgtttttctattaaaaatagacagtaaaatactattctcattatgttgatactagcatacttaaaatatctctaaaataggtaaatgtatttaattccatattgatgaagatgtttattggtatattttctttttcgtccttatatacatatgtaacagtcaaatatcatttactcttcttcattagctttgggtgcctttgccacaagacctagcctaatttaccaaggatgaattctttcaattcttcatgcgtgcccttttcatatacttattttattttttaccataatcttatagcacttgcatcgttattaagcccttatttgttttgtgtttcattggtctctatctcctgaatctaacacatttcatagcctacattttagtttctaaagccaagaagaatttattacaaatcagaactttggaggcaaatctttctgcatgaccaaagtgataaattcctgttgaccttcccacacaatccctgtactctgacccatagcactcttgtttgctttgaaaatatttgtccaattgagtagctgcatgctgttcccccaggtgttgtaacacaactttattgattgaatttttaagctacttattcatagttttatatccccctaaactacctttttgttccccattccttaattgtattgttttcccaagtgtaattatcatgcgttttatatcttcctaataaggtgtggtctgtttgtctgaacaaagtgctagactttctggagtgataatctggtgacaaatattctctctgtagctgtaagcaagtcacttaatctttctacctcttttttctatctgccaaattgagataatgatacttaaccagttagaagaggtagtgtgaatattaattagtttatattactctcattctttgaacatgaactatgcctatgtagtgtctttatttgctcagctggctgagacactgaagaagtcactgaacaaaacctacacacgtaccttcatgtgattcactgccttcctctctctaccagtctatttccactgaacaaaacctacacacataccttcatgtggttcagtgccttcctctctctaccagtctatttccactgaacaaaacctacgcacataccttcatgtggctcagtgccttcctctctctaccagtctatttccattctttcagctgtgtctgacatgtttgtgctctgttccattttaacaactgctcttacttttccagtctgtacagaatgctatttcacttgagcaagatgatgtaatggaaagggtgttggcactggtgtctggagacctggatttgagtcttggtgctatcaatcaccgtctgtgtttgagcaaggcatttggctgctgtaagcttattgcttcatctgtaagcggtggtttgtaattcctgatcttcccacctcacagtgatgttgtggggatccagtgagatagaatacatgtaagtgtggttttgtaatttaaaaagtgctatactaagggaaagaattgaggaattaactgcatacgttttggtgttgcttttcaaatgtttgaaaataaaaaaaatgttaagaaatgggtttcttgccttaaccagtctctcaagtgatgagacagtgaagtaaaattgagtgcactaaacgaataagattctgaggaagtcttatcttctgcagtgagtatggcccaatgctttctgtggctaaacagatgtaatgggaagaaataaaagcctacgtgttggtaaatccaacagcaagggagatttttgaatcataataactcataaggtgctatctgttcagtgatgccctcagagctcttgctgttagctggcagctgacgctgctaggatagttagtttggaaatggtacttcataataaactacacaaggaaagtcagccaccgtgtcttatgaggaattggacctaataaattttagtgtgccttccaaacctgagaatatatgcttttggaagttaaaatttaaatggcttttgccacatacatagatcttcatgatgtgtgagtgtaattccatgtggatatcagttaccaaacattacaaaaaaattttatggcccaaaatgaccaacgaaattgttacaatagaatttatccaattttgatctttttatattcttctaccacacctggaaacagaccaatagacattttggggttttataatgggaatttgtataaagcattactctttttcaataaattgttttttaatttaaaaaaagga

SEQ ID NO: 313339 - DNA, 268 bp, Homo sapiens
gcggccgcctactactactactgctcgaattcaagcttctaacgatgtacggggacatgtggatatcagttaccaaacattacaaaaaaattttatggcccaaaatgaccaacgaaattgttacaatagaatttatccaattttgatctttttatattcttctaccacacctggaaacagaccaatagacattttggggttttataatgggaatttgtataaagcattactctttttcaataaattgttttttaatttaaaaaaagga

SEQ ID NO: 313340 - DNA, 3163 bp, Homo sapiens
tctggagaagatactgtatattgggttaccagcggaaacatcagtatgactggggtctctagattcctagtccagttttctctcttccatacaacagtgacatatacttggtcttcttccatttttctcttgttggtccaagcatatttttacatgttttaaaatgttttctgccaggcacattgcaagcaacccgtgccttgatggtggttggcatcctcctgggagtgatagcaatctttgtggccaccgttggcatgaagtgtatgaagtgcttggaagacgatgaggtgcagaagatgaggatggctgtcattgggggcgcgatatttcttcttgcaggtctggctattttagttgccacagcatggtatggcaatagaatcgttcaagaattctatgaccctatgaccccagtcaatgccaggtacgaatttggtcaggctctcttcactggctgggctgctgcttctctctgccttctgggaggtgccctactttgctgttcctgtccccgaaaaacaacctcttacccaacaccaaggccctatccaaaacctgcaccttccagcgggaaagactacgtgtgacacagaggcaaaaggagaaaatcatgttgaaacaaaccgaaaatggacattgagatactatcattaacattaggaccttagaattttgggtattgtaatctgaagtatggtattacaaaacaaacaaacaaacaaaaaacccatgtgttaaaatactcagtgctaaacatggcttaatcttattttatcttctttcctcaatataggagggaagatttttccatttgtattactgcttcccattgagtaatcatactcaaatgggggaaggggtgctccttaaatatatatagatatgtatatatacatgtttttctattaaaaatagacagtaaaatactattctcattatgttgatactagcatacttaaaatatctctaaaataggtaaatgtatttaattccatattgatgaagatgtttattggtatattttctttttcgtccttatatacatatgtaacagtcaaatatcatttactcttcttcattagctttgggtgcctttgccacaagacctagcctaatttaccaaggatgaattctttcaattcttcatgcgtgcccttttcatatacttattttattttttaccataatcttatagcacttgcatcgttattaagcccttatttgttttgtgtttcattggtctctatctcctgaatctaacacatttcatagcctacattttagtttctaaagccaagaagaatttattacaaatcagaactttggaggcaaatctttctgcatgaccaaagtgataaattcctgttgaccttcccacacaatccctgtactctgacccatagcactcttgtttgctttgaaaatatttgtccaattgagtagctgcatgctgttcccccaggtgttgtaacacaactttattgattgaatttttaagctacttattcatagttttatatccccctaaactacctttttgttccccattccttaattgtattgttttcccaagtgtaattatcatgcgttttatatcttcctaataaggtgtggtctgtttgtctgaacaaagtgctagactttctggagtgataatctggtgacaaatattctctctgtagctgtaagcaagtcacttaatctttctacctcttttttctatctgccaaattgagataatgatacttaaccagttagaagaggtagtgtgaatattaattagtttatattactctcattctttgaacatgaactatgcctatgtagtgtctttatttgctcagctggctgagacactgaagaagtcactgaacaaaacctacacacgtaccttcatgtgattcactgccttcctctctctaccagtctatttccactgaacaaaacctacacacataccttcatgtggttcagtgccttcctctctctaccagtctatttccactgaacaaaacctacgcacataccttcatgtggctcagtgccttcctctctctaccagtctatttccattctttcagctgtgtctgacatgtttgtgctctgttccattttaacaactgctcttacttttccagtctgtacagaatgctatttcacttgagcaagatgatgtaatggaaagggtgttggcactggtgtctggagacctggatttgagtcttggtgctatcaatcaccgtctgtgtttgagcaaggcatttggctgctgtaagcttattgcttcatctgtaagcggtggtttgtaattcctgatcttcccacctcacagtgatgttgtggggatccagtgagatagaatacatgtaagtgtggttttgtaatttaaaaagtgctatactaagggaaagaattgaggaattaactgcatacgttttggtgttgcttttcaaatgtttgaaaataaaaaaaatgttaagaaatgggtttcttgccttaaccagtctctcaagtgatgagacagtgaagtaaaattgagtgcactaaacgaataagattctgaggaagtcttatcttctgcagtgagtatggcccaatgctttctgtggctaaacagatgtaatgggaagaaataaaagcctacgtgttggtaaatccaacagcaagggagatttttgaatcataataactcataaggtgctatctgttcagtgatgccctcagagctcttgctgttagctggcagctgacgctgctaggatagttagtttggaaatggtacttcataataaactacacaaggaaagtcagccaccgtgtcttatgaggaattggacctaataaattttagtgtgccttccaaacctgagaatatatgcttttggaagttaaaatttaaatggcttttgccacatacatagatcttcatgatgtgtgagtgtaattccatgtggatatcagttaccaaacattacaaaaaaattttatggcccaaaatgaccaacgaaattgttacaatagaatttatccaattttgatctttttatattcttctaccacacctggaaacagaccaatagacattttggggttttataatgggaatttgtataaagcattactctttttcaataaattgttttttaatttaaaaaaagga

SEQ ID NO: 313341 - DNA, 3320 bp, Homo sapiens
gaattcggcacgagttcccgagcctgggagcaacctcagcttctagtatccagactccagcgccgccccgggcgcggaccccaaccccgacccagagcttctccagcggcggcgcagcgagcagggctccccgccttaacttcctccgcggggcccagccaccttcgggagtccgggttgcccacctgcaaactctccgccttctgcacctgccacccctgagccagcgcgggcgcccgagcgagtcatggccaacgcggggctgcagctgttgggcttcattctcgccttcctgggatggatcggcgccatcgtcagcactgccctgccccagtggaggatttactcctatgccggcgacaacatcgtgaccgcccaggccatgtacgaggggctgtggatgtcctgcgtgtcgcagagcaccgggcagatccagtgcaaagtctttgactccttgctgaatctgagcagcacattgcaagcaacccgtgccttgatggtggttggcatcctcctgggagtgatagcaatctttgtggccaccgttggcatgaagtgtatgaagtgcttggaagacgatgaggtgcagaagatgaggatggctgtcattgggggcgcgatatttcttcttgcaggtctggctattttagttgccacagcatggtatggcaatagaatcgttcaagaattctatgaccctatgaccccagtcaatgccaggtacgaatttggtcaggctctcttcactggctgggctgctgcttctctctgccttctgggaggtgccctactttgctgttcctgtccccgaaaaacaacctcttacccaacaccaaggccctatccaaaacctgcaccttccagcgggaaagactacgtgtgacacagaggcaaaaggagaaaatcatgttgaaacaaaccgaaaatggacattgagatactatcattaacattaggaccttagaattttgggtattgtaatctgaagtatggtattacaaaacaaacaaacaaacaaaaaacccatgtgttaaaatactcagtgctaaacatggcttaatcttattttatcttctttcctcaatataggagggaagatttttccatttgtattactgcttcccattgagtaatcatactcaaatgggggaaggggtgctccttaaatatatatagatatgtatatatacatgtttttctattaaaaatagacagtaaaatactattctcattatgttgatactagcatacttaaaatatctctaaaataggtaaatgtatttaattccatattgatgaagatgtttattggtatattttctttttcgtccttatatacatatgtaacagtcaaatatcatttactcttcttcattagctttgggtgcctttgccacaagacctagcctaatttaccaaggatgaattctttcaattcttcatgcgtgcccttttcatatacttattttattttttaccataatcttatagcacttgcatcgttattaagcccttatttgttttgtgtttcattggtctctatctcctgaatctaacacatttcatagcctacattttagtttctaaagccaagaagaatttattacaaatcagaactttggaggcaaatctttctgcatgaccaaagtgataaattcctgttgaccttcccacacaatccctgtactctgacccatagcactcttgtttgctttgaaaatatttgtccaattgagtagctgcatgctgttcccccaggtgttgtaacacaactttattgattgaatttttaagctacttattcatagttttatatccccctaaactacctttttgttccccattccttaattgtattgttttcccaagtgtaattatcatgcgttttatatcttcctaataaggtgtggtctgtttgtctgaacaaagtgctagactttctggagtgataatctggtgacaaatattctctctgtagctgtaagcaagtcacttaatctttctacctcttttttctatctgccaaattgagataatgatacttaaccagttagaagaggtagtgtgaatattaattagtttatattactctcattctttgaacatgaactatgcctatgtagtgtctttatttgctcagctggctgagacactgaagaagtcactgaacaaaacctacacacgtaccttcatgtgattcactgccttcctctctctaccagtctatttccattctttcagctgtgtctgacatgtttgtgctctgttccattttaacaactgctcttacttttccagtctgtacagaatgctatttcacttgagcaagatgatgtaatggaaagggtgttggcactggtgtctggagacctggatttgagtcttggtgctatcaatcaccgtctgtgtttgagcaaggcatttggctgctgtaagcttattgcttcatctgtaagcggtggtttgtaattcctgatcttcccacctcacagtgatgttgtggggatccagtgagatagaatacatgtaagtgtggttttgtaatttaaaaagtgctatactaagggaaagaattgaggaattaactgcatacgttttggtgttgcttttcaaatgtttgaaaataaaaaaaatgttaagaaatgggtttcttgccttaaccagtctctcaagtgatgagacagtgaagtaaaattgagtgcactaaacgaataagattctgaggaagtcttatcttctgcagtgagtatggcccaatgctttctgtggctaaacagatgtaatgggaagaaataaaagcctacgtgttggtaaatccaacagcaagggagatttttgaatcataataactcataaggtgctatctgttcagtgatgccctcagagctcttgctgttagctggcagctgacgctgctaggatagttagtttggaaatggtacttcataataaactacacaaggaaagtcagccaccgtgtcttatgaggaattggacctaataaattttagtgtgccttccaaacctgagaatatatgcttttggaagttaaaatttaaatggcttttgccacatacatagatcttcatgatgtgtgagtgtaattccatgtggatatcagttaccaaacattacaaaaaaattttatggcccaaaatgaccaacgaaattgttacaatagaatttatccaattttgatctttttatattcttctaccacacctggaaacagaccaatagacattttggggttttataatgggaatttgtataaagcattactctttttcaataaattgttttttaatttaaaaaaagga

SEQ ID NO: 313342 - DNA, 3734 bp, Homo sapiens
gaattcggcacgagttcccgagcctgggagcaacctcagcttctagtatccagactccagcgccgccccgggcgcggaccccaaccccgacccagagcttctccagcggcggcgcagcgagcagggctccccgccttaacttcctccgcggggcccagccaccttcgggagtccgggttgcccacctgcaaactctccgccttctgcacctgccacccctgagccagcgcgggcgcccgagcgagtcatggccaacgcggggctgcagctgttgggcttcattctcgccttcctgggatggatcggcgccatcgtcagcactgccctgccccagtggaggatttactcctatgccggcgacaacatcgtgaccgcccaggccatgtacgaggggctgtggatgtcctgcgtgtcgcagagcaccgggcagatccagtgcaaagtctttgactccttgctgaatctgagcagcacattgcaagcaacccgtgccttgatggtggttggcatcctcctgggagtgatagcaatctttgtggccaccgttggcatgaagtgtatgaagtgcttggaagacgatgaggtgcagaagatgaggatggctgtcattgggggcgcgatatttcttcttgcaggtctggctattttagttgccacagcatggtatggcaatagaatcgttcaagaattctatgaccctatgaccccagtcaatgccaggtacgaatttggtcaggctctcttcactggctgggctgctgcttctctctgccttctgggaggtgccctactttgctgttcctgtccccgaaaaacaacctcttacccaacaccaaggccctatccaaaacctgcaccttccagcgggaaagactacgtgtgacacagaggcaaaaggagaaaatcatgttgaaacaaaccgaaaatggacattgagatactatcattaacattaggaccttagaattttgggtattgtaatctgaagtatggtattacaaaacaaacaaacaaacaaaaaacccatgtgttaaaatactcagtgctaaacatggcttaatcttattttatcttctttcctcaatataggagggaagatttttccatttgtattactgcttcccattgagtaatcatactcaaatgggggaaggggtgctccttaaatatatatagatatgtatatatacatgtttttctattaaaaatagacagtaaaatactattctcattatgttgatactagcatacttaaaatatctctaaaataggtaaatgtatttaattccatattgatgaagatgtttattggtatattttctttttcgtccttatatacatatgtaacagtcaaatatcatttactcttcttcattagctttgggtgcctttgccacaagacctagcctaatttaccaaggatgaattctttcaattcttcatgcgtgcccttttcatatacttattttattttttaccataatcttatagcacttgcatcgttattaagcccttatttgttttgtgtttcattggtctctatctcctgaatctaacacatttcatagcctacattttagtttctaaagccaagaagaatttattacaaatcagaactttggaggcaaatctttctgcatgaccaaagtgataaattcctgttgaccttcccacacaatccctgtactctgacccatagcactcttgtttgctttgaaaatatttgtccaattgagtagctgcatgctgttcccccaggtgttgtaacacaactttattgattgaatttttaagctacttattcatagttttatatccccctaaactacctttttgttccccattccttaattgtattgttttcccaagtgtaattatcatgcgttttatatcttcctaataaggtgtggtctgtttgtctgaacaaagtgctagactttctggagtgataatctggtgacaaatattctctctgtagctgtaagcaagtcacttaatctttctacctcttttttctatctgccaaattgagataatgatacttaaccagttagaagaggtagtgtgaatattaattagtttatattactctcattctttgaacatgaactatgcctatgtagtgtctttatttgctcagctggctgagacactgaagaagtcactgaacaaaacctacacacgtaccttcatgtgattcactgccttcctctctctaccagtctatttccactgaacaaaacctacacacataccttcatgtggttcagtgccttcctctctctaccagtctatttccactgaacaaaacctacgcacataccttcatgtggctcagtgccttcctctctctaccagtctatttccattctttcagctgtgtctgacatgtttgtgctctgttccattttaacaactgctcttacttttccagtctgtacagaatgctatttcacttgagcaagatgatgtaatggaaagggtgttggcactggtgtctggagacctggatttgagtcttggtgctatcaatcaccgtctgtgtttgagcaaggcatttggctgctgtaagcttattgcttcatctgtaagcggtggtttgtaattcctgatcttcccacctcacagtgatgttgtggggatccagtgagatagaatacatgtaagtgtggttttgtaatttaaaaagtgctatactaagggaaagaattgaggaattaactgcatacgttttggtgttgcttttcaaatgtttgaaaataaaaaaaatgttaagaaatgggtttcttgccttaaccagtctctcaagtgatgagacagtgaagtaaaattgagtgcactaaacgaataagattctgaggaagtcttatcttctgcagtgagtatggcccaatgctttctgtggctaaacagatgtaatgggaagaaataaaagcctacgtgttggtaaatccaacagcaagggagatttttgaatcataataactcataaggtgctatctgttcagtgatgccctcagagctcttgctgttagctggcagctgacgctgctaggatagttagtttggaaatggtacttcataataaactacacaaggaaagtcagccaccgtgtcttatgaggaattggacctaataaattttagtgtgccttccaaacctgagaatatatgcttttggaagttaaaatttaaatggcttttgccacatacatagatcttcatgatgtgtgagtgtaattccatgtggatatcagttaccaaacattacaaaaaaattttatggcccaaaatgaccaacgaaattgttacaatagaatttatccaattttgatctttttatattcttctaccacacctggaaacagaccaatagacattttggggttttataatgggaatttgtataaagcattactctttttcaataaattgttttttaatttaaaaaaaggaaaaaaagaaaactcgagtgttttttttttttttttttttttcaacgaaactgatctttactcaacaaagttctacacagggggatactcccccacctcggggccaatcccaaaacagacaggacaaagggcagacccggagcccccaaggggaaaaggtgaggagggaaataggacttgtgttaaaggccaatctggtccacaaaccccgggtaggggagaagggtgagaaacttaaaacttattgggcggaaaaccccccaaataatttacaaataa

SEQ ID NO: 313343 - DNA, 851 bp, Homo sapiens
gcggccgcctactactactactgctcgaattcaagcttctaacgatgtacggggaatgtaagtgtggttttgtaatttaaaaagtgctatactaagggaaagaattgaggaattaactgcatacgttttggtgttgcttttcaaatgtttgaaaataaaaaaaatgttaagaaatgggtttcttgccttaaccagtctctcaagtgatgagacagtgaagtaaaattgagtgcactaaacgaataagattctgaggaagtcttatcttctgcagtgagtatggcccaatgctttctgtggctaaacagatgtaatgggaagaaataaaagcctacgtgttggtaaatccaacagcaagggagatttttgaatcataataactcataaggtgctatctgttcagtgatgccctcagagctcttgctgttagctggcagctgacgctgctaggatagttagtttggaaatggtacttcataataaactacacaaggaaagtcagccaccgtgtcttatgaggaattggacctaataaattttagtgtgccttccaaacctgagaatatatgcttttggaagttaaaatttaaatggcttttgccacatacatagatcttcatgatgtgtgagtgtaattccatgtggatatcagttaccaaacattacaaaaaaattttatggcccaaaatgaccaacgaaattgttacaatagaatttatccaattttgatctttttatattcttctaccacacctggaaacagaccaatagacattttggggttttataatgggaatttgtataaagcattactctttttcaataaattgttttttaatttaaaaaaagga

SEQ ID NO: 313344 - DNA, 1216 bp, Homo sapiens
gaattcggcacgagttcccgagcctgggagcaacctcagcttctagtatccagactccagcgccgccccgggcgcggaccccaaccccgacccagagcttctccagcggcggcgcagcgagcagggctccccgccttaacttcctccgcggggcccagccaccttcgggagtccgggttgcccacctgcaaactctccgccttctgcacctgccacccctgagccagcgcgggcgcccgagcgagtcatggccaacgcggggctgcagctgttgggcttcattctcgccttcctgggatggatcggcgccatcgtcagcactgccctgccccagtggaggatttactcctatgccggcgacaacatcgtgaccgcccaggccatgtacgaggggctgtggatgtcctgcgtgtcgcagagcaccgggcagatccagtgcaaagtctttgactccttgctgaatctgagcagcacattgcaagcaacccgtgccttgatggtggttggcatcctcctgggagtgatagcaatctttgtggccaccgttggcatgaagtgtatgaagtgcttggaagacgatgaggtgcagaagatgaggatggctgtcattgggggcgcgatatttcttcttgcaggtctggctattttagttgccacagcatggtatggcaatagaatcgttcaagaattctatgaccctatgaccccagtcaatgccaggtacgaatttggtcaggctctcttcactggctgggctgctgcttctctctgccttctgggaggtgccctactttgctgttcctgtccccgaaaaacaacctcttacccaacaccaaggccctatccaaaacctgcaccttccagcgggaaagactacgtgtgacacagaggcaaaaggagaaaatcatgttgaaacaaaccgaaaatggacattgagatactatcattaacattaggaccttagaattttgggtattgtaatctgaagtatggtattacaaaacaaacaaacaaacaaaaaacccatgtgttaaaatactcagtgctaaacatggcttaatcttattttatcttctttcctcaatataggagggaagatttttccatttgtattactgcttcccattgagtaatcatactcaaatgggggaaggggtgctccttaaatatatatagatatgtatatatacatgtttttctattaaaaatagacagt

SEQ ID NO: 313345 - DNA, 3425 bp, Homo sapiens
gaattcggcacgagttcccgagcctgggagcaacctcagcttctagtatccagactccagcgccgccccgggcgcggaccccaaccccgacccagagcttctccagcggcggcgcagcgagcagggctccccgccttaacttcctccgcggggcccagccaccttcgggagtccgggttgcccacctgcaaactctccgccttctgcacctgccacccctgagccagcgcgggcgcccgagcgagtcatggccaacgcggggctgcagctgttgggcttcattctcgccttcctgggatggatcggcgccatcgtcagcactgccctgccccagtggaggatttactcctatgccggcgacaacatcgtgaccgcccaggccatgtacgaggggctgtggatgtcctgcgtgtcgcagagcaccgggcagatccagtgcaaagtctttgactccttgctgaatctgagcagcacattgcaagcaacccgtgccttgatggtggttggcatcctcctgggagtgatagcaatctttgtggccaccgttggcatgaagtgtatgaagtgcttggaagacgatgaggtgcagaagatgaggatggctgtctggctattttagttgccacagcatggtatggcaatagaatcgttcaagaattctatgaccctatgaccccagtcaatgccaggtacgaatttggtcaggctctcttcactggctgggctgctgcttctctctgccttctgggaggtgccctactttgctgttcctgtccccgaaaaacaacctcttacccaacaccaaggccctatccaaaacctgcaccttccagcgggaaagactacgtgtgacacagaggcaaaaggagaaaatcatgttgaaacaaaccgaaaatggacattgagatactatcattaacattaggaccttagaattttgggtattgtaatctgaagtatggtattacaaaacaaacaaacaaacaaaaaacccatgtgttaaaatactcagtgctaaacatggcttaatcttattttatcttctttcctcaatataggagggaagatttttccatttgtattactgcttcccattgagtaatcatactcaaatgggggaaggggtgctccttaaatatatatagatatgtatatatacatgtttttctattaaaaatagacagtaaaatactattctcattatgttgatactagcatacttaaaatatctctaaaataggtaaatgtatttaattccatattgatgaagatgtttattggtatattttctttttcgtccttatatacatatgtaacagtcaaatatcatttactcttcttcattagctttgggtgcctttgccacaagacctagcctaatttaccaaggatgaattctttcaattcttcatgcgtgcccttttcatatacttattttattttttaccataatcttatagcacttgcatcgttattaagcccttatttgttttgtgtttcattggtctctatctcctgaatctaacacatttcatagcctacattttagtttctaaagccaagaagaatttattacaaatcagaactttggaggcaaatctttctgcatgaccaaagtgataaattcctgttgaccttcccacacaatccctgtactctgacccatagcactcttgtttgctttgaaaatatttgtccaattgagtagctgcatgctgttcccccaggtgttgtaacacaactttattgattgaatttttaagctacttattcatagttttatatccccctaaactacctttttgttccccattccttaattgtattgttttcccaagtgtaattatcatgcgttttatatcttcctaataaggtgtggtctgtttgtctgaacaaagtgctagactttctggagtgataatctggtgacaaatattctctctgtagctgtaagcaagtcacttaatctttctacctcttttttctatctgccaaattgagataatgatacttaaccagttagaagaggtagtgtgaatattaattagtttatattactctcattctttgaacatgaactatgcctatgtagtgtctttatttgctcagctggctgagacactgaagaagtcactgaacaaaacctacacacgtaccttcatgtgattcactgccttcctctctctaccagtctatttccactgaacaaaacctacacacataccttcatgtggttcagtgccttcctctctctaccagtctatttccactgaacaaaacctacgcacataccttcatgtggctcagtgccttcctctctctaccagtctatttccattctttcagctgtgtctgacatgtttgtgctctgttccattttaacaactgctcttacttttccagtctgtacagaatgctatttcacttgagcaagatgatgtaatggaaagggtgttggcactggtgtctggagacctggatttgagtcttggtgctatcaatcaccgtctgtgtttgagcaaggcatttggctgctgtaagcttattgcttcatctgtaagcggtggtttgtaattcctgatcttcccacctcacagtgatgttgtggggatccagtgagatagaatacatgtaagtgtggttttgtaatttaaaaagtgctatactaagggaaagaattgaggaattaactgcatacgttttggtgttgcttttcaaatgtttgaaaataaaaaaaatgttaagaaatgggtttcttgccttaaccagtctctcaagtgatgagacagtgaagtaaaattgagtgcactaaacgaataagattctgaggaagtcttatcttctgcagtgagtatggcccaatgctttctgtggctaaacagatgtaatgggaagaaataaaagcctacgtgttggtaaatccaacagcaagggagatttttgaatcataataactcataaggtgctatctgttcagtgatgccctcagagctcttgctgttagctggcagctgacgctgctaggatagttagtttggaaatggtacttcataataaactacacaaggaaagtcagccaccgtgtcttatgaggaattggacctaataaattttagtgtgccttccaaacctgagaatatatgcttttggaagttaaaatttaaatggcttttgccacatacatagatcttcatgatgtgtgagtgtaattccatgtggatatcagttaccaaacattacaaaaaaattttatggcccaaaatgaccaacgaaattgttacaatagaatttatccaattttgatctttttatattcttctaccacacctggaaacagaccaatagacattttggggttttataatgggaatttgtataaagcattactctttttcaataaattgttttttaatttaaaaaaagga

SEQ ID NO: 313346 - DNA, 2277 bp, Homo sapiens
gaattcggcacgagttcccgagcctgggagcaacctcagcttctagtatccagactccagcgccgccccgggcgcggaccccaaccccgacccagagcttctccagcggcggcgcagcgagcagggctccccgccttaacttcctccgcggggcccagccaccttcgggagtccgggttgcccacctgcaaactctccgccttctgcacctgccacccctgagccagcgcgggcgcccgagcgagtcatggccaacgcggggctgcagctgttgggcttcattctcgccttcctgggatggatcggcgccatcgtcagcactgccctgccccagtggaggatttactcctatgccggcgacaacatcgtgaccgcccaggccatgtacgaggggctgtggatgtcctgcgtgtcgcagagcaccgggcagatccagtgcaaagtctttgactccttgctgaatctgagcagcacattgcaagcaacccgtgccttgatggtggttggcatcctcctgggagtgatagcaatctttgtggccaccgttggcatgaagtgtatgaagtgcttggaagacgatgaggtgcagaagatgaggatggctgtcattgggggcgcgatatttcttcttgcaggtctggctattttagttgccacagcatggtatggcaatagaatcgttcaagaattctatgaccctatgaccccagtcaatgccaggtacgaatttggtcaggctctcttcactggctgggctgctgcttctctctgccttctgggaggtgccctactttgctgttcctgtccccgaaaaacaacctcttacccaacaccaaggccctatccaaaacctgcaccttccagcgggaaagactacgtgtgacacagaggcaaaaggagaaaatcatgttgaaacaaaccgaaaatggacattgagatactatcattaacattaggaccttagaattttgggtattgtaatctgaagtatggtattacaaaacaaacaaacaaacaaaaaacccatgtgttaaaatactcagtgctaaacatggcttaatcttattttatcttctttcctcaatataggagggaagatttttccatttgtattactgcttcccattgagtaatcatactcaaatgggggaaggggtgctccttaaatatatatagatatgtatatatacatgtttttctattaaaaatagacagtaaaatactattctcattatgttgatactagcatacttaaaatatctctaaaataggtaaatgtatttaattccatattgatgaagatgtttattggtatattttctttttcgtccttatatacatatgtaacagtcaaatatcatttactcttcttcattagctttgggtgcctttgccacaagacctagcctaatttaccaaggatgaattctttcaattcttcatgcgtgcccttttcatatacttattttattttttaccataatcttatagcacttgcatctttaaaaagtgctatactaagggaaagaattgaggaattaactgcatacgttttggtgttgcttttcaaatgtttgaaaataaaaaaaatgttaagaaatgggtttcttgccttaaccagtctctcaagtgatgagacagtgaagtaaaattgagtgcactaaacgaataagattctgaggaagtcttatcttctgcagtgagtatggcccaatgctttctgtggctaaacagatgtaatgggaagaaataaaagcctacgtgttggtaaatccaacagcaagggagatttttgaatcataataactcataaggtgctatctgttcagtgatgccctcagagctcttgctgttagctggcagctgacgctgctaggatagttagtttggaaatggtacttcataataaactacacaaggaaagtcagccaccgtgtcttatgaggaattggacctaataaattttagtgtgccttccaaacctgagaatatatgcttttggaagttaaaatttaaatggcttttgccacatacatagatcttcatgatgtgtgagtgtaattccatgtggatatcagttaccaaacattacaaaaaaattttatggcccaaaatgaccaacgaaattgttacaatagaatttatccaattttgatctttttatattcttctaccacacctggaaacagaccaatagacattttggggttttataatgggaatttgtataaagcattactctttttcaataaattgttttttaatttaaaaaaagga

SEQ ID NO: 313347 - DNA, 763 bp, Homo sapiens
aaggatagtgattaatgtttttctttgtattctatcatctatgtatgcatagctaagcaatataatttgtccacttatataaagcaatatgtttagttatttgttccctcatatatacattctctttgcttacttttgtgctttctttttctcatccaacatgtttgcaatatttatccatattgtgtataactttaatctgtgctctttcttttttttttttttttgagacagactctcgctctgttgcccaggctggagtgcagtggtgtgatctcggctcactgcaacctctgcctcctggggttcacaccattctcttgcctcagcctcccaagtaggctgggattacaggtgcccacgaccatgcccgggctaattttttgtatttttaggcagagacagggtttcaccgtgttagccaggacggtctcgatcttctgacctcgtgatcccgcccgcctcggcctcccaaagtgctgggattacagacgtgagccaccacgccaggcctaatctgtgcttttaaaatgctgtataatgtttcagtatatgaatataccacagtttttaaaaatccattcaactattgataacatttggagtctttccagttttatgctattaaaacaatgttgctgcaaacattcttatgcatgttcctgatgtactacatatgtgcacatttttctgggatatgagttagattgttggggcatagttgtctattcttgggtaacaaatcactctggaagtaaatgga

SEQ ID NO: 313348 - DNA, 2070 bp, Homo sapiens
ttgccagctatccacctcagagtggatatgctaacagggatgtactaaaaattgcaaacattgaaggcttctctaatcccagatacacaacaaaataccatccaagaccataccacacagagacttccaaggccatccttggaaaaatggagaagtagaaggcccccattattttattttatttttatttttttgagatggagtctcgctctttcacccaggctggagtgcagtggcgcgaacttggctcactgcaagctctgcctcctgggttcaagccattctcctgcctcagcctcctgagtagctgggactacaggtgcccatcaccaggcccggctaatttttttgtatttttagtaaagacagggtttcaccatgttagccaggatggtctcgatctcccgacctcataatccgcccgcctcagcctcccaaagtgctgcgattacaggcgtgagccaccgcgccttaaggcccccattcttaactgttaactcctgaattggggatttctgtcaatctagcagaaactccaaaaggattctctgtactagaaccttgattgtctgatcacccctgtttcttatttttcttatttttaggcattaattccaaaaacatccatcagacagacatttaggaagtgttctttctatacaacagagacttggacaggtgaatcagaccacagtccttgtttcattaagttttcaattttggagggggaaggaaaggagaatgagacagccaaaaacttgtgctaactggtaactgaagtgatgggtgaggacaggagacagagccattaattctgtctggactagtcagatggggccttccagaggaggcaaccctgagttgaatttctcccagtaatctttttttttctttttcttttttttctttttctttttttttgcttcctcctcctcttcctctctctcccagcagattttttttttttaatttaaatttttgagaacagggtcccactatattgctcaggcaggtcttgaactcctgggctcaagccatcctcctgcctctgcctcccaaagagctgggattacaggcgtgagccaccgcgcccgacctctcctagtaaccctaaccctcacaaataaccaccattttcttctagaagatgcctgggaatatacatgtgtgcgtgtgcaagagttcttgacagcatatagttaggaaaggaattgctgagtagggtgtgctccccttcaattttatcatatattgtctggttttcaaagtggcgtaatgcattgccctcccatcagggatgtgtgagacttccatttgttctactttttgcacaacacttgattaaacttggttggacttttaaattgtttccagtctggtgggagtgtaatggtagtttttttgtgtattttcaaaaaaaccttttattatgagctattacctacatatggaaaaatgcataaaacaaggccgggagcagtggctcacgcctgtaatgccagctcttagggaggctgaggtgggaggattgcttgaacccaggagtttgaaatcagctgggcgagacccttcctctaacaaaaaaaaaaaaaaagtgtataaaacaatgcactgtgtaacgaaccgtgaagtaaacatcacctgtattaagaactagaataaccctagatgctctctgtgtatctttttctaatcataatctctttactgcctcccagaggtaaccatcataaaagtcaggatagtggttactatattgcttagtagatacgcatacatagatgatcaaatgtaaagaaaaacaaccaccacgccaggcctaatctgtgcttttaaaatgctgtataatgtttcagtatatgaatataccacagtttttaaaaatccattcaactattgataacatttggagtctttccagttttatgctattaaaacaatgttgctgcaaacattcttatgcatgttcctgatgtactacatatgtgcacatttttctgggatatgagttagattgttggggcatagttgtctattcttgggtaacaaatcactctggaagtaaatgga

SEQ ID NO: 313349 - DNA, 801 bp, Homo sapiens
cgcagagaatcggcgggaaaggccgcgcgccaggcagatcgaggggtgtcgcccaaaccgatctgtcgacgcctgaaggggcctgaggagattgctaggcttctcagctggggcttcttcaccctcatttttgtccgactggctggactgaagaacctggcagaagccttggggctagggtgagggtcacggcccagggagccctaaaatgttcccacatctggggtgtgtggggctgggcgccattttcgaggcccgggcccactgggctccactgacgggtgacaggtgactggctgggagcctcctggttgccctgggctctgtggagctgagggatcaaaggggtccctcctttaccccccacgtaggacagaggaaactgtcttcggctctcctcactcatccagtccgagtttgagccaattccttgacaggattcggccatcagtccctgcctttggggaaagccatcagtgtcaagtgcccgagtggcagaaacccgggtctagccccatcactggtctgttagggcagttattttctgctttttgcagaaatgggacaccagctccttattttccttttctggaggttatagttccagggaaggaggtaatgtgaggggaatgggcatttctgggggatcctgagcactccccacagggcatgagcctaggagttgcttgggatgacggtgtaggggcaccatggagggttgcacccatatgggaagaggagtccgcctggggctcaaggggctttatggatgttggaagtggccagctggccaaaactcag

SEQ ID NO: 313350 - DNA, 2943 bp, Homo sapiens
cgcagagaatcggcgggaaaggccgcgcgccaggcagatcgaggggtgtcgcccaaaccgatctgtcgacgcctgaaggggcctgaggagattgctaggcttctcagctggggcttcttcaccctcatttttgtccgactggctggactgaagaacctggcagaagccttggggctagggtctcctcaggaagatgaaccctcccttgcagaagcgggagctgccccagagagtctgtgtgagatgaagacagaggcccagccttcgacatccttgctggcaaacacctcatggactggcacagtgatttctgacagtgtcccaggaagtcaaacgtgggaagacaagggttcattgacccggtctgcaacatcttggacctcagaggcccaagtttcagcagcccgggttgcagaggctcaggccaggaccagtcagcccaagcaaatttctgtattggaggcgttaactgcctcagccctgaaccagaaacccacgcatgagaaggtgcagatgacagagaagaaagagagtgaggtcctccttgcccgtccgttctggtccagcaaaactgagtatattctggctcaggtgggcttctctatgaagccatcttgtctctggcgctttgcctacctgtggcttaacagtggaggctgcagtttcgctgccatctacatcttcatgctgttcctggtcggggttcctcttctcttcctggagatggcagctggtcagagcatgcgtcagggtggcatgggtgtatggaagatcattgccccctggattggtggtgtggggtattctagcttcatggtgtgcttcatcctcggcctgtacttcaatgtggtcaattcctggatcatcttctacatgagccagtccttccagtttcccgttccatgggagaaatgtcccttaacgatgaactctagtggctttgatcctgaatgtgaacggacaacaccctccatatacttctggtaccagcaggccttgaaggcctcagacagaatcgaggatggcgggtcaccagtctacagtctggtcctgcccttctttctttgctggtgtcttgttggtgctttcatgatcaatgggctcaagtccactgggaaggtaatctatgtcttggtactgctcccctgtttcatcattgtcggtttcttcatccggactctactcctggaaggggcaaaatttggccttcaacagttggtggttgccaagatatcggatgtgtacaatatgagtgtgtggtctctagcagggggtcaagttttgtctaacacaggcataggccttggctccgttgcctccttagcctcctacatgccccagtccaacaactgtctcagtgatgcctttctcgtgtctgtgataaacctgctcactttgttggttttcacatctttcaacttctgtgtcctgggcttctgggcgacagtcatcacacatcgctgctgtgagaggaatgctgaaatacttttaaagctgataaacctagggaaactgcctcctgatgccaagccccctgtcaacctgctttacaacccaacctccatctacaatgcctggctcagtggccttccccagcacatcaaaagcatggttctccgcgaggtgactgagtgcaacatagagactcagtttcttaaggctagcgagggcccaaagtttgcattcctgtcctttgttgaagccatgtccttccttcctccgtctgtcttctggtcttttatcttcttcctgatgttgctggccatggggctgagcagcgcaatagggattatgcagggcatcattactccactccaggacaccttctctttcttcaggaaacatacaaagctgctcatagtgggagtctttttgctcatgttcgtgtgcggcctcttcttcactcgaccttcaggcagctacttcatcagactgctgagtgactactggatagtcttccccatcatcgtcgttgtcgtatttgaaaccatggctgtatcctgggcctatggggccaggaggttccttgcagacctgacgatcctgttgggccaccccatctctcccatctttggttggctgtggccccatctgtgtccagttgtgctgctaatcatctttgtgaccatgatggttcatctttgtatgaagccgatcacctacatgtcctgggactcaagcacctcaaaagaggtgcttcgaccatacccaccgtgggcactgctcttgatgatcaccctttttgccattgtcatcctccccatccctgcatactttgtatactgccgcatacataggattcccttcaggcccaagagcggagacgggcctatgacagcctccacatccctacccctaagtcaccagctaacacccagtaaagaggttcaaaaggaagaaattctacaagttgatgaaacaaagtacccatcaacttgtaatgtgacttcctaacttcattaatttggcttcacataacatatcccttagaacagatccaatagacaactcttaatatcagcttgcaactgttgatctccctggatccagaaccacttttatttccaagaggaggggcattctttgggggtgttcatggggcctggacttgcaatcccttcctgggtcccatcttacctggtgaccaccatcattgttttccccatcctcttcctcaacacacatacatgcacaacacatatacaatactagtgatgtctaccagtcctgctacttctggggtgcctgtctcctggaatggagctggaggagcaatgctgttggtgaataaatcagtctactggaactccaaggactggatgtaagcagatctttttttcctatagatgtctcagatgttcagttttcctgtcacaaggcttccagtctgtattagttcattttcacactgctaataaagacatacctgaaactgggaacaaa

SEQ ID NO: 313351 - DNA, 1862 bp, Homo sapiens
cgcagagaatcggcgggaaaggccgcgcgccaggcagatcgaggggtgtcgcccaaaccgatctgtcgacgcctgaaggggcctgaggagattgctaggcttctcagctggggcttcttcaccctcatttttgtccgactggctggactgaagaacctggcagaagccttggggctagggaatgctgaaatacttttaaagctgataaacctagggaaactgcctcctgatgccaagccccctgtcaacctgctttacaacccaacctccatctacaatgcctggctcagtggccttccccagcacatcaaaagcatggttctccgcgaggtgactgagtgcaacatagagactcagtttcttaaggctagcgagggcccaaagtttgcattcctgtcctttgttgaagccatgtccttccttcctccgtctgtcttctggtcttttatcttcttcctgatgttgctggccatggggctgagcagcgcaatagggattatgcagggcatcattactccactccaggacaccttctctttcttcaggaaacatacaaagctgctcatagtgggagtctttttgctcatgttcgtgtgcggcctcttcttcactcgaccttcaggcagctacttcatcagactgctgagtgactactggatagtcttccccatcatcgtcgttgtcgtatttgaaaccatggctgtatcctgggcctatggggccaggaggttccttgcagacctgacgatcctgttgggccaccccatctctcccatctttggttggctgtggccccatctgtgtccagttgtgctgctaatcatctttgtgaccatgatggttcatctttgtatgaagccgatcacctacatgtcctgggactcaagcaccgtgagcctcccccaggacccagaacccctttgggagtaggggccagacctttcaattcactctgggtgaaagaacccagtcatctcattctcttactgcccgaagactcatgggttttctgctttggttccccacccatccttcccctccacaactcttccttttctcttggggattttgatattctgaacccttttcccatctctccacagtcaaaagaggtgcttcgaccatacccaccgtgggcactgctcttgatgatcaccctttttgccattgtcatcctccccatccctgcatactttgtatactgccgcatacataggattcccttcaggcccaagagcggagacgggcctatgacagcctccacatccctacccctaagtcaccagctaacacccagtaaagaggttcaaaaggaagaaattctacaagttgatgaaacaaagtacccatcaacttgtaatgtgacttcctaacttcattaatttggcttcacataacatatcccttagaacagatccaatagacaactcttaatatcagcttgcaactgttgatctccctggatccagaaccacttttatttccaagaggaggggcattctttgggggtgttcatggggcctggacttgcaatcccttcctgggtcccatcttacctggtgaccaccatcattgttttccccatcctcttcctcaacacacatacatgcacaacacatatacaatactagtgatgtctaccagtcctgctacttctggggtgcctgtctcctggaatggagctggaggagcaatgctgttggtgaataaatcagtctactggaactccaaggactggatgtaagcagatctttttttcctatagatgtctcagatgttcagttttcctgtcacaaggcttccagtctgtattagttcattttcacactgctaataaagacatacctgaaactgggaacaaa

SEQ ID NO: 313352 - DNA, 963 bp, Homo sapiens
cgcagagaatcggcgggaaaggccgcgcgccaggcagatcgaggggtgtcgcccaaaccgatctgtcgacgcctgaaggggcctgaggagattgctaggcttctcagctggggcttcttcaccctcatttttgtccgactggctggactgaagaacctggcagaagccttggggctagggtctcctcaggaagatgaaccctcccttgcagaagcgggagctgccccagagagtctgtgtgagatgaagacagaggcccagccttcgacatccttgctggcaaacacctcatggactggcacagtgatttctgacagtgtcccaggaagtcaaacgtgggaagacaagggttcattgacccggtctgcaacatcttggacctcagaggcccaagtttcagcagcccgggttgcagaggctcaggccaggaccagtcagcccaagcaaatttctgtattggaggcgttaactgcctcagccctgaaccagaaacccacgcatgagaaggtgcagatgacagagaagaaagagagtgaggtcctccttgcccgtccgttctggtccagcaaaactgagtatattctggctcaggtgggcttctctatgaagccatcttgtctctggcgctttgcctacctgtggcttaacagtggaggctgtaagtctggggaccaggaaacctgggtccacaaggggcaatcaggacagagtcctgtccaggctttaaccatgaatgtttctgagatatgtagagactaaagacctggtgctctgagcaggataggagccaggtccctggacacttaggatcatgagaggttcagggtatctgaacatggggatggcaaagctggaggcctgggcccaagatgggctggaaactaggtacttgggtcttccaggatttgggggccagaggactggacacttgggaccgtgagggatgtagacatgggtgagccc

SEQ ID NO: 313353 - DNA, 407 bp, Homo sapiens
catgtcagggggttagcttggacatctgattttctcagtgatccagggattttcaggagttttccagggaagatagaatgtatacttgtctatatttttttgttattgtttagttcaatgacactttaacacctctttgttctctttgcaggctagcgagggcccaaagtttgcattcctgtcctttgttgaagccatgtccttccttcctccgtctgtcttctggtcttttatcttcttcctgatgttgctggccatggggctgagcagcgcaatagggattatgcagggcatcattactccactccaggacaccttctctttcttcaggaaacatacaaagctgctcataggtactctgacctaggccctactcctaacaatgaccctgacccctgacaccactg

SEQ ID NO: 313354 - DNA, 369 bp, Homo sapiens
gggagagggaaagagaaaagggaggtgggggaggggataaggaagaagagggggtaccttgtctagcaggcatgtctaaagccaggtccccccagatcctgaatgtgaacggacaacaccctccatatacttctggtaccagcaggccttgaaggcctcagacagaatcgaggatggcgggtcaccagtctacagtctggtcctgcccttctttctttgctggtgtcttgttggtgctttcatgatcaatgggctcaagtccactgggaaggtgagccaccagtattggattccttgaaattctcagatgctttagcccttacctcaatttgttacttgttgatctcctaatctcttactcctttggct

SEQ ID NO: 313355 - DNA, 3155 bp, Homo sapiens
cgcagagaatcggcgggaaaggccgcgcgccaggcagatcgaggggtgtcgcccaaaccgatctgtcgacgcctgaaggggcctgaggagattgctaggcttctcagctggggcttcttcaccctcatttttgtccgactggctggactgaagaacctggcagaagccttggggctagggtctcctcaggaagatgaaccctcccttgcagaagcgggagctgccccagagagtctgtgtgagatgaagacagaggcccagccttcgacatccttgctggcaaacacctcatggactggcacagtgatttctgacagtgtcccaggaagtcaaacgtgggaagacaagggttcattgacccggtctgcaacatcttggacctcagaggcccaagtttcagcagcccgggttgcagaggctcaggccaggaccagtcagcccaagcaaatttctgtattggaggcgttaactgcctcagccctgaaccagaaacccacgcatgagaaggtgcagatgacagagaagaaagagagtgaggtcctccttgcccgtccgttctggtccagcaaaactgagtatattctggctcaggtgggcttctctatgaagccatcttgtctctggcgctttgcctacctgtggcttaacagtggaggctgcagtttcgctgccatctacatcttcatgctgttcctggtcggggttcctcttctcttcctggagatggcagctggtcagagcatgcgtcagggtggcatgggtgtatggaagatcattgccccctggattggtggtgtggggtattctagcttcatggtgtgcttcatcctcggcctgtacttcaatgtggtcaattcctggatcatcttctacatgagccagtccttccagtttcccgttccatgggagaaatgtcccttaacgatgaactctagtggctttgatcctgaatgtgaacggacaacaccctccatatacttctggtaccagcaggccttgaaggcctcagacagaatcgaggatggcgggtcaccagtctacagtctggtcctgcccttctttctttgctggtgtcttgttggtgctttcatgatcaatgggctcaagtccactgggaaggtaatctatgtcttggtactgctcccctgtttcatcattgtcggtttcttcatccggactctactcctggaaggggcaaaatttggccttcaacagttggtggttgccaagatatcggatgtgtacaatatgagtgtgtggtctctagcagggggtcaagttttgtctaacacaggcataggccttggctccgttgcctccttagcctcctacatgccccagtccaacaactgtctcagtgatgcctttctcgtgtctgtgataaacctgctcactttgttggttttcacatctttcaacttctgtgtcctgggcttctgggcgacagtcatcacacatcgctgctgtgagaggaatgctgaaatacttttaaagctgataaacctagggaaactgcctcctgatgccaagccccctgtcaacctgctttacaacccaacctccatctacaatgcctggctcagtggccttccccagcacatcaaaagcatggttctccgcgaggtgactgagtgcaacatagagactcagtttcttaaggctagcgagggcccaaagtttgcattcctgtcctttgttgaagccatgtccttccttcctccgtctgtcttctggtcttttatcttcttcctgatgttgctggccatggggctgagcagcgcaatagggattatgcagggcatcattactccactccaggacaccttctctttcttcaggaaacatacaaagctgctcatagtgggagtctttttgctcatgttcgtgtgcggcctcttcttcactcgaccttcaggcagctacttcatcagactgctgagtgactactggatagtcttccccatcatcgtcgttgtcgtatttgaaaccatggctgtatcctgggcctatggggccaggaggttccttgcagacctgacgatcctgttgggccaccccatctctcccatctttggttggctgtggccccatctgtgtccagttgtgctgctaatcatctttgtgaccatgatggttcatctttgtatgaagccgatcacctacatgtcctgggactcaagcaccgtgagcctcccccaggacccagaacccctttgggagtaggggccagacctttcaattcactctgggtgaaagaacccagtcatctcattctcttactgcccgaagactcatgggttttctgctttggttccccacccatccttcccctccacaactcttccttttctcttggggattttgatattctgaacccttttcccatctctccacagtcaaaagaggtgcttcgaccatacccaccgtgggcactgctcttgatgatcaccctttttgccattgtcatcctccccatccctgcatactttgtatactgccgcatacataggattcccttcaggcccaagagcggagacgggcctatgacagcctccacatccctacccctaagtcaccagctaacacccagtaaagaggttcaaaaggaagaaattctacaagttgatgaaacaaagtacccatcaacttgtaatgtgacttcctaacttcattaatttggcttcacataacatatcccttagaacagatccaatagacaactcttaatatcagcttgcaactgttgatctccctggatccagaaccacttttatttccaagaggaggggcattctttgggggtgttcatggggcctggacttgcaatcccttcctgggtcccatcttacctggtgaccaccatcattgttttccccatcctcttcctcaacacacatacatgcacaacacatatacaatactagtgatgtctaccagtcctgctacttctggggtgcctgtctcctggaatggagctggaggagcaatgctgttggtgaataaatcagtctactggaactccaaggactggatgtaagcagatctttttttcctatagatgtctcagatgttcagttttcctgtcacaaggcttccagtctgtattagttcattttcacactgctaataaagacatacctgaaactgggaacaaa

SEQ ID NO: 313356 - DNA, 1486 bp, Homo sapiens
cgcagagaatcggcgggaaaggccgcgcgccaggcagatcgaggggtgtcgcccaaaccgatctgtcgacgcctgaaggggcctgaggagattgctaggcttctcagctggggcttcttcaccctcatttttgtccgactggctggactgaagaacctggcagaagccttggggctagggtctcctcaggaagatgaaccctcccttgcagaagcgggagctgccccagagagtctgtgtgagatgaagacagaggcccagccttcgacatccttgctggcaaacacctcatggactggcacagtgatttctgacagtgtcccaggaagtcaaacgtgggaagacaagggttcattgacccggtctgcaacatcttggacctcagaggcccaagtttcagcagcccgggttgcagaggctcaggccaggaccagtcagcccaagcaaatttctgtattggaggcgttaactgcctcagccctgaaccagaaacccacgcatgagaaggtgcagatgacagagaagaaagagagtgaggtcctccttgcccgtccgttctggtccagcaaaactgagtatattctggctcaggtgggcttctctatgaagccatcttgtctctggcgctttgcctacctgtggcttaacagtggaggctgcagtttcgctgccatctacatcttcatgctgttcctggtcggggttcctcttctcttcctggagatggcagctggtcagagcatgcgtcagggtggcatgggtgtatggaagatcattgccccctggattggtggtgtggggtattctagcttcatggtgtgcttcatcctcggcctgtacttcaatgtggtcaattcctggatcatcttctacatgagccagtccttccagtttcccgttccatgggagaaatgtcccttaacgatgaactctagtggctttgatcctgaatgtgaacggacaacaccctccatatacttctggtaccagcaggccttgaaggcctcagacagaatcgaggatggcgggtcaccagtctacagtctggtcctgcccttctttctttgctggtgtcttgttggtgctttcatgatcaatgggctcaagtccactgggaagcagagacagggtttcaccgtgttagccaggacggtctcgatcttctgacctcgtgatcccgcccgcctcggcctcccaaagtgctgggattacagacgtgagccaccacgccaggcctaatctgtgcttttaaaatgctgtataatgtttcagtatatgaatataccacagtttttaaaaatccattcaactattgataacatttggagtctttccagttttatgctattaaaacaatgttgctgcaaacattcttatgcatgttcctgatgtactacatatgtgcacatttttctgggatatgagttagattgttggggcatagttgtctattcttgggtaacaaatcactctggaagtaaatgga

SEQ ID NO: 313357 - DNA, 1153 bp, Homo sapiens
ggtcagaccaagggcactcagactggaaaggttgttgctgggcttgggtgtccgtcctttcctgtctccttttcttcctcttttcacttaaatccactgagtctctcgccaagtcagtgatttaggtaatcccgccgcccctggcggaacctttgtgacgccggaactgatgtgccgtagggtggctgcggtcggaggactgttttggtaaaggactagcagttctctgcggagggccggttgatacagttccggtgggagaacgcggctgcgaggttttcggctttggctcctgatatgcagcgacagaattttcggcccccaactcctccttaccctggtccgggtggaggaggttggggtagcggaagcagcttccggggaaccccgggcgggggcggaccacggccgccctcccctcgagacgggtacgggagtccgcaccacacgccgccgtacgggccccggtctaggccgtacgggagcagtcactctccgcgacacggcggcagcttcccggggggccggttcgggtctccgtcccctggcggctaccctggctcctactccaggtcccccgcggggtcccagcagcaattcggctactccccagggcagcagcagacccacccccagggttctccaaggacatctacaccatttggatcagggcgtgttagagaaaaaagaatgtctaatgagttggaaaattatttcaagccttcaatgcttgaagatccttgggctggcctagaaccagtatctgtagtggatataagccaacaatacagcaatactcaaacattcacaggcaaaaaaggaagatacttttgttaacatttctgaaattcaactggaagcttcatgtgtcaggaacatcttggacaaaactttaagttgtgttgatataaatttacccaaagatgatgactttgattggataattagtaaggtctttttgttatttttcatcgtatcaggtattgttgatattagagaaaaaagtaggataacttgcaacatttagctctggaagtacctaccacattttagagatttaccgtttccatatatttaacattcctggttacataatggacatttgtcttttaatgttttttcaatgttttaaaataaaacattttgtcttcta

SEQ ID NO: 313358 - DNA, 1333 bp, Homo sapiens
  misc_feature (1095)..(1095): n is a, c, g, or t
ggtcagaccaagggcactcagactggaaaggttgttgctgggcttgggtgtccgtcctttcctgtctccttttcttcctcttttcacttaaatccactgagtctctcgccaagtcagtgatttaggtaatcccgccgcccctggcggaacctttgtgacgccggaactgatgtgccgtagggtggctgcggtcggaggactgttttggtaaaggactagcagttctctgcggagggccggttgatacagttccggtgggagaacgcggctgcgaggttttcggcttcctcccctcgagacgggtacgggagtccgcaccacacgccgccgtacgggccccggtctaggccgtacgggagcagtcactctccgcgacacggcggcagcttcccggggggccggttcgggtctccgtcccctggcggctaccctggctcctactccaggtcccccgcggggtcccagcagcaattcggctactccccagggcagcagcagacccacccccagggttctccaaggacatctacaccatttggatcagggcgtgttagagaaaaaagaatgtctaatgagttggaaaattatttcaagccttcaatgcttgaagatccttgggctggcctagaaccagtatctgtagtggatataagccaacaatacagcaatactcaaacattcacaggcaaaaaaggaagatacttttgttaacatttctgaaattcaactggaagcttcatgtgtcaggaacatcttggacaaaactttaagttgtgttgatataaatttacccaaagatgatgactttgattggataattagtaaggtctttttgttatttttcatcgtatcaggtattgttgatattagagaaaaaagtaggataacttgcaacatttagctctggaagtacctaccacattttagagatttaccgtttccatatatttaacattcctggttacataatggacatttgtcttttaatgttttttcaatgttttaaaataaaacattttgtcttctaaaaaaaaaaaaaaaaaaaaaaaaaaaaaaaaaaaaaaaaaaaaaaaaaaaaaaaaaaaaaaaaaaaanaaaaaaaaaaaaaaaaacaaaaaaacacacaatacaccacaaaacacctcccaaaacacacttttctcctatcccccctccttccactttcaccttatttctattcttttaaaacttcacattctcttactttaacacctttactttcctctacccttatctcacttatcctcacctcttctaaactctctattcactaaaccttcctccccttctcaaactttccttttctttcata

SEQ ID NO: 313359 - DNA, 1447 bp, Homo sapiens
  misc_feature (1209)..(1209): n is a, c, g, or t
tttctttcgagctacactggcttctgctccaacttccctgaaaagaaaatcggtggtagtggaagttttccattcctttagtgagagtaaatacaaaagacagagagagtatctctagcatgtctgggatttctgtggtttacaacttgcaactacgtggttttccaacttgctgtattctacaccaaccccctaccccttttgagcctggagctaaggagtaaagaaaatgttcatgagctagaaaggttctagaaactttaaaactatagtattgttttctcctgaaaaaagtgaaaatttcgagggaaaattgaatataattacttgatttcatcactgcttgtatttaattactgcaaagttactacattagacacaaaagtatttgagatgacagtggtcatggaattataaataaatgagaataacgaattgctttaagtactttttttaaaaaataggaacacttgattaaaggaagcatggactttgtaattgaacattatttaggttcaagtcacaacttttaagcagcaatgtgattcccgctaacctttagctaaaggaagaagtaccaattatctttactaagtgtttttttaactgattttttttctaaagggttctccaaggacatctacaccatttggatcagggcgtgttagagaaaaaagaatgtctaatgagttggaaaattatttcaagccttcaatgcttgaagatccttgggctggcctagaaccagtatctgtagtggatataagccaacaatacagcaatactcaaacattcacaggcaaaaaaggaagatacttttgttaacatttctgaaattcaactggaagcttcatgtgtcaggaacatcttggacaaaactttaagttgtgttgatataaatttacccaaagatgatgactttgattggataattagtaaggtctttttgttatttttcatcgtatcaggtattgttgatattagagaaaaaagtaggataacttgcaacatttagctctggaagtacctaccacattttagagatttaccgtttccatatatttaacattcctggttacataatggacatttgtcttttaatgttttttcaatgttttaaaataaaacattttgtcttctaaaaaaaaaaaaaaaaaaaaaaaaaaaaaaaaaaaaaaaaaaaaaaaaaaaaaaaaaaaaaaaaaaaanaaaaaaaaaaaaaaaaacaaaaaaacacacaatacaccacaaaacacctcccaaaacacacttttctcctatcccccctccttccactttcaccttatttctattcttttaaaacttcacattctcttactttaacacctttactttcctctacccttatctcacttatcctcacctcttctaaactctctattcactaaaccttcctccccttctcaaactttccttttctttcata

SEQ ID NO: 313360 - DNA, 973 bp, Homo sapiens
ggtcagaccaagggcactcagactggaaaggttgttgctgggcttgggtgtccgtcctttcctgtctccttttcttcctcttttcacttaaatccactgagtctctcgccaagtcagtgatttaggtaatcccgccgcccctggcggaacctttgtgacgccggaactgatgtgccgtagggtggctgcggtcggaggactgttttggtaaaggactagcagttctctgcggagggccggttgatacagttccggtgggagaacgcggctgcgaggttttcggcttcctcccctcgagacgggtacgggagtccgcaccacacgccgccgtacgggccccggtctaggccgtacgggagcagtcactctccgcgacacggcggcagcttcccggggggccggttcgggtctccgtcccctggcggctaccctggctcctactccaggtcccccgcggggtcccagcagcaattcggctactccccagggcagcagcagacccacccccagggttctccaaggacatctacaccatttggatcagggcgtgttagagaaaaaagaatgtctaatgagttggtatctgtagtggatataagccaacaatacagcaatactcaaacattcacaggcaaaaaaggaagatacttttgttaacatttctgaaattcaactggaagcttcatgtgtcaggaacatcttggacaaaactttaagttgtgttgatataaatttacccaaagatgatgactttgattggataattagtaaggtctttttgttatttttcatcgtatcaggtattgttgatattagagaaaaaagtaggataacttgcaacatttagctctggaagtacctaccacattttagagatttaccgtttccatatatttaacattcctggttacataatggacatttgtcttttaatgttttttcaatgttttaaaataaaacattttgtcttcta

SEQ ID NO: 313361 - DNA, 1459 bp, Homo sapiens
  misc_feature (1221)..(1221): n is a, c, g, or t
ggtcagaccaagggcactcagactggaaaggttgttgctgggcttgggtgtccgtcctttcctgtctccttttcttcctcttttcacttaaatccactgagtctctcgccaagtcagtgatttaggtaatcccgccgcccctggcggaacctttgtgacgccggaactgatgtgccgtagggtggctgcggtcggaggactgttttggtaaaggactagcagttctctgcggagggccggttgatacagttccggtgggagaacgcggctgcgaggttttcggctttggctcctgatatgcagcgacagaattttcggcccccaactcctccttaccctggtccgggtggaggaggttggggtagcggaagcagcttccggggaaccccgggcgggggcggaccacggccgccctcccctcgagacgggtacgggagtccgcaccacacgccgccgtacgggccccggtctaggccgtacgggagcagtcactctccgcgacacggcggcagcttcccggggggccggttcgggtctccgtcccctggcggctaccctggctcctactccaggtcccccgcggggtcccagcagcaattcggctactccccagggcagcagcagacccacccccagggttctccaaggacatctacaccatttggatcagggcgtgttagagaaaaaagaatgtctaatgagttggaaaattatttcaagccttcaatgcttgaagatccttgggctggcctagaaccagtatctgtagtggatataagccaacaatacagcaatactcaaacattcacaggcaaaaaaggaagatacttttgttaacatttctgaaattcaactggaagcttcatgtgtcaggaacatcttggacaaaactttaagttgtgttgatataaatttacccaaagatgatgactttgattggataattagtaaggtctttttgttatttttcatcgtatcaggtattgttgatattagagaaaaaagtaggataacttgcaacatttagctctggaagtacctaccacattttagagatttaccgtttccatatatttaacattcctggttacataatggacatttgtcttttaatgttttttcaatgttttaaaataaaacattttgtcttctaaaaaaaaaaaaaaaaaaaaaaaaaaaaaaaaaaaaaaaaaaaaaaaaaaaaaaaaaaaaaaaaaaaanaaaaaaaaaaaaaaaaacaaaaaaacacacaatacaccacaaaacacctcccaaaacacacttttctcctatcccccctccttccactttcaccttatttctattcttttaaaacttcacattctcttactttaacacctttactttcctctacccttatctcacttatcctcacctcttctaaactctctattcactaaaccttcctccccttctcaaactttccttttctttcata

SEQ ID NO: 313362 - DNA, 2696 bp, Homo sapiens
tctccggccccatggaggaagtgagaaagttggcacagtcacgccgggcttcgcaggaccaggtcactcagtgacagatggacaatgcaagaatgaactccttcctggaataccccatacttagcagtggcgactcggggacctgctcagcccgagcctacccctcggaccataggattacaactttccagtcgtgcgcggtcagcgccaacagttgcggcggcgacgaccgcttcctagtgggcaggggggtgcagatcggttcgccccaccaccaccaccaccaccaccatcaccacccccagccggctacctaccagacttccgggaacctgggggtgtcctactcccactcaagttgtggtccaagctatggctcacagaacttcagtgcgccttacagcccctacgcgttaaatcaggaagcagacgtaagtggtgggtacccccagtgcgctcccgctgtttactctggaaatctctcatctcccatggtccagcatcaccaccaccaccagggttatgctgggggcgcggtgggctcgcctcaatacattcaccactcatatggacaggagcaccagagcctggccctggctacgtataataactccttgtcccctctccacgccagccaccaagaagcctgtcgctcccccgcatcggagacatcttctccagcgcagacttttgactggatgaaagtcaaaagaaaccctcccaaaacaggtcagtcctgctggttggtggatgctccttgattattctggaaggagctggtatgcttaatttccaaggaaattaataatgatcttttttttaaaaggcttttgtatcagactagtgttgtagtgcatggagagggtgcccagaggtgttggggcaaagaagtctcagggattggtgtgttttcaaggattttatacatttgggaaataggaagtatgtgggggtggttattgtgacggtagtgttctgttaatatcttgaggctccattaatcaccggtctgaccatgctaatggtttacatcaggttaacactttacacctcatcactcaccctccacagcccgatttgtgctgagttcttgatcttttctttacctgagtgttgccatgaagcgtgtggggaatctcaagtcgatttaaaaatttttacatttccgtctcatggcttcccactttgccccaggggaaagttggagagtacggctacctgggtcaacccaacgcggtgcgcaccaacttcactaccaagcagctcacggaactggagaaggagttccacttcaacaagtacctgacgcgcgcccgcagggtggagatcgctgcatccctgcagctcaacgagacccaagtgaagatctggttccagaaccgccgaatgaagcaaaagaaacgtgagaaggagggtctcttgcccatctctccggccaccccgccaggaaacgacgagaaggccgaggaatcctcagagaagtccagctcttcgccctgcgttccttccccggggtcttctacctcagacactctgactacctcccactgaggcggctccagccccagacaacagcccaggcatctccttgggctgggacttcttacccaaagcacatgcttagcttatctttctttccatttacagtctctttcttcctttctaatcctatctggggagctcctggccaggataatatatttgcagataattctggaccagagacttggtgcggggttaacaccttcatccagattgggtgccagcatacattttctggtgggccttaacatccctcctgcttttaggagaattcacagaacctactgttcctttcagatgaccttttggaaaatagttccctttgccaacagaaacatgccagaaggaatgttctcatcttttttatctaactatatgtacagctctcccctcccttgtccttgaaagtaggatatagcgaaaggcgagtccaggagctcaggaagaagagatgcactatatgtttacacaattaattcatcccttaatttaagtcattttcatgtgtgtgagtttgctggttgtaaatactttgtcctaagagatttatctttatacagattttctagaaatgtttaggttactaaaacagggtgggcaaactctctaaactggtacaattttataggtgaaagaaaaaattccctcatttaaacccaatcagatgcctcagagggtagccttgatttgttcttacagttaagaagccctgcagagcacaaacttcagaaacccggcttcctgtgctaagtctttcccaatctctacccctttcttctcgggccaccctctgtttaaaatttgtgctgggttattcagaacctaaaagtattattcaaaccaatttcttccttccacagttatcttagctggatataatgtattttcagctcaattgttaatgtgatggatggcacaatgaatgtatattttgtgttattcgtgaatagtcttttgcatgtcgcacaatgtttgatgtccccaaagtaccacactgagttctatcagttatcctttgtgagcctatgatattccccatttcctgtacaatcatgaacagctctgagatcctggagtgatatgatccagagcagagtttacgggtcttaggatgtctgtaataaataaatatactcaagtttcaggtaaaataa

SEQ ID NO: 313363 - DNA, 2027 bp, Homo sapiens
tctccggccccatggaggaagtgagaaagttggcacagtcacgccgggcttcgcaggaccaggtcactcagtgacagatggacaatgcaagaatgaactccttcctggaataccccatacttagcagtggcgactcggggacctgctcagcccgagcctacccctcggaccataggattacaactttccagtcgtgcgcggtcagcgccaacagttgcggcggcgacgaccgcttcctagtgggcaggggggtgcagatcggttcgccccaccaccaccaccaccaccaccatcaccacccccagccggctacctaccagacttccgggaacctgggggtgtcctactcccactcaagttgtggtccaagctatggctcacagaacttcagtgcgccttacagcccctacgcgttaaatcaggaagcagacccaccaagaagcctgtcgctcccccgcatcggagacatcttctccagcgcagacttttgactggatgaaagtcaaaagaaaccctcccaaaacagggaaagttggagagtacggctacctgggtcaacccaacgcggtgcgcaccaacttcactaccaagcagctcacggaactggagaaggagttccacttcaacaagtacctgacgcgcgcccgcagggtggagatcgctgcatccctgcagctcaacgagacccaagtgaagatctggttccagaaccgccgaatgaagcaaaagaaacgtgagaaggagggtctcttgcccatctctccggccaccccgccaggaaacgacgagaaggccgaggaatcctcagagaagtccagctcttcgccctgcgttccttccccggggtcttctacctcagacactctgactacctcccactgaggcggctccagccccagacaacagcccaggcatctccttgggctgggacttcttacccaaagcacatgcttagcttatctttctttccatttacagtctctttcttcctttctaatcctatctggggagctcctggccaggataatatatttgcagataattctggaccagagacttggtgcggggttaacaccttcatccagattgggtgccagcatacattttctggtgggccttaacatccctcctgcttttaggagaattcacagaacctactgttcctttcagatgaccttttggaaaatagttccctttgccaacagaaacatgccagaaggaatgttctcatcttttttatctaactatatgtacagctctcccctcccttgtccttgaaagtaggatatagcgaaaggcgagtccaggagctcaggaagaagagatgcactatatgtttacacaattaattcatcccttaatttaagtcattttcatgtgtgtgagtttgctggttgtaaatactttgtcctaagagatttatctttatacagattttctagaaatgtttaggttactaaaacagggtgggcaaactctctaaactggtacaattttataggtgaaagaaaaaattccctcatttaaacccaatcagatgcctcagagggtagccttgatttgttcttacagttaagaagccctgcagagcacaaacttcagaaacccggcttcctgtgctaagtctttcccaatctctacccctttcttctcgggccaccctctgtttaaaatttgtgctgggttattcagaacctaaaagtattattcaaaccaatttcttccttccacagttatcttagctggatataatgtattttcagctcaattgttaatgtgatggatggcacaatgaatgtatattttgtgttattcgtgaatagtcttttgcatgtcgcacaatgtttgatgtccccaaagtaccacactgagttctatcagttatcctttgtgagcctatgatattccccatttcctgtacaatcatgaacagctctgagatcctggagtgatatgatccagagcagagtttacgggtcttaggatgtctgtaataaataaatatactcaagtttcaggtaaaataa

SEQ ID NO: 313364 - DNA, 2230 bp, Homo sapiens
tctccggccccatggaggaagtgagaaagttggcacagtcacgccgggcttcgcaggaccaggtcactcagtgacagatggacaatgcaagaatgaactccttcctggaataccccatacttagcagtggcgactcggggacctgctcagcccgagcctacccctcggaccataggattacaactttccagtcgtgcgcggtcagcgccaacagttgcggcggcgacgaccgcttcctagtgggcaggggggtgcagatcggttcgccccaccaccaccaccaccaccaccatcaccacccccagccggctacctaccagacttccgggaacctgggggtgtcctactcccactcaagttgtggtccaagctatggctcacagaacttcagtgcgccttacagcccctacgcgttaaatcaggaagcagacgtaagtggtgggtacccccagtgcgctcccgctgtttactctggaaatctctcatctcccatggtccagcatcaccaccaccaccagggttatgctgggggcgcggtgggctcgcctcaatacattcaccactcatatggacaggagcaccagagcctggccctggctacgtataataactccttgtcccctctccacgccagccaccaagaagcctgtcgctcccccgcatcggagacatcttctccagcgcagacttttgactggatgaaagtcaaaagaaaccctcccaaaacagggaaagttggagagtacggctacctgggtcaacccaacgcggtgcgcaccaacttcactaccaagcagctcacggaactggagaaggagttccacttcaacaagtacctgacgcgcgcccgcagggtggagatcgctgcatccctgcagctcaacgagacccaagtgaagatctggttccagaaccgccgaatgaagcaaaagaaacgtgagaaggagggtctcttgcccatctctccggccaccccgccaggaaacgacgagaaggccgaggaatcctcagagaagtccagctcttcgccctgcgttccttccccggggtcttctacctcagacactctgactacctcccactgaggcggctccagccccagacaacagcccaggcatctccttgggctgggacttcttacccaaagcacatgcttagcttatctttctttccatttacagtctctttcttcctttctaatcctatctggggagctcctggccaggataatatatttgcagataattctggaccagagacttggtgcggggttaacaccttcatccagattgggtgccagcatacattttctggtgggccttaacatccctcctgcttttaggagaattcacagaacctactgttcctttcagatgaccttttggaaaatagttccctttgccaacagaaacatgccagaaggaatgttctcatcttttttatctaactatatgtacagctctcccctcccttgtccttgaaagtaggatatagcgaaaggcgagtccaggagctcaggaagaagagatgcactatatgtttacacaattaattcatcccttaatttaagtcattttcatgtgtgtgagtttgctggttgtaaatactttgtcctaagagatttatctttatacagattttctagaaatgtttaggttactaaaacagggtgggcaaactctctaaactggtacaattttataggtgaaagaaaaaattccctcatttaaacccaatcagatgcctcagagggtagccttgatttgttcttacagttaagaagccctgcagagcacaaacttcagaaacccggcttcctgtgctaagtctttcccaatctctacccctttcttctcgggccaccctctgtttaaaatttgtgctgggttattcagaacctaaaagtattattcaaaccaatttcttccttccacagttatcttagctggatataatgtattttcagctcaattgttaatgtgatggatggcacaatgaatgtatattttgtgttattcgtgaatagtcttttgcatgtcgcacaatgtttgatgtccccaaagtaccacactgagttctatcagttatcctttgtgagcctatgatattccccatttcctgtacaatcatgaacagctctgagatcctggagtgatatgatccagagcagagtttacgggtcttaggatgtctgtaataaataaatatactcaagtttcaggtaaaataa

SEQ ID NO: 313365 - DNA, 1401 bp, Homo sapiens
tccggctaggtacgaggctgggtgtggatgagtcacctcgcaagtggttccctcattcgagtgctccggcgcacagacccgcgccccgccgtccgcgagcctcccgagagccgtcccttcgtccggccctggagcattgcgtttgtcgccggtgtcgcagtgcgaggatggcgccgcgggtgtagcggctctctgcgcaggccgagtgggcccagagaagcgaggaactccgcagctcgtcgacacgtctcgtctcctgtcccaattcagggcttggtgaggtgactcgcggtcgcgggtgactcgccggcaggacactgcctggaacgcctggagcgcctcccactgcagacgtctgtccgcctccagccgctctcctctgacgggtcctgcctcagttggcggaatggcggccacgggagccaatgcagagaaagctgaaagtcacaatgattgccccgtcagacttttaaatccaaacatagcaaaaatgaaagaagatattctctatcatttcaatctcaccactagcagacacaatttcccagccttgtttggagatgtgaagtttgtgtgtgttggtggaagcccctcccggatgaaagccttcatcaggtgcgttggtgcagagctgggccttgactgcccaggtagagactatcccaacatctgtgcgggaactgaccgctatgccatgtataaagtaggaccggtgctgtctgtcagtcatggtatgggcattccttctatctcaatcatgttgcatgagctcataaagctgctgtactatgcccggtgctccaacgtcactatcatccgcattggcacttctggtgggatagggtctggagcccggcactgtggtcataacagagcaggcagtggatacctgcttcaaggcagagtttgagcagattgtcctggggaagcgggtcatccggaaaacggaccttaacaagaagctggtgcaggagctgttgctgtgttctgcagagctgagcgagttcaccacagtggtggggaacaccatgtgcaccttggacttctatgaagggcaaggccgtctggatggggctctctgctcctacacggagaaggacaagcaggcgtatctggaggcagcctatgcagccggcgtccgcaatatcgagatggagtcctcggtgtttgccgccatgtgcagcgcctgcggcctccaagcggccgtggtgtgtgtcaccctcctgaaccgcctggaaggggaccagatcagcagccctcgcaatgtgctcagcgagtaccagcagaggccgcagcggctggtgagctacttcatcaagaagaaactgagcaaggcctgagcgctgccctgcacctccgcagacctgctgtgatgacttgccattaaaagcattgtccaaa

SEQ ID NO: 313366 - DNA, 1598 bp, Homo sapiens
tccggctaggtacgaggctgggtgtggatgagtcacctcgcaagtggttccctcattcgagtgctccggcgcacagacccgcgccccgccgtccgcgagcctcccgagagccgtcccttcgtccggccctggagcattgcgtttgtcgccggtgtcgcagtgcgaggatggcgccgcgggtgtagcggctctctgcgcaggccgagtgggcccagagaagcgaggaactccgcagctcgtcgacacgtctcgtctcctgtcccaattcagggcttggtgaggtgactcgcggtcgcgggtgactcgccggcaggacactgcctggaacgcctggagcgcctcccactgcagacgtctgtccgcctccagccgctctcctctgacgggtcctgcctcagttggcggaatggcggccacgggagccaatgcagagaaagctgaaagtcacaatgattgccccgtcagacttttaaatccaaacatagcaaaaatgaaagaagatattctctatcatttcaatctcaccactagcagacacaatttcccagccttgtttggagatgtgaagtttgtgtgtgttggtggaagcccctcccggatgaaagccttcatcaggtgcgttggtgcagagctgggccttgactgcccaggtagagactatcccaacatctgtgcgggaactgaccgctatgccatgtataaagtaggaccggtgctgtctgtcagtcatggtatgggcattccttctatctcaatcatgttgcatgagctcataaagctgctgtactatgcccggtgctccaacgtcactatcatccgcattggcacttctggtgggatagggtctggagcccggcactgtggtcataacagagcaggcagtggatacctgcttcaaggcagagtttgagcagattgtcctggggaagcgggtcatccggaaaacggaccttaacaagaagctggtgcaggagctgttgctgtgttctgcagagctgagcgagttcaccacagtggtggggaacaccatgtgcaccttggacttctatgaagggcaaggccgtctggatggggctctctgctcctacacggagaaggacaagcaggcgtatctggaggcagcctatgcagccggcgtccgcaatatcgagatggagtcctcggtgtttgccgccatgtgcagcgcctgcggcctccaagcggccgtggtgtgtgtcaccctcctgaaccgcctggaaggggaccagatcagcagccctcgcaatgtgctcagcgagtaccagcagaggccgcagcggctggtgagctacttcatcaagaagaaactgagcaaggcctgagcgctgccctgcacctccgcagacctgctgtgatgacttgccattaaaagcattgtccaaacccaaagggggcgtttaagtttctcgagggcgaagttacggtaccggttttggtcaagggcccataggggggatttagaaggcggggggtttaaagggatgggaagggatggattgggaggacccttgggtggtatggacaccccagagtagtaggtataattggattgtgagattttgggaatttgtttataaagc

SEQ ID NO: 313367 - DNA, 1601 bp, Homo sapiens
tagcctacgctaggtgcgaggctgggtttgatgagtcacctcgcaagtggttccctcattcgagtgctccggcgcacagacccgcgccccgccgtccgcgagcctcccgagagccgtcccttcgtccggccctggagcattgcgtttgtcgccggtgtcgcagtgcgaggatggcgccgcgggtgtagcggctctctgcgcaggccgagtgggcccagagaagcgaggaactccgcagctcgtcgacacgtctcgtctcctgtcccaattcagggcttggtgaggtgactcgcggtcgcgggtgactcgccggcaggacactgcctggaacgcctggagcgcctcccactgcagacgtctgtccgcctccagccgctctcctctgacgggtcctgcctcagttggcggaatggcggccacgggagccaatgcagagaaagctgaaagtcacaatgattgccccgtcagacttttaaatccaaacatagcaaaaatgaaagaagatattctctatcatttcaatctcaccactagcagacacaatttcccagccttgtttggagatgtgaagtttgtgtgtgttggtggaagcccctcccggatgaaagccttcatcaggtgcgttggtgcagagctgggccttgactgcccaggtagagactatcccaacatctgtgcgggaactgaccgctatgccatgtataaagtaggaccggtgctgtctgtcagtcatggtatgggcattccttctatctcaatcatgttgcatgagctcataaagctgctgtactatgcccggtgctccaacgtcactatcatccgcattggcacttctggtgggatagggtctggagcccggcactgtggtcataacagagcaggcagtggatacctgcttcaaggcagagtttgagcagattgtcctggggaagcgggtcatccggaaaacggaccttaacaagaagctggtgcaggagctgttgctgtgttctgcagagctgagcgagttcaccacagtggtggggaacaccatgtgcaccttggacttctatgaagggcaaggccgtctggatggggctctctgctcctacacggagaaggacaagcaggcgtatctggaggcagcctatgcagccggcgtccgcaatatcgagatggagtcctcggtgtttgccgccatgtgcagcgcctgcggcctccaagcggccgtggtgtgtgtcaccctcctgaaccgcctggaaggggaccagatcagcagccctcgcaatgtgctcagcgagtaccagcagaggccgcagcggctggtgagctacttcatcaagaagaaactgagcaaggcctgagcgctgccctgcacctccgcagacctgctgtgatgacttgccattaaaagcattgtccaaacccaaagggggcgtttaagtttctcgagggcgaagttacggtaccggttttggtcaagggcccataggggggatttagaaggcggggggtttaaagggatgggaagggatggattgggaggacccttgggtggtatggacaccccagagtagtaggtataattggattgtgagattttgggaatttgtttataaagc

SEQ ID NO: 313368 - DNA, 1267 bp, Homo sapiens
ggtcagctgagttcgccggcccagggcaggcggggcccgagcctagcggtaacccccgggcagggcggggccgctcgcagactccatatgagattcacctcgcaagtggttccctcattcgagtgctccggcgcacagacccgcgccccgccgtccgcgagcctcccgagagccgtcccttcgtccggccctggagcattgcgtttgtcgccggtgtcgcagtgcgaggatggcgccgcgggtgtagcggctctctgcgcaggccgagtgggcccagagaagcgaggaactccgcagctcgtcgacacgtctcgtctcctgtcccaattcagggcttggtgaggtgactcgcggtcgcgggtgactcgccggcaggacactgcctggaacgcctggagcgcctcccactgcagacgtctgtccgcctccagccgctctcctctgacgggtcctgcctcagttggcggaatggcggccacgggagccaatgcagagaaagctgaaagtcacaagtctggagcccggcactgtggtcataacagagcaggcagtggatacctgcttcaaggcagagtttgagcagattgtcctggggaagcgggtcatccggaaaacggaccttaacaagaagctggtgcaggagctgttgctgtgttctgcagagctgagcgagttcaccacagtggtggggaacaccatgtgcaccttggacttctatgaagggcaaggccgtctggatggggctctctgctcctacacggagaaggacaagcaggcgtatctggaggcagcctatgcagccggcgtccgcaatatcgagatggagtcctcggtgtttgccgccatgtgcagcgcctgcggcctccaagcggccgtggtgtgtgtcaccctcctgaaccgcctggaaggggaccagatcagcagccctcgcaatgtgctcagcgagtaccagcagaggccgcagcggctggtgagctacttcatcaagaagaaactgagcaaggcctgagcgctgccctgcacctccgcagacctgctgtgatgacttgccattaaaagcattgtccaaacccaaagggggcgtttaagtttctcgagggcgaagttacggtaccggttttggtcaagggcccataggggggatttagaaggcggggggtttaaagggatgggaagggatggattgggaggacccttgggtggtatggacaccccagagtagtaggtataattggattgtgagattttgggaatttgtttataaagc

SEQ ID NO: 313369 - DNA, 2009 bp, Homo sapiens
atagctagtacgaggccgcgcttaatcggacgagggagtcacttcccctcctcgggcgagctcctggctttgccccagcaagcgggaactcccaggatcaggaaggtcccagagaaactccccaggggggaagccgaggccgtccagagagatccagggtacacacagtgacagtgccagctccacattcccgaccaccgggccagggctggttccacgctgtcatttctctccgctggccccagccgcggggccaccgccagacagacagaccggggatcctgcctggcggcgtgaccttgggttagtcctagagccgcttctagcccggtttcctccgccccaggttaggaccagggcggggccgctcgcagactccatatgagattcacctcgcaagtggttccctcattcgagtgctccggcgcacagacccgcgccccgccgtccgcgagcctcccgagagccgtcccttcgtccggccctggagcattgcgtttgtcgccggtgtcgcagtgcgaggatggcgccgcgggtgtagcggctctctgcgcaggccgagtgggcttggtgaggtgactcgcggtcgcgggtgactcgccggcaggacactgcctggaacgcctggagcgcctcccactgcagacgtctgtccgcctccagccgctctcctctgacgggtcctgcctcagttggcggaatggcggccacgggagccaatgcagagaaagctgaaagtcacaatgattgccccgtcagacttttaaatccaaacatagcaaaaatgaaagaagatattctctatcatttcaatctcaccactagcagacacaatttcccagccttgtttggagatgtgaagtttgtgtgtgttggtggaagcccctcccggatgaaagccttcatcaggtgcgttggtgcagagctgggccttgactgcccaggtagagactatcccaacatctgtgcgggaactgaccgctatgccatgtataaagtaggaccggtgctgtctgtcagtcatggtatgggcattccttctatctcaatcatgttgcatgagctcataaagctgctgtactatgcccggtgctccaacgtcactatcatccgcattggcacttctggtgggatagggtctggagcccggcactgtggtcataacagagcaggcagtggatacctgcttcaaggcagagtttgagcagattgtcctggggaagcgggtcatccggaaaacggaccttaacaagaagctggtgcaggagctgttgctgtgttctgcagagctgagcgagttcaccacagtggtggggaacaccatgtgcaccttggacttctatgaagggcaaggccgtctggatggggctctctgctcctacacggagaaggacaagcaggcgtatctggaggcagcctatgcagccggcgtccgcaatatcgagatggagtcctcggtgtttgccgccatgtgcagcgcctgcggcctccaagcggccgtggtgtgtgtcaccctcctgaaccgcctggaaggggaccagatcagcagccctcgcaatgtgctcagcgagtaccagcagaggccgcagcggctggtgagctacttcatcaagaagaaactgagcaaggcctgagcgctgccctgcacctccgcagacctgctgtgatgacttgccattaaaagcattgtccaaaatcccctgttgtgtggactttgagcacactttacacaagaatctagaaaatcagatcgcgattaagagacagagaatcttggattaaccgcatgggagatgttcttccttttgaagtttcattggagcattttcaatgatgttagcctgatttggggtttcttcaagaacattctaccaaatttttgtactatttctagggaaatttttcagactttaaaattctaatggtagtcagatttcatgtcactaaacaagaaatctgacaatagtgccaggaaactaatttcctgatacattaaaaaaattccatgc

SEQ ID NO: 313370 - DNA, 1165 bp, Homo sapiens
acccacgcgtccgcggacgcgtgggtcggcgcacagacccgcgccccgccgtccgcgagcctcccgagagccgtcccttcgtccggccctggagcattgcgtttgtcgccggtgtcgcagtgcgaggatggcgccgcgggtgtagcggctctctgcgcaggccgagtgggcccagagaagcgaggaactccgcagctcgtcgacacgtctcgtctcctgtcccaattcagggcttggtgaggtgactcgcggtcgcgggtgactcgccggcaggacactgcctggaacgcctggagcgcctcccactgcagacgtctgtccgcctccagccgctctcctctgacgggtcctgcctcagttggcggaatggcggccacgggagccaatgcagagaaagctgaaagtcacaagtctggagcccggcactgtggtcataacagagcaggcagtggatacctgcttcaaggcagagtttgagcagattgtcctggggaagcgggtcatccggaaaacggaccttaacaagaagctggtgcaggagctgttgctgtgttctgcagagctgagcgagttcaccacagtggtggggaacaccatgtgcaccttggacttctatgaagggcaaggccgtctggatggggctctctgctcctacacggagaaggacaagcaggcgtatctggaggcagcctatgcagccggcgtccgcaatatcgagatggagtcctcggtgtttgccgccatgtgcagcgcctgcggcctccaagcggccgtggtgtgtgtcaccctcctgaaccgcctggaaggggaccagatcagcagccctcgcaatgtgctcagcgagtaccagcagaggccgcagcggctggtgagctacttcatcaagaagaaactgagcaaggcctgagcgctgccctgcacctccgcagacctgctgtgatgacttgccattaaaagcattgtccaaacccaaagggggcgtttaagtttctcgagggcgaagttacggtaccggttttggtcaagggcccataggggggatttagaaggcggggggtttaaagggatgggaagggatggattgggaggacccttgggtggtatggacaccccagagtagtaggtataattggattgtgagattttgggaatttgtttataaagc

SEQ ID NO: 313371 - DNA, 1434 bp, Homo sapiens
ggtcagctgagttcgccggcccagggcaggcggggcccgagcctagcggtaacccccgggcagggcggggccgctcgcagactccatatgagattcacctcgcaagtggttccctcattcgagtgctccggcgcacagacccgcgccccgccgtccgcgagcctcccgagagccgtcccttcgtccggccctggagcattgcgtttgtcgccggtgtcgcagtgcgaggatggcgccgcgggtgtagcggctctctgcgcaggccgagtgggcccagagaagcgaggaactccgcagctcgtcgacacgtctcgtctcctgtcccaattcagggcttggtgaggtgactcgcggtcgcgggtgactcgccggcaggacactgcctggaacgcctggagcgcctcccactgcagacgtctgtccgcctccagccgctctcctctgacgggtcctgcctcagttggcggaatggcggccacgggagccaatgcagagaaagctgaaagtcacaatgattgccccgtcagacttttaaatccaaacatagcaaaaatgaaagaagatattctctatcatttcaatctcaccactagcagacacaatttcccagccttgtttggagatgtgaagtttgtgtgtgttggtggaagcccctcccggatgaaagccttcatcaggtgtctggagcccggcactgtggtcataacagagcaggcagtggatacctgcttcaaggcagagtttgagcagattgtcctggggaagcgggtcatccggaaaacggaccttaacaagaagctggtgcaggagctgttgctgtgttctgcagagctgagcgagttcaccacagtggtggggaacaccatgtgcaccttggacttctatgaagggcaaggccgtctggatggggctctctgctcctacacggagaaggacaagcaggcgtatctggaggcagcctatgcagccggcgtccgcaatatcgagatggagtcctcggtgtttgccgccatgtgcagcgcctgcggcctccaagcggccgtggtgtgtgtcaccctcctgaaccgcctggaaggggaccagatcagcagccctcgcaatgtgctcagcgagtaccagcagaggccgcagcggctggtgagctacttcatcaagaagaaactgagcaaggcctgagcgctgccctgcacctccgcagacctgctgtgatgacttgccattaaaagcattgtccaaacccaaagggggcgtttaagtttctcgagggcgaagttacggtaccggttttggtcaagggcccataggggggatttagaaggcggggggtttaaagggatgggaagggatggattgggaggacccttgggtggtatggacaccccagagtagtaggtataattggattgtgagattttgggaatttgtttataaagc

SEQ ID NO: 313372 - DNA, 1533 bp, Homo sapiens
ataggctaggtgcgggcctgggtgttgcatcacctcgcaagtggttccctcattcgagtgctccggcgcacagacccgcgccccgccgtccgcgagcctcccgagagccgtcccttcgtccggccctggagcattgcgtttgtcgccggtgtcgcagtgcgaggatggcgccgcgggtgtagcggctctctgcgcaggccgagtgggcttggtgaggtgactcgcggtcgcgggtgactcgccggcaggacactgcctggaacgcctggagcgcctcccactgcagacgtctgtccgcctccagccgctctcctctgacgggtcctgcctcagttggcggaatggcggccacgggagccaatgcagagaaagctgaaagtcacaatgattgccccgtcagacttttaaatccaaacatagcaaaaatgaaagaagatattctctatcatttcaatctcaccactagcagacacaatttcccagccttgtttggagatgtgaagtttgtgtgtgttggtggaagcccctcccggatgaaagccttcatcaggtgcgttggtgcagagctgggccttgactgcccaggtagagactatcccaacatctgtgcgggaactgaccgctatgccatgtataaagtaggaccggtgctgtctgtcagtcatggtatgggcattccttctatctcaatcatgttgcatgagctcataaagctgctgtactatgcccggtgctccaacgtcactatcatccgcattggcacttctggtgggatagggtctggagcccggcactgtggtcataacagagcaggcagtggatacctgcttcaaggcagagtttgagcagattgtcctggggaagcgggtcatccggaaaacggaccttaacaagaagctggtgcaggagctgttgctgtgttctgcagagctgagcgagttcaccacagtggtggggaacaccatgtgcaccttggacttctatgaagggcaaggccgtctggatggggctctctgctcctacacggagaaggacaagcaggcgtatctggaggcagcctatgcagccggcgtccgcaatatcgagatggagtcctcggtgtttgccgccatgtgcagcgcctgcggcctccaagcggccgtggtgtgtgtcaccctcctgaaccgcctggaaggggaccagatcagcagccctcgcaatgtgctcagcgagtaccagcagaggccgcagcggctggtgagctacttcatcaagaagaaactgagcaaggcctgagcgctgccctgcacctccgcagacctgctgtgatgacttgccattaaaagcattgtccaaacccaaagggggcgtttaagtttctcgagggcgaagttacggtaccggttttggtcaagggcccataggggggatttagaaggcggggggtttaaagggatgggaagggatggattgggaggacccttgggtggtatggacaccccagagtagtaggtataattggattgtgagattttgggaatttgtttataaagc

SEQ ID NO: 313373 - DNA, 1653 bp, Homo sapiens
atagctagtacgaggccgcgcttaatcggacgagggagtcacttcccctcctcgggcgagctcctggctttgccccagcaagcgggaactcccaggatcaggaaggtcccagagaaactccccaggggggaagccgaggccgtccagagagatccagggtacacacagtgacagtgccagctccacattcccgaccaccgggccagggctggttccacgctgtcatttctctccgctggccccagccgcggggccaccgccagacagacagaccggggatcctgcctggcggcgtgaccttgggttagtcctagagccgcttctagcccggtttcctccgccccaggttaggaccaggcgcacagacccgcgccccgccgtccgcgagcctcccgagagccgtcccttcgtccggccctggagcattgcgtttgtcgccggtgtcgcagtgcgaggatggcgccgcgggtgtagcggctctctgcgcaggccgagtgggcccagagaagcgaggaactccgcagctcgtcgacacgtctcgtctcctgtcccaattcagggcttggtgaggtgactcgcggtcgcgggtgactcgccggcaggacactgcctggaacgcctggagcgcctcccactgcagacgtctgtccgcctccagccgctctcctctgacgggtcctgcctcagttggcggaatggcggccacgggagccaatgcagagaaagctgaaagtcacaatttgtgtgtgttggtggaagcccctcccggatgaaagccttcatcaggtgcgttggtgcagagctgggccttgactgcccaggtagagactatcccaacatctgtgcgggaactgaccgctatgccatgtataaagtaggaccggtgctgtctgtcagtgtctggagcccggcactgtggtcataacagagcaggcagtggatacctgcttcaaggcagagtttgagcagattgtcctggggaagcgggtcatccggaaaacggaccttaacaagaagctggtgcaggagctgttgctgtgttctgcagagctgagcgagttcaccacagtggtggggaacaccatgtgcaccttggacttctatgaagggcaaggccgtctggatggggctctctgctcctacacggagaaggacaagcaggcgtatctggaggcagcctatgcagccggcgtccgcaatatcgagatggagtcctcggtgtttgccgccatgtgcagcgcctgcggcctccaagcggccgtggtgtgtgtcaccctcctgaaccgcctggaaggggaccagatcagcagccctcgcaatgtgctcagcgagtaccagcagaggccgcagcggctggtgagctacttcatcaagaagaaactgagcaaggcctgagcgctgccctgcacctccgcagacctgctgtgatgacttgccattaaaagcattgtccaaacccaaagggggcgtttaagtttctcgagggcgaagttacggtaccggttttggtcaagggcccataggggggatttagaaggcggggggtttaaagggatgggaagggatggattgggaggacccttgggtggtatggacaccccagagtagtaggtataattggattgtgagattttgggaatttgtttataaagc

SEQ ID NO: 313374 - DNA, 1501 bp, Homo sapiens
taggctaggtacgaggctgggtggtgaattcctgcgcacagacccgcgccccgccgtccgcgagcctcccgagagccgtcccttcgtccggccctggagcattgcgtttgtcgccggtgtcgcagtgcgaggatggcgccgcgggtgtagcggctctctgcgcaggccgagtgggcttggtgaggtgactcgcggtcgcgggtgactcgccggcaggacactgcctggaacgcctggagcgcctcccactgcagacgtctgtccgcctccagccgctctcctctgacgggtcctgcctcagttggcggaatggcggccacgggagccaatgcagagaaagctgaaagtcacaatgattgccccgtcagacttttaaatccaaacatagcaaaaatgaaagaagatattctctatcatttcaatctcaccactagcagacacaatttcccagccttgtttggagatgtgaagtttgtgtgtgttggtggaagcccctcccggatgaaagccttcatcaggtgcgttggtgcagagctgggccttgactgcccaggtagagactatcccaacatctgtgcgggaactgaccgctatgccatgtataaagtaggaccggtgctgtctgtcagtcatggtatgggcattccttctatctcaatcatgttgcatgagctcataaagctgctgtactatgcccggtgctccaacgtcactatcatccgcattggcacttctggtgggatagggtctggagcccggcactgtggtcataacagagcaggcagtggatacctgcttcaaggcagagtttgagcagattgtcctggggaagcgggtcatccggaaaacggaccttaacaagaagctggtgcaggagctgttgctgtgttctgcagagctgagcgagttcaccacagtggtggggaacaccatgtgcaccttggacttctatgaagggcaaggccgtctggatggggctctctgctcctacacggagaaggacaagcaggcgtatctggaggcagcctatgcagccggcgtccgcaatatcgagatggagtcctcggtgtttgccgccatgtgcagcgcctgcggcctccaagcggccgtggtgtgtgtcaccctcctgaaccgcctggaaggggaccagatcagcagccctcgcaatgtgctcagcgagtaccagcagaggccgcagcggctggtgagctacttcatcaagaagaaactgagcaaggcctgagcgctgccctgcacctccgcagacctgctgtgatgacttgccattaaaagcattgtccaaacccaaagggggcgtttaagtttctcgagggcgaagttacggtaccggttttggtcaagggcccataggggggatttagaaggcggggggtttaaagggatgggaagggatggattgggaggacccttgggtggtatggacaccccagagtagtaggtataattggattgtgagattttgggaatttgtttataaagc

SEQ ID NO: 313375 - DNA, 296 bp, Homo sapiens
tgatgttttgtccccaccgccttttaaagggagaagggggtaaaatttcatttggaggatgattgttacgcgagctttcagagttcagatggcgtcaagtggccatcgagtcaacatttaacaaaatgttaccgcataaaatattgtcatcgagttatctggcagctccgcagagaaacttcacaggcatatgcgttatatgacataatttgcatggggaagggggtcccttcacgattcttttatatggcaacctgttcttggacctggcagggcccagagaagcgaggaactcc

SEQ ID NO: 313376 - DNA, 771 bp, Homo sapiens
ggggtttcaccatgttgggcaggctggtctcgaactcctgacctcaggtgatccatccgcctcggccttccaaagtgctgggattacaggcgtgagccaccactcccggcccaaccccatgttttctcaggaactggagttccctttaggaagcaagtaacagaggtgctgggctgcccgggcctctaggtcgtcttctttcccaggctctgtgctctcaccagagtgcgcgttcgggaagcagggagaggaccaggaaagacgcctgagacggagagtgggcaccggccgggggcaggcaggtccggcccctgggggtcagagtgcagcgccggtttgaggcagttcggccacttagctgcgactcgaagtgaatgagtcacttcccctcctcgggcgagctcctggctttgccccagcaagcgggaactcccaggatcaggaaggtcccagagaaactccccaggggggaagccgaggccgtccagagagatccagggtacacacagtgacagtgccagctccacattcccgaccaccgggccagggctggttccacgctgtcatttctctccgctggccccagccgcggggccaccgccagacagacagaccggggatcctgcctggcggcgtgaccttgggttagtcctagagccgcttctagcccggtttcctccgccccaggttaggaccagacgtgggtaagaagatttcctctgtagtaggggctgtttaatgtgtaacagaactggctgctggttctttaca

SEQ ID NO: 313377 - DNA, 828 bp, Homo sapiens
tgtgagctgcagaggagcagagagcggcccggcgcggctgcgcggggaggcgggcgcgcggccgggaggttctggggctgggcccagagaagcgaggaactccgcagctcgtcgacacgtctcgtctcctgtcccaattcagggcttggtgaggtgactcgcggtcgcgggtgactcgccggcaggacactgcctggaacgcctggagcgcctcccactgcagacgtctgtccgcctccagccgctctcctctgacgggtcctgcctcagttggcggaatggcggccacgggagccaatgcagagaaagctgaaagtcacaatgattgccccgtcagacttttaaatccaaacatagcaaaaatgaaagaagatattctctatcatttcaatctcaccactagcagacacaatttcccagccttgtttggagatgtgaagttatgtgtgtgttggtggagagacagacaggatgagaggaaatataaggtaagaaaggagcagactggagaaagaagtgagaggagaaacaaacgagaacagttgagaagagaagagaacagcaagagcaaagaaatcaagacagacccgaggaagacacgaaagcaacggaacagagcataaacagacaacacaaaacagaagacaagaggcagtacagaagaagaactcacaccggaagctacacaccaacaacaatcaaaagaaacaggacaaatagaccgcgacagagacaagagaccgaaacaagagaacagaacaaaccacagcgaagacgcaggagcacagacacaaaggaacagaaagcagagacaacagacaagaacat

SEQ ID NO: 313378 - DNA, 1660 bp, Homo sapiens
ggtcagctgagttcgccggcccagggcaggcggggcccgagcctagcggtaacccccgggcagggcggggccgctcgcagactccatatgagattcacctcgcaagtggttccctcattcgagtgctccggcgcacagacccgcgccccgccgtccgcgagcctcccgagagccgtcccttcgtccggccctggagcattgcgtttgtcgccggtgtcgcagtgcgaggatggcgccgcgggtgtagcggctctctgcgcaggccgagtgggcccagagaagcgaggaactccgcagctcgtcgacacgtctcgtctcctgtcccaattcagggcttggtgaggtgactcgcggtcgcgggtgactcgccggcaggacactgcctggaacgcctggagcgcctcccactgcagacgtctgtccgcctccagccgctctcctctgacgggtcctgcctcagttggcggaatggcggccacgggagccaatgcagagaaagctgaaagtcacaatgattgccccgtcagacttttaaatccaaacatagcaaaaatgaaagaagatattctctatcatttcaatctcaccactagcagacacaatttcccagccttgtttggagatgtgaagtttgtgtgtgttggtggaagcccctcccggatgaaagccttcatcaggtgcgttggtgcagagctgggccttgactgcccaggtagagactatcccaacatctgtgcgggaactgaccgctatgccatgtataaagtaggaccggtgctgtctgtcagtcatggtatgggcattccttctatctcaatcatgttgcatgagctcataaagctgctgtactatgcccggtgctccaacgtcactatcatccgcattggcacttctggtgggatagggtctggagcccggcactgtggtcataacagagcaggcagtggatacctgcttcaaggcagagtttgagcagattgtcctggggaagcgggtcatccggaaaacggaccttaacaagaagctggtgcaggagctgttgctgtgttctgcagagctgagcgagttcaccacagtggtggggaacaccatgtgcaccttggacttctatgaagggcaaggccgtctggatggggctctctgctcctacacggagaaggacaagcaggcgtatctggaggcagcctatgcagccggcgtccgcaatatcgagatggagtcctcggtgtttgccgccatgtgcagcgcctgcggcctccaagcggccgtggtgtgtgtcaccctcctgaaccgcctggaaggggaccagatcagcagccctcgcaatgtgctcagcgagtaccagcagaggccgcagcggctggtgagctacttcatcaagaagaaactgagcaaggcctgagcgctgccctgcacctccgcagacctgctgtgatgacttgccattaaaagcattgtccaaacccaaagggggcgtttaagtttctcgagggcgaagttacggtaccggttttggtcaagggcccataggggggatttagaaggcggggggtttaaagggatgggaagggatggattgggaggacccttgggtggtatggacaccccagagtagtaggtataattggattgtgagattttgggaatttgtttataaagc

SEQ ID NO: 313379 - DNA, 1887 bp, Homo sapiens
atagctagtacgaggccgcgcttaatcggacgagggagtcacttcccctcctcgggcgagctcctggctttgccccagcaagcgggaactcccaggatcaggaaggtcccagagaaactccccaggggggaagccgaggccgtccagagagatccagggtacacacagtgacagtgccagctccacattcccgaccaccgggccagggctggttccacgctgtcatttctctccgctggccccagccgcggggccaccgccagacagacagaccggggatcctgcctggcggcgtgaccttgggttagtcctagagccgcttctagcccggtttcctccgccccaggttaggaccaggcgcacagacccgcgccccgccgtccgcgagcctcccgagagccgtcccttcgtccggccctggagcattgcgtttgtcgccggtgtcgcagtgcgaggatggcgccgcgggtgtagcggctctctgcgcaggccgagtgggcccagagaagcgaggaactccgcagctcgtcgacacgtctcgtctcctgtcccaattcagggcttggtgaggtgactcgcggtcgcgggtgactcgccggcaggacactgcctggaacgcctggagcgcctcccactgcagacgtctgtccgcctccagccgctctcctctgacgggtcctgcctcagttggcggaatggcggccacgggagccaatgcagagaaagctgaaagtcacaatgattgccccgtcagacttttaaatccaaacatagcaaaaatgaaagaagatattctctatcatttcaatctcaccactagcagacacaatttcccagccttgtttggagatgtgaagtttgtgtgtgttggtggaagcccctcccggatgaaagccttcatcaggtgcgttggtgcagagctgggccttgactgcccaggtagagactatcccaacatctgtgcgggaactgaccgctatgccatgtataaagtaggaccggtgctgtctgtcagtcatggtatgggcattccttctatctcaatcatgttgcatgagctcataaagctgctgtactatgcccggtgctccaacgtcactatcatccgcattggcacttctggtgggatagggtctggagcccggcactgtggtcataacagagcaggcagtggatacctgcttcaaggcagagtttgagcagattgtcctggggaagcgggtcatccggaaaacggaccttaacaagaagctggtgcaggagctgttgctgtgttctgcagagctgagcgagttcaccacagtggtggggaacaccatgtgcaccttggacttctatgaagggcaaggccgtctggatggggctctctgctcctacacggagaaggacaagcaggcgtatctggaggcagcctatgcagccggcgtccgcaatatcgagatggagtcctcggtgtttgccgccatgtgcagcgcctgcggcctccaagcggccgtggtgtgtgtcaccctcctgaaccgcctggaaggggaccagatcagcagccctcgcaatgtgctcagcgagtaccagcagaggccgcagcggctggtgagctacttcatcaagaagaaactgagcaaggcctgagcgctgccctgcacctccgcagacctgctgtgatgacttgccattaaaagcattgtccaaacccaaagggggcgtttaagtttctcgagggcgaagttacggtaccggttttggtcaagggcccataggggggatttagaaggcggggggtttaaagggatgggaagggatggattgggaggacccttgggtggtatggacaccccagagtagtaggtataattggattgtgagattttgggaatttgtttataaagc

SEQ ID NO: 313380 - DNA, 1568 bp, Homo sapiens
ctaggctaggtacgaggccggtgggtgaatcggccgaggcgcacagacccgcgccccgccgtccgcgagcctcccgagagccgtcccttcgtccggccctggagcattgcgtttgtcgccggtgtcgcagtgcgaggatggcgccgcgggtgtagcggctctctgcgcaggccgagtgggcccagagaagcgaggaactccgcagctcgtcgacacgtctcgtctcctgtcccaattcagggcttggtgaggtgactcgcggtcgcgggtgactcgccggcaggacactgcctggaacgcctggagcgcctcccactgcagacgtctgtccgcctccagccgctctcctctgacgggtcctgcctcagttggcggaatggcggccacgggagccaatgcagagaaagctgaaagtcacaatgattgccccgtcagacttttaaatccaaacatagcaaaaatgaaagaagatattctctatcatttcaatctcaccactagcagacacaatttcccagccttgtttggagatgtgaagtttgtgtgtgttggtggaagcccctcccggatgaaagccttcatcaggtgcgttggtgcagagctgggccttgactgcccaggtagagactatcccaacatctgtgcgggaactgaccgctatgccatgtataaagtaggaccggtgctgtctgtcagtcatggtatgggcattccttctatctcaatcatgttgcatgagctcataaagctgctgtactatgcccggtgctccaacgtcactatcatccgcattggcacttctggtgggatagggtctggagcccggcactgtggtcataacagagcaggcagtggatacctgcttcaaggcagagtttgagcagattgtcctggggaagcgggtcatccggaaaacggaccttaacaagaagctggtgcaggagctgttgctgtgttctgcagagctgagcgagttcaccacagtggtggggaacaccatgtgcaccttggacttctatgaagggcaaggccgtctggatggggctctctgctcctacacggagaaggacaagcaggcgtatctggaggcagcctatgcagccggcgtccgcaatatcgagatggagtcctcggtgtttgccgccatgtgcagcgcctgcggcctccaagcggccgtggtgtgtgtcaccctcctgaaccgcctggaaggggaccagatcagcagccctcgcaatgtgctcagcgagtaccagcagaggccgcagcggctggtgagctacttcatcaagaagaaactgagcaaggcctgagcgctgccctgcacctccgcagacctgctgtgatgacttgccattaaaagcattgtccaaacccaaagggggcgtttaagtttctcgagggcgaagttacggtaccggttttggtcaagggcccataggggggatttagaaggcggggggtttaaagggatgggaagggatggattgggaggacccttgggtggtatggacaccccagagtagtaggtataattggattgtgagattttgggaatttgtttataaagc

SEQ ID NO: 313381 - DNA, 1173 bp, Homo sapiens
actatgctaggtcgagctgggttaatcggccgaggcgcgcacagacccgcgccccgccgtccgcgagcctcccgagagccgtcccttcgtccggccctggagcattgcgtttgtcgccggtgtcgcagtgcgaggatggcgccgcgggtgtagcggctctctgcgcaggccgagtgggcccagagaagcgaggaactccgcagctcgtcgacacgtctcgtctcctgtcccaattcagggcttggtgaggtgactcgcggtcgcgggtgactcgccggcaggacactgcctggaacgcctggagcgcctcccactgcagacgtctgtccgcctccagccgctctcctctgacgggtcctgcctcagttggcggaatggcggccacgggagccaatgcagagaaagctgaaagtcacaagtctggagcccggcactgtggtcataacagagcaggcagtggatacctgcttcaaggcagagtttgagcagattgtcctggggaagcgggtcatccggaaaacggaccttaacaagaagctggtgcaggagctgttgctgtgttctgcagagctgagcgagttcaccacagtggtggggaacaccatgtgcaccttggacttctatgaagggcaaggccgtctggatggggctctctgctcctacacggagaaggacaagcaggcgtatctggaggcagcctatgcagccggcgtccgcaatatcgagatggagtcctcggtgtttgccgccatgtgcagcgcctgcggcctccaagcggccgtggtgtgtgtcaccctcctgaaccgcctggaaggggaccagatcagcagccctcgcaatgtgctcagcgagtaccagcagaggccgcagcggctggtgagctacttcatcaagaagaaactgagcaaggcctgagcgctgccctgcacctccgcagacctgctgtgatgacttgccattaaaagcattgtccaaacccaaagggggcgtttaagtttctcgagggcgaagttacggtaccggttttggtcaagggcccataggggggatttagaaggcggggggtttaaagggatgggaagggatggattgggaggacccttgggtggtatggacaccccagagtagtaggtataattggattgtgagattttgggaatttgtttataaagc

SEQ ID NO: 313382 - DNA, 1499 bp, Homo sapiens
atagctagtacgaggccgcgcttaatcggacgagggagtcacttcccctcctcgggcgagctcctggctttgccccagcaagcgggaactcccaggatcaggaaggtcccagagaaactccccaggggggaagccgaggccgtccagagagatccagggtacacacagtgacagtgccagctccacattcccgaccaccgggccagggctggttccacgctgtcatttctctccgctggccccagccgcggggccaccgccagacagacagaccggggatcctgcctggcggcgtgaccttgggttagtcctagagccgcttctagcccggtttcctccgccccaggttaggaccagggcggggccgctcgcagactccatatgagattcacctcgcaagtggttccctcattcgagtgctccggcgcacagacccgcgccccgccgtccgcgagcctcccgagagccgtcccttcgtccggccctggagcattgcgtttgtcgccggtgtcgcagtgcgaggatggcgccgcgggtgtagcggctctctgcgcaggccgagtgggcttggtgaggtgactcgcggtcgcgggtgactcgccggcaggacactgcctggaacgcctggagcgcctcccactgcagacgtctgtccgcctccagccgctctcctctgacgggtcctgcctcagttggcggaatggcggccacgggagccaatgcagagaaagctgaaagtcacaagtctggagcccggcactgtggtcataacagagcaggcagtggatacctgcttcaaggcagagtttgagcagattgtcctggggaagcgggtcatccggaaaacggaccttaacaagaagctggtgcaggagctgttgctgtgttctgcagagctgagcgagttcaccacagtggtggggaacaccatgtgcaccttggacttctatgaagggcaaggccgtctggatggggctctctgctcctacacggagaaggacaagcaggcgtatctggaggcagcctatgcagccggcgtccgcaatatcgagatggagtcctcggtgtttgccgccatgtgcagcgcctgcggcctccaagcggccgtggtgtgtgtcaccctcctgaaccgcctggaaggggaccagatcagcagccctcgcaatgtgctcagcgagtaccagcagaggccgcagcggctggtgagctacttcatcaagaagaaactgagcaaggcctgagcgctgccctgcacctccgcagacctgctgtgatgacttgccattaaaagcattgtccaaacccaaagggggcgtttaagtttctcgagggcgaagttacggtaccggttttggtcaagggcccataggggggatttagaaggcggggggtttaaagggatgggaagggatggattgggaggacccttgggtggtatggacaccccagagtagtaggtataattggattgtgagattttgggaatttgtttataaagc

SEQ ID NO: 313383 - DNA, 1037 bp, Homo sapiens
atagctagtacgaggccgcgcttaatcggacgagggagtcacttcccctcctcgggcgagctcctggctttgccccagcaagcgggaactcccaggatcaggaaggtcccagagaaactccccaggggggaagccgaggccgtccagagagatccagggtacacacagtgacagtgccagctccacattcccgaccaccgggccagggctggttccacgctgtcatttctctccgctggccccagccgcggggccaccgccagacagacagaccggggatcctgcctggcggcgtgaccttgggttagtcctagagccgcttctagcccggtttcctccgccccaggttaggaccagggcttggtgaggtgactcgcggtcgcgggtgactcgccggcaggacactgcctggaacgcctggagcgcctcccactgcagacgtctgtccgcctccagccgctctcctctgacgggtcctgcctcagttggcggaatggcggccacgggagccaatgcagagaaagctgaaagtcacaatgattgccccgtcagacttttaaatccaaacatagcaaaaatgaaagaagatattctctatcatttcaatctcaccactagcagacacaatttcccagccttgtttggagatgtgaagtttgtgtgtgttggtggaagcccctcccggatgaaagccttcatcaggtgcgttggtgcagagctgggccttgactgcccaggtagagactatcccaacatctgtgcgggaactgaccgctatgccatgtataaagtaggaccggtgctgtctgtcagtcatggtatgggcattccttctatctcaatcatgttgcatgagctcataaagctgctgtactatgcccggtgctccaacgtcactatcatccgcattggcacttctggtgggataggtcctggagcccggcctggggtccttaaccgagccggcgtggtacctgctcaggcgagtttggaggcgattgcccggggaccggcccccggaagggcttacagaagtg

SEQ ID NO: 313384 - DNA, 1543 bp, Homo sapiens
atagctagtacgaggccgcgcttaatcggacgagggagtcacttcccctcctcgggcgagctcctggctttgccccagcaagcgggaactcccaggatcaggaaggtcccagagaaactccccaggggggaagccgaggccgtccagagagatccagggtacacacagtgacagtgccagctccacattcccgaccaccgggccagggctggttccacgctgtcatttctctccgctggccccagccgcggggccaccgccagacagacagaccggggatcctgcctggcggcgtgaccttgggttagtcctagagccgcttctagcccggtttcctccgccccaggttaggaccaggcgcacagacccgcgccccgccgtccgcgagcctcccgagagccgtcccttcgtccggccctggagcattgcgtttgtcgccggtgtcgcagtgcgaggatggcgccgcgggtgtagcggctctctgcgcaggccgagtgggcccagagaagcgaggaactccgcagctcgtcgacacgtctcgtctcctgtcccaattcagggcttggtgaggtgactcgcggtcgcgggtgactcgccggcaggacactgcctggaacgcctggagcgcctcccactgcagacgtctgtccgcctccagccgctctcctctgacgggtcctgcctcagttggcggaatggcggccacgggagccaatgcagagaaagctgaaagtcacaatttgtgtgtgttggtggaagcccctcccggatgaaagccttcatcaggtgtctggagcccggcactgtggtcataacagagcaggcagtggatacctgcttcaaggcagagtttgagcagattgtcctggggaagcgggtcatccggaaaacggaccttaacaagaagctggtgcaggagctgttgctgtgttctgcagagctgagcgagttcaccacagtggtggggaacaccatgtgcaccttggacttctatgaagggcaaggccgtctggatggggctctctgctcctacacggagaaggacaagcaggcgtatctggaggcagcctatgcagccggcgtccgcaatatcgagatggagtcctcggtgtttgccgccatgtgcagcgcctgcggcctccaagcggccgtggtgtgtgtcaccctcctgaaccgcctggaaggggaccagatcagcagccctcgcaatgtgctcagcgagtaccagcagaggccgcagcggctggtgagctacttcatcaagaagaaactgagcaaggcctgagcgctgccctgcacctccgcagacctgctgtgatgacttgccattaaaagcattgtccaaacccaaagggggcgtttaagtttctcgagggcgaagttacggtaccggttttggtcaagggcccataggggggatttagaaggcggggggtttaaagggatgggaagggatggattgggaggacccttgggtggtatggacaccccagagtagtaggtataattggattgtgagattttgggaatttgtttataaagc

SEQ ID NO: 313385 - DNA, 2339 bp, Homo sapiens
ggcttgaactgagacgctccgctgggcgcgcagcagccgccgatcggacctcggggtcctggatgcaggactgtctgttacgtacagcccttgtgaccgtcacgggcggacaccggccaacgccgggttggggtgaggccgccgccgcggtccctccatcaccctcctggcccggcagaggaacccactgctccgggcggccggggacagaggtggctcaacagcgccgcctcgaagccagagccctccgcaggctagaggattgcggtttcccttcatctccgcggctcttattcctcccccgcgaggccgcccaccggggtacgctctcccgcgcctgcgccaattccgccccgccccgcccccatctaccgaccggatgttagcagatttcccatagtgcctcgctagtggcgggcatgataacacacgccggagggtcgcacgcgggttccagttgtgattgctggagttgtgtattgccaggaggctctccgagattggggtcgggtcactgcctcatccaccggagcgatggcgtttctccgaagcatgtggggcgtgctgagtgccctgggaaggtctggagcagagctgtgcaccggctgtggaagtcgactgcgctcccccttcagttttgtgtatttaccgaggtggttttcatctgtcttggcaagttgtccaaagaaacctgtaagttcttaccttcgattttctaaagaacaactacccatatttaaagctcagaacccagatgcaaaaactacagaactaattagaagaattgcccagcgttggagggaacttcctgattcaaagaaaaaaatatatcaagatgcttatagggcggagtggcaggtatataaagaagagataagcagatttaaagaacagctaactccaagtcagattatgtctttggaaaaagaaatcatggacaaacatttaaaaaggaaagctatgacaaaaaaaaaagagttaacactgcttggaaaaccaaaaagacctcgttcagcttataacgtttatgtagctgaaagattccaagaagctaagggtgattcaccgcaggaaaagctgaagactgtaaaggaaaactggaaaaatctgtctgactctgaaaaggaattatatattcagcatgctaaagaggacgaaactcgttatcataatgaaatgaagtcttgggaagaacaaatgattgaagttggacgaaaggatcttctacgtcgcacaataaagaaacaacgaaaatatggtgctgaggagtgttaaaagtagaagattgagatgtgttcacaatggataggcacaggaaaccagttaggtctcaatacctgaagctatcgtaaaattaagaaaggataaagttggtaaaccttttatatttagtatctttttattcagctcatggacttctgccagcataatacttgctttggaaaacccagataaaggttcatgcaaactttattttgtgtttaggaactactgaggatcagagtaatccaagcaaatgtgaatcattttacctttgacaaaggtaaatcagactatgaagttttttttatacaggatgatgactatggaaagagtactcttgtttccttatattatggaggcaggagtttcgttttcaaaattgttacaaattgtagaagccacggtgttctgtgatataagtgtgtgtttttcataaagcaggcagaactcatctaggtaaattacagttcctaggtataattcacattgtattcagagttgatggttgtacatataagtgattgctggttttagttgcaactttgtataaaagggactgagaaatttataaacttttttcttactgtcttttttctaaagtaaaaacaaagaaattatgtgccagatttatgcatattattttatgttgcatagaataaaatttttaatctttaattttacatttcctaaatatattttaagacgaaacatttgttctatagcttttccctttttttaagtaaggaattttatttttttctgaattattttctctcgtgagtatattgatccagaaagaaaacttgtattatgtgtgttttaaaatgagaaatctaaaaaacgaaaagtctccaaagtctctggaatttgaaacactttgcataacgtataaaagcctgtttaagagacagccaactatggcctgtggatcaaatccagcctgctgcctgctttttatggcctgtgagctaggaattgtgtttataattttaaatgtttttttttaaagacttttatgatacttgaaaattaacatgaatatttagtgttcataaataaagtttgttgaaacacaa

SEQ ID NO: 313386 - DNA, 407 bp, Homo sapiens
ataaaacttcagtggaaaaaagaccaagtgagagacttaaaagtcacgactaaagaattgtctcactctgatggaagccagctgctatgctgtgtgttgctctatggagagactcaggtagaaggaattgaaggaggctttcggccaacagtcagcaaggtactgaggctttcagtccaagagcctataaggaactgaatcctaccagcaaccaagcaagtggcttgaaaatggaccctctctcagctgagtctttgaataagatcacagctcttattcaatatgacaccttgattgtagtcttgttagagatcttgagccagtggcacccagctaagctgtacctgtattcctgacccataaaaccccacagataataaatgtttgtcattttaaactgtgaaaaa

SEQ ID NO: 313387 - DNA, 339 bp, Homo sapiens
atccttaatctctctatccttaatctctctatccttaatctctctatccttaatctctcttccttaatctctgtattcttaatctcagaacccagctcctcctttttctggctcagggaattgttaataaagttgcaacttctgtggaagcatccataaactatgcaaaaactacagaactaattagaagaattgcccagcgttggagggaacttcctgattcaaagaaaaaaatatatcaagatgcttaaagctgctatcatttcatcattaattataaacagatggaactttaccacgccttgccatttttttgctttttacttggcaagtgtttta

SEQ ID NO: 313388 - DNA, 2747 bp, Homo sapiens
ggcttgaactgagacgctccgctgggcgcgcagcagccgccgatcggacctcggggtcctggatgcaggactgtctgttacgtacagcccttgtgaccgtcacgggcggacaccggccaacgccgggttggggtgaggccgccgccgcggtccctccatcaccctcctggcccggcagaggaacccactgctccgggcggccggggacagaggtggctcaacagcgccgcctcgaagccagagccctccgcaggctagaggattgcggtttcccttcatctccgcggctcttattcctcccccgcgaggccgcccaccggggtacgctctcccgcgcctgcgccaattccgccccgccccgcccccatctaccgaccggatgttagcagatttcccatagtgcctcgctagtggcgggcatgataacacacgccggagggtcgcacgcgggttccagttgtgattgctggagttgtgtattgccaggaggctctccgagattggggtcgggtcactgcctcatccaccggagcgatggcgtttctccgaagcatgtggggcgtgctgagtgccctgggaaggtctggagcagagctgtgcaccggctgtggaagtcgactgcgctcccccttcagttttgtgtatttaccgaggtggttttcatctgtcttggcaagttgtccaaagaaacctgtaagttcttaccttcgattttctaaagaacaactacccatatttaaagctcagaacccagatgcaaaaactacagaactaattagaagaattgcccagcgttggagggaacttcctgattcaaagaaaaaaatatatcaagatgcttatagggcggagtggcaggtatataaagaagagataagcagatttaaagaacagctaactccaagtcagattatgtctttggaaaaagaaatcatggacaaacatttaaaaaggaaagctatgacaaaaaaaaaagagttaacactgcttggaaaaccaaaaagacctcgttcagcttataacgtttatgtagctgaaagattccaagaagctaagggtgattcaccgcaggaaaagctgaagactgtaaaggaaaactggaaaaatctgtctgactctgaaaaggaattatatattcagcatgctaaagaggacgaaactcgttatcataatgaaatgaagtcttgggaagaacaaatgattgaagttggacgaaaggatcttctacgtcgcacaataaagaaacaacgaaaatatggtgctgaggagtgttaaaagtagaagattgagatgtgttcacaatggataggcacaggaaaccagttaggtctcaatacctgaagctatcgtaaaattaagaaaggataaagttggtaaaccttttatatttagtatctttttattcagctcatggacttctgccagcataatacttgctttggaaaacccagataaaggttcatgcaaactttattttgtgtttaggaactactgaggatcagagtaatccaagcaaatgtgaatcattttacctttgacaaaggtaaatcagactatgaagttttttttatacaggatgatgactatggaaagagtactcttgtttccttatattatggaggcaggagtttcgttttcaaaattgttacaaattgtagaagccacggtgttctgtgatataagtgtgtgtttttcataaagcaggcagaactcatctaggtaaattacagttcctaggtataattcacattgtattcagagttgatggttgtacatataagtgattgctggttttagttgcaactttgtataaaagggactgagaaatttataaacttttttcttactgtcttttttctaaagtaaaaacaaagaaattatgtgccagatttatgcatattattttatgttgcatagaataaaatttttaatctttaattttacatttcctaaatatattttaagacgaaacatttgttctatagcttttccctttttttaagtaaggaattttatttttttctgaattattttctctcgtgagtatattgatccagaaagaaaacttgtattatgtgtgttttaaaatgagaaatctaaaaaacgaaaagtctccaaagtctctggaatttgaaacactttgcataacgtataaaagcctgtttaagagacagccaactatggcctgtggatcaaatccagcctgctgcctgctttttatggcctgtgagctaggaattgtgtttataattttaaatgtttttttttaaagacttttatgatacttgaaaattaacatgaatatttagtgttcataaataaagtttgttgaaacacaaaaaaaaaaaaaaaaaaaaaaaaaaaaaaaaaaaaaaaaaaaaaaaaaaaaaaaaaaaaaaaaaaaaaaaaaaaaaaaaaaaaaaaaaaaaaaaaaaaaaaaaaaaaaaaaaaaaaaaaaaaaaaaaaaaaaaaaagaggggggggggggacaaaacaacaacaaataccgggagaaaagaacaagaagagaacaccacaaaagtagaataaaagagaaaaaagcagacacaagaggacaacacaaacaatagaagaaagagcagtacaaggaaagaaacaaaaacccaagaaaagaaagcaaacaagaaccacgaagacaaaaaaaaaaacagctgtgagaacaaaaacaaacaaacacccagaacaagaaaaaagaagaggaaaacaaacaaaaagaaaaaagagaa

SEQ ID NO: 313389 - DNA, 2406 bp, Homo sapiens
ggcttgaactgagacgctccgctgggcgcgcagcagccgccgatcggacctcggggtcctggatgcaggactgtctgttacgtacagcccttgtgaccgtcacgggcggacaccggccaacgccgggttggggtgaggccgccgccgcggtccctccatcaccctcctggcccggcagaggaacccactgctccgggcggccggggacagaggtggctcaacagcgccgcctcgaagccagagccctccgcaggctagaggattgcggtttcccttcatctccgcggctcttattcctcccccgcgaggccgcccaccggggtacgctctcccgcgcctgcgccaattccgccccgccccgcccccatctaccgaccggatgttagcagatttcccatagtgcctcgctagtggcgggcatgataacacacgccggagggtcgcacgcgggttccagttgtgattgctggagttgtgtattgccaggaggctctccgagattggggtcgggtcactgcctcatccaccggagcgatggcgtttctccgaagcatgtggggcgtgctgagtgccctgggaaggtctggagcagagctgtgcaccggctgtggaagtcgactgcgctcccccttcagttttgtgtatttaccgaggtggttttcatctgtcttggcaagttgtccaaagaaacctgtaagttcttaccttcgattttctaaagaacaactacccatatttaaagctcagaacccagctcctcctttttctggctcagggaattgttaataaagttgcaacttctgtggaagcatccataaactatgcaaaaactacagaactaattagaagaattgcccagcgttggagggaacttcctgattcaaagaaaaaaatatatcaagatgcttatagggcggagtggcaggtatataaagaagagataagcagatttaaagaacagctaactccaagtcagattatgtctttggaaaaagaaatcatggacaaacatttaaaaaggaaagctatgacaaaaaaaaaagagttaacactgcttggaaaaccaaaaagacctcgttcagcttataacgtttatgtagctgaaagattccaagaagctaagggtgattcaccgcaggaaaagctgaagactgtaaaggaaaactggaaaaatctgtctgactctgaaaaggaattatatattcagcatgctaaagaggacgaaactcgttatcataatgaaatgaagtcttgggaagaacaaatgattgaagttggacgaaaggatcttctacgtcgcacaataaagaaacaacgaaaatatggtgctgaggagtgttaaaagtagaagattgagatgtgttcacaatggataggcacaggaaaccagttaggtctcaatacctgaagctatcgtaaaattaagaaaggataaagttggtaaaccttttatatttagtatctttttattcagctcatggacttctgccagcataatacttgctttggaaaacccagataaaggttcatgcaaactttattttgtgtttaggaactactgaggatcagagtaatccaagcaaatgtgaatcattttacctttgacaaaggtaaatcagactatgaagttttttttatacaggatgatgactatggaaagagtactcttgtttccttatattatggaggcaggagtttcgttttcaaaattgttacaaattgtagaagccacggtgttctgtgatataagtgtgtgtttttcataaagcaggcagaactcatctaggtaaattacagttcctaggtataattcacattgtattcagagttgatggttgtacatataagtgattgctggttttagttgcaactttgtataaaagggactgagaaatttataaacttttttcttactgtcttttttctaaagtaaaaacaaagaaattatgtgccagatttatgcatattattttatgttgcatagaataaaatttttaatctttaattttacatttcctaaatatattttaagacgaaacatttgttctatagcttttccctttttttaagtaaggaattttatttttttctgaattattttctctcgtgagtatattgatccagaaagaaaacttgtattatgtgtgttttaaaatgagaaatctaaaaaacgaaaagtctccaaagtctctggaatttgaaacactttgcataacgtataaaagcctgtttaagagacagccaactatggcctgtggatcaaatccagcctgctgcctgctttttatggcctgtgagctaggaattgtgtttataattttaaatgtttttttttaaagacttttatgatacttgaaaattaacatgaatatttagtgttcataaataaagtttgttgaaacacaa

SEQ ID NO: 313390 - DNA, 1383 bp, Homo sapiens
ggcttgaactgagacgctccgctgggcgcgcagcagccgccgatcggacctcggggtcctggatgcaggactgtctgttacgtacagcccttgtgaccgtcacgggcggacaccggccaacgccgggttggggtgaggccgccgccgcggtccctccatcaccctcctggcccggcagaggaacccactgctccgggcggccggggacagaggtggctcaacagcgccgcctcgaagccagagccctccgcaggctagaggattgcggtttcccttcatctccgcggctcttattcctcccccgcgaggccgcccaccggggtacgctctcccgcgcctgcgccaattccgccccgccccgcccccatctaccgaccggatgttagcagatttcccatagtgcctcgctagtggcgggcatgataacacacgccggagggtcgcacgcgggttccagttgtgattgctggagttgtgtattgccaggaggctctccgagattggggtcgggtcactgcctcatccaccggagcgatggcgtttctccgaagcatgtggggcgtgctgagtgccctgggaaggtctggagcagagctgtgcaccggctgtggaagtcgactgcgctcccccttcagttttgtgtatttaccgaggtggttttcatctgtcttggcaagttgtccaaagaaacctgtaagttcttaccttcgattttctaaagaacaactacccatatttaaagctcagaacccagatgcaaaaactacagaactaattagaagaattgcccagcgttggagggaacttcctgattcaaagaaaaaaatatatcaagatgcttatagggcggagtggcaggtatataaagaagagataagcagatttaaagaacagctaactccaagtcagattatgtctttggaaaaagaaatcatggacaaacatttaaaaaggaaagctatgacaaaaaaaaaagagttaacactgcttggaaaaccaaaaagacctcgttcagcttataacgtttatgtagctgaaagattccaagaagctaagggtgattcaccgcaggaaaagctgaagactgtaaaggaaaactggaaaaatctgtctgactctgaaaaggaattatatattcagcatgctaaagaggacgaaactcgttatcataatgaaatgaagtcttgggaagaacaaatgattgaagttggacgaaaggatcttctacgtcgcacaataaagaaacaacgaaaatatggtgctgaggagtgttaaaagtagaagattgagatgtgttcacaatggataggcacaggaaaccagttaggtctcaatacctgaagctatcgtaaaattaagaaaggataaagttggtaaaccttt

SEQ ID NO: 313391 - DNA, 1668 bp, Homo sapiens
ggcttgaactgagacgctccgctgggcgcgcagcagccgccgatcggacctcggggtcctggatgcaggactgtctgttacgtacagcccttgtgaccgtcacgggcggacaccggccaacgccgggttggggtgaggccgccgccgcggtccctccatcaccctcctggcccggcagaggaacccactgctccgggcggccggggacagaggtggctcaacagcgccgcctcgaagccagagccctccgcaggctagaggattgcggtttcccttcatctccgcggctcttattcctcccccgcgaggccgcccaccggggtacgctctcccgcgcctgcgccaattccgccccgccccgcccccatctaccgaccggatgttagcagatttcccatagtgcctcgctagtggcgggcatgataacacacgccggagggtcgcacgcgggttccagttgtgattgctggagttgtgtattgccaggaggctctccgagattggggtcgggtcactgcctcatccaccggagcgatggcgtttctccgaagcatgtggggcgtgctgagtgccctgggaaggtctggagcagagctgtgcaccggctgtggaagtcgactgcgctcccccttcagttttgtgtatttaccgaggtggttttcatctgtcttggcaagttgtccaaagaaacctgtaagttcttaccttcgattttctaaagaacaactacccatatttaaagctcagaacccagatgcaaaaactacagaactaattagaagaattgcccagcgttggagggaacttcctgattcaaagaaaaaaatatatcaagatgcttatagggcggagtggcaggtatataaagaagagataagcagatttaaagaacagctaactccaagtcagattatgtctttggaaaaagaaatcatggacaaacatttaaaaaggaaagctatgacaaaaaaaaaagagttaacactgcttggaaaaccaaaaagacctcgttcagcttataacgtttatgtagctgaaagattccaagaagctaagggtgattcaccgcaggaaaagctgaagactgtaaaggaaaactggaaaaatctgtctgactctgaaaaggaattatatattcagcatgctaaagaggacgaaactcgttatcataatgaaatgaagtcttgggaagaacaaatgattgaagttggacgaaaggatcttctacgtcgcacaataaagaaacaacgaaaatatggtgctgaggagtgttaaaagtagaagattgagatgtgttcacaatggataggcacaggaaaccactcactctgatggaagccagctgctatgctgtgtgttgctctatggagagactcaggtagaaggaattgaaggaggctttcggccaacagtcagcaaggtactgaggctttcagtccaagagcctataaggaactgaatcctaccagcaaccaagcaagtggcttgaaaatggaccctctctcagctgagtctttgaataagatcacagctcttattcaatatgacaccttgattgtagtcttgttagagatcttgagccagtggcacccagctaagctgtacctgtattcctgacccataaaaccccacagataataaatgtttgtcattttaaactgtgaaaaa

SEQ ID NO: 313392 - DNA, 447 bp, Homo sapiens
cagggagtcaagagatgatgactgatgactcagcctcctcagctcggcttcccagagctccactcaccacatcagtgagcctggcatgcagggggagacataaacacaaccatggtgttgatatcaatcctagcagagatgtcacaagccaaggtctgggaagaggaagaatgaatcaggataaaacttcagtggaaaaaagaccaagtgagagacttaaaagtcacgactaaagaattgtgtaagtaacagtggcaaatgacaacaaaaggcctctacagctaaaataatcagtggtacctgtttcagatccccaggcttctctgtttttgggaggtcttaggatgcagggctttgccaattgtgtggcctgggatgacagccaattgatggaagctggaattcagggctttcttctcaacagaagttaaagaaggcaaaaaaaaa

SEQ ID NO: 313393 - DNA, 2243 bp, Homo sapiens
ggcttgaactgagacgctccgctgggcgcgcagcagccgccgatcggacctcggggtcctggatgcaggactgtctgttacgtacagcccttgtgaccgtcacgggcggacaccggccaacgccgggttggggtgaggccgccgccgcggtccctccatcaccctcctggcccggcagaggaacccactgctccgggcggccggggacagaggtggctcaacagcgccgcctcgaagccagagccctccgcaggctagaggattgcggtttcccttcatctccgcggctcttattcctcccccgcgaggccgcccaccggggtacgctctcccgcgcctgcgccaattccgccccgccccgcccccatctaccgaccggatgttagcagatttcccatagtgcctcgctagtggcgggcatgataacacacgccggagggtcgcacgcgggttccagttgtgattgctggagttgtgtattgccaggaggctctccgagattggggtcgggtcactgcctcatccaccggagcgatggcgtttctccgaagcatgtggggcgtgctgagtgccctgggaaggtctggagcagagctgtgcaccggctgtggaagtcgactgcgctcccccttcagttttgtgtatttaccgaggtggttttcatctgtcttggcaagttgtccaaagaaacctgtaagttcttaccttcgattttctaaagaacaactacccatatttaaagctcagaacccagatgcaaaaactacagaactaattagaagaattgcccagcgttggagggaacttcctgattcaaagaaaaaaatatatcaagatgcttatagggcggagtggcaggtatataaagaagagataagcagatttaaagaacagctaactccaagtcagattatgtctttggaaaaagaaatcatggacaaacatttaaaaaggaaagctatgacaaaaaaaaaagaaaagctgaagactgtaaaggaaaactggaaaaatctgtctgactctgaaaaggaattatatattcagcatgctaaagaggacgaaactcgttatcataatgaaatgaagtcttgggaagaacaaatgattgaagttggacgaaaggatcttctacgtcgcacaataaagaaacaacgaaaatatggtgctgaggagtgttaaaagtagaagattgagatgtgttcacaatggataggcacaggaaaccagttaggtctcaatacctgaagctatcgtaaaattaagaaaggataaagttggtaaaccttttatatttagtatctttttattcagctcatggacttctgccagcataatacttgctttggaaaacccagataaaggttcatgcaaactttattttgtgtttaggaactactgaggatcagagtaatccaagcaaatgtgaatcattttacctttgacaaaggtaaatcagactatgaagttttttttatacaggatgatgactatggaaagagtactcttgtttccttatattatggaggcaggagtttcgttttcaaaattgttacaaattgtagaagccacggtgttctgtgatataagtgtgtgtttttcataaagcaggcagaactcatctaggtaaattacagttcctaggtataattcacattgtattcagagttgatggttgtacatataagtgattgctggttttagttgcaactttgtataaaagggactgagaaatttataaacttttttcttactgtcttttttctaaagtaaaaacaaagaaattatgtgccagatttatgcatattattttatgttgcatagaataaaatttttaatctttaattttacatttcctaaatatattttaagacgaaacatttgttctatagcttttccctttttttaagtaaggaattttatttttttctgaattattttctctcgtgagtatattgatccagaaagaaaacttgtattatgtgtgttttaaaatgagaaatctaaaaaacgaaaagtctccaaagtctctggaatttgaaacactttgcataacgtataaaagcctgtttaagagacagccaactatggcctgtggatcaaatccagcctgctgcctgctttttatggcctgtgagctaggaattgtgtttataattttaaatgtttttttttaaagacttttatgatacttgaaaattaacatgaatatttagtgttcataaataaagtttgttgaaacacaa

SEQ ID NO: 313394 - DNA, 1653 bp, Homo sapiens
aaggggaaactatgaccatataaaaaagagttaacactgcttggtaatcccaaaagacctcgttcagcttataacgtttatgtagctgaaagattccaagaagctaagggtgattcaccgcaggaaaagctgaagactgtaaaggaaaactggaatagcttgttaatttgaggtatataaagaagagataagcagatttaaagaacagctaactccaagtcagattatgtctttggaaaaagaaatcatggacaaacatttaaaaaggaaagctatgacaaaaaaaaaagagttaacactgcttggaaaaccaaaaagacctcgttcagcttataacgtttatgtagctgaaagattccaagaagctaagggtgattcaccgcaggaaaagctgaagactgtaaaggaaaactggaaaaatctgtctgactctgaaaaggaattatatattcagcatgctaaagaggacgaaactcgttatcataatgaaatgaagtcttgggaagaacaaatgattgaagttggacgaaaggatcttctacgtcgcacaataaagaaacaacgaaaatatggtgctgaggagtgttaaaagtagaagattgagatgtgttcacaatggataggcacaggaaaccagttaggtctcaatacctgaagctatcgtaaaattaagaaaggataaagttggtaaaccttttatatttagtatctttttattcagctcatggacttctgccagcataatacttgctttggaaaacccagataaaggttcatgcaaactttattttgtgtttaggaactactgaggatcagagtaatccaagcaaatgtgaatcattttacctttgacaaaggtaaatcagactatgaagttttttttatacaggatgatgactatggaaagagtactcttgtttccttatattatggaggcaggagtttcgttttcaaaattgttacaaattgtagaagccacggtgttctgtgatataagtgtgtgtttttcataaagcaggcagaactcatctaggtaaattacagttcctaggtataattcacattgtattcagagttgatggttgtacatataagtgattgctggttttagttgcaactttgtataaaagggactgagaaatttataaacttttttcttactgtcttttttctaaagtaaaaacaaagaaattatgtgccagatttatgcatattattttatgttgcatagaataaaatttttaatctttaattttacatttcctaaatatattttaagacgaaacatttgttctatagcttttccctttttttaagtaaggaattttatttttttctgaattattttctctcgtgagtatattgatccagaaagaaaacttgtattatgtgtgttttaaaatgagaaatctaaaaaacgaaaagtctccaaagtctctggaatttgaaacactttgcataacgtataaaagcctgtttaagagacagccaactatggcctgtggatcaaatccagcctgctgcctgctttttatggcctgtgagctaggaattgtgtttataattttaaatgtttttttttaaagacttttatgatacttgaaaattaacatgaatatttagtgttcataaataaagtttgttgaaacacaa

SEQ ID NO: 313395 - DNA, 1257 bp, Homo sapiens
ggcttgaactgagacgctccgctgggcgcgcagcagccgccgatcggacctcggggtcctggatgcaggactgtctgttacgtacagcccttgtgaccgtcacgggcggacaccggccaacgccgggttggggtgaggccgccgccgcggtccctccatcaccctcctggcccggcagaggaacccactgctccgggcggccggggacagaggtggctcaacagcgccgcctcgaagccagagccctccgcaggctagaggattgcggtttcccttcatctccgcggctcttattcctcccccgcgaggccgcccaccggggtacgctctcccgcgcctgcgccaattccgccccgccccgcccccatctaccgaccggatgttagcagatttcccatagtgcctcgctagtggcgggcatgataacacacgccggagggtcgcacgcgggttccagttgtgattgctggagttgtgtattgccaggaggctctccgagattggggtcgggtcactgcctcatccaccggagcgatggcgtttctccgaagcatgtggggcgtgctgagtgccctgggaaggtctggagcagagctgtgcaccggctgtggaagtcgactgcgctcccccttcagttttgtgtatttaccgaggtggttttcatctgtcttggcaagttgtccaaagaaacctgtaagttcttaccttcgattttctaaagaacaactacccatatttaaagctcagaacccagatgcaaaaactacagaactaattagaagaattgcccagcgttggagggaacttcctgattcaaagaaaaaaatatatcaagatgcttatagggcggagtggcaggtatataaagaagagataagcagatttaaagaacagctaactccaagtcagattatgtctttggaaaaagaaatcatggacaaacatttaaaaaggaaagctatgacaaaaaaaaaagagttaacactgcttggaaaaccaaaaagacctcgttcagcttataacgtttatgtagctgaaagattccaagaagctaagggtgattcaccgcaggaaaagctgaagactgtaaaggaaaactggaaaaatctgtctgactctgaaaaggaagtgagtattacggttgttagtctcaagtgtctacttaggatatctgtgagagaatgtattagggcaaggcttgattcatgtgaagacaaccttgtattactaataatacaagtattctaaaattatttt

SEQ ID NO: 313396 - DNA, 664 bp, Homo sapiens
  misc_feature (77)..(77): n is a, c, g, or t
atgtttgaaaaaaacaaaacatagatggtttgagaaagctgtgtggatggggacagactgtgctcatttggccgagntggggaggacactgctcttcctcagtgagtcctttgggtccccctcgaggggtcatcctgaggtcaggaaggggtactagggtgaccttctctgacacagtcctcacagggcagggatggactgcacccctgagccccagcttttcccagtggccgccaaggttttcttctcccacgatttctccacaccctgctgctccagtttgaacctctgggaagagcaaggtcacttctttggggggtgtgggtcagtcagtcatggcttagcactttgtctgcctccttcagtccaggggagttgcttgtcctagcgaccaagatatggggtttgtggccacattcagtcattttcagcctccacctttccccacagaaggatttccatgtctgagggtggcgttaccaagtatacagtttagtgattccagtatatttacagagctgtgcagccatcactacagccagacatcggacaccacagagctaccaggtgtccctcacctcggggaccctcaggacatctgcgtgtgttcgcacaggcagcgtctacagacatggttggcaatgagatgtattctctttaccta

SEQ ID NO: 313397 - DNA, 504 bp, Homo sapiens
ggcggcgctagcgcgagcctggccccgggcagcgctagggccgggctcctctcggcggcggcgcaccgtcgtcctgtcgtccgcggggcggggacgcggcggcggcggcggcggtggcggctgtgtgtcgccggagccgaagcgcgcaggcccgtcccggtggccggggagcgggcgggtgggggcgccatgtggttcatgtacctgctgagctggctgtcgctcttcatccaggtggccttcatcacgctggctgtcggtgagactgcacgaccccggcccgcgcgggctcccgccccggcatcggtgctcgttgggggtcgcatcgcgggggtttcggagccactcgggggaccactgcccggcgctcccggccttcgccgccccaaccccttcccgcctgatcctgcccctcctgtcgagcctggcagcccggcctgaccgtggctccttccaggtgtcacagagtccgctccggcactgcccgagaaagggtgactcgag

SEQ ID NO: 313398 - DNA, 3438 bp, Homo sapiens
ggcggcgctagcgcgagcctggccccgggcagcgctagggccgggctcctctcggcggcggcgcaccgtcgtcctgtcgtccgcggggcggggacgcggcggcggcggcggcggtggcggctgtgtgtcgccggagccgaagcgcgcaggcccgtcccggtggccggggagcgggcgggtgggggcgccatgtggttcatgtacctgctgagctggctgtcgctcttcatccaggtggccttcatcacgctggctgtcgcggctggactctattacctggcagaactgatagaagaatacacagtggccaccagcaggatcataaaatacatgatctggttctccaccgctgtactgattggcctctacgtctttgagcgcttccccaccagcatgattggagtgggcctattcaccaacctcgtctactttggcctcctccagaccttccccttcatcatgctgacctcgcctaacttcatcctgtcgtgtggactagtggtggtgaatcattacctagcatttcagttttttgcagaagaatattatcccttctcagaggtcctggcctatttcactttctgcctgtggataattccgtttgcgttttttgtgtcactttcggccggggagaacgtcctgccctctaccatgcagccaggagatgatgtcgtctccaattatttcaccaaaggcaagcggggcaaacgcttagggatcctggttgtcttctccttcatcaaagaggccattctacccagtcgtcagaagatatactgacccccatgcaggcaggatgtggggggcaagatcaggagagtcaggcccctgggcctctatgccaggtggggaccagaagtcgggaaggcacctaccacctgccctggctttcttcccctcaactctggagccccatccccaccctccttggggggctcagcttggctcagatctgatgcttcaagaggctgtaacctcagagggcaccaaggagggtggcagagcctgcttagccaggaggccgaggtccctcagtcctcccctgtcccttccaaggtgggtcaggaggttctggccccgctggggcaggcagggcagggtctgtgaagcttaagagcagatggtgacaagttctctgggcaggtggccatggggaggggccatggcttggcatgtccaacagaaatagtttttgctgttgaacggtgatttctgtccaagtgcagatttccgtttgaataaagcttcgcttctaggtggcactgtttgccttaataccctgacagttcatcttcctttcttcctgctaaccttctgctctggactggactcacttttctgctccagggactccttttctgggtttgggtcttgcccttcccaagggactgttcttgtggcccttaatgggaagggggcaggggtgaggagctgagcctgctcaaggagtgggaagtggggctataggcagcctctctgatgcactctcttccatctctttccccaaggctccgtgactgtcaaactgggagtaggagaggggacaatttaggactgggctagattttcagaagaacatctacaatatcctatttataaatcttcctctgggaaaaggagtggtttctggctgaatactatcttaggctcaaggagaaacaaaataaaaattagcttccaggcagcctgtttttaaagaaatgggactaatgggagaagctgtttgtcactctaagagcatccaagccctggcccgtctgtgcactcttggctcctggggagatatatctgccttctaagaaggcaggccaggtcttgggcacagacctgcatttgttgaccttgcactccaactatagtgccttgcaagtgctcaacagtacatattggaatgaagtccctatgagagccatttctggccatgttctatacctcaaagtgaggctggcaggtacagagatgaactgtacacatgtgatacatttaagccactggaaaaacccctgtgcttgaaaatatttcctctatatcatgcctggagttccatcatagcccttcatttccttggctttagcatttaccttctcttaagaataccagctttcccctttccctgagaggaagagcacatgttggtctcctcttagtgtgaacgagattgccaggcccttttctcctatgcacaccaggatagacaaggcaggggatactggcagcctgcatcatcctcccattgggctgacagctggccctactttcctccctctgctgcttggtccctcaccttgatgatgtggcttcgccccctccactctactgccagtgttctcccaggggttgctaaatccagcagacccctttcctgtcttactagatctgggcagcatttgacatggctgatcaccccttgcttcttggatggcacttccctggcacctctgtggctagttgtcctacctccctggctgttcctttcaggcttccgtgcaggcttctccacttgcccatgcacagtagggtctttcagggttctgctgtgggctccctagggaagcccatccatctggatggtttcaaggatggtgaggaatttagagttgacctccagccccaacatccttcctgatcacctgaaccacagttttgctgccctctaggtgcacagacaattcaggtccatggcccagatggtacttgctgtcttctgcaaacctgccccttctgggtacttcccttgaccccgagatcactcaggagccagacaggaaacttattctattcctgttttctctttctgcccaccacatccaatctctcaaaacggtcaggtctaccttaacatctcttgatttgagccactcccactgtcatcagctttcacctggattatcgtgacagcctcctactgcttctctatcatgtggccagagctatcttcctaaaatgcattgcatagttgatcaagtcactctctggcctaaaaccttccttggctccctgctgccctcaggataaagtctggacccctcagcatggcttgtgagactcatggtgtccttgtccctgctcacctctctggtctcatcacttgccttcttgcattctgggtcccagcctcctgtatccagagatgcagtggctctccattgccactctgattcctcctttcttttggtcacagagaaagggtactttctctgtcaaatctcaacttagacttgacttcctccaaggagctttggctatactctctcctcccgacccccaccctggcatactacacagatcactctgggctcacttgcctgcctaatggtcatctccccagtagactgtaagctccttgagggcaaggattgtgttggaatttttgtattaacagtgcctggcttggtgcctggcacctagaaagcactcaataaatgtttgtttaatgaa

SEQ ID NO: 313399 - DNA, 3492 bp, Homo sapiens
  misc_feature (77)..(77): n is a, c, g, or t
atgtttgaaaaaaacaaaacatagatggtttgagaaagctgtgtggatggggacagactgtgctcatttggccgagntggggaggacactgctcttcctcagtgagtcctttgggtccccctcgaggggtcatcctgaggtcaggaaggggtactagggtgaccttctctgacacagtcctcacagggcagggatggactgcacccctgagccccagcttttcccagtggccgccaaggttttcttctcccacgatttctccacaccctgctgctccagtttgaacctctgggaagagcaaggtcacttctttggggggtgtgggtcagtcagtcatggcttagcactttgtctgcctccttcagtccaggggagttgcttgtcctagcgaccaagatatggggtttgtggccacattcagtcattttcagcctccacctttccccacagaaggatttccatgtctgagggtggcgttccctgcttcccaggcctgggccccctttggagatcaggtgtggccccctgtgcactcttgaccaacacgcagtcaccacacccagcccactcttggcacctccggggcaccctcttctcagtctctcttgttgccaggtcctggcctatttcactttctgcctgtggataattccgtttgcgttttttgtgtcactttcggccggggagaacgtcctgccctctaccatgcagccaggagatgatgtcgtctccaattatttcaccaaaggcaagcggggcaaacgcttagggatcctggttgtcttctccttcatcaaagaggccattctacccagtcgtcagaagatatactgacccccatgcaggcaggatgtggggggcaagatcaggagagtcaggcccctgggcctctatgccaggtggggaccagaagtcgggaaggcacctaccacctgccctggctttcttcccctcaactctggagccccatccccaccctccttggggggctcagcttggctcagatctgatgcttcaagaggctgtaacctcagagggcaccaaggagggtggcagagcctgcttagccaggaggccgaggtccctcagtcctcccctgtcccttccaaggtgggtcaggaggttctggccccgctggggcaggcagggcagggtctgtgaagcttaagagcagatggtgacaagttctctgggcaggtggccatggggaggggccatggcttggcatgtccaacagaaatagtttttgctgttgaacggtgatttctgtccaagtgcagatttccgtttgaataaagcttcgcttctaggtggcactgtttgccttaataccctgacagttcatcttcctttcttcctgctaaccttctgctctggactggactcacttttctgctccagggactccttttctgggtttgggtcttgcccttcccaagggactgttcttgtggcccttaatgggaagggggcaggggtgaggagctgagcctgctcaaggagtgggaagtggggctataggcagcctctctgatgcactctcttccatctctttccccaaggctccgtgactgtcaaactgggagtaggagaggggacaatttaggactgggctagattttcagaagaacatctacaatatcctatttataaatcttcctctgggaaaaggagtggtttctggctgaatactatcttaggctcaaggagaaacaaaataaaaattagcttccaggcagcctgtttttaaagaaatgggactaatgggagaagctgtttgtcactctaagagcatccaagccctggcccgtctgtgcactcttggctcctggggagatatatctgccttctaagaaggcaggccaggtcttgggcacagacctgcatttgttgaccttgcactccaactatagtgccttgcaagtgctcaacagtacatattggaatgaagtccctatgagagccatttctggccatgttctatacctcaaagtgaggctggcaggtacagagatgaactgtacacatgtgatacatttaagccactggaaaaacccctgtgcttgaaaatatttcctctatatcatgcctggagttccatcatagcccttcatttccttggctttagcatttaccttctcttaagaataccagctttcccctttccctgagaggaagagcacatgttggtctcctcttagtgtgaacgagattgccaggcccttttctcctatgcacaccaggatagacaaggcaggggatactggcagcctgcatcatcctcccattgggctgacagctggccctactttcctccctctgctgcttggtccctcaccttgatgatgtggcttcgccccctccactctactgccagtgttctcccaggggttgctaaatccagcagacccctttcctgtcttactagatctgggcagcatttgacatggctgatcaccccttgcttcttggatggcacttccctggcacctctgtggctagttgtcctacctccctggctgttcctttcaggcttccgtgcaggcttctccacttgcccatgcacagtagggtctttcagggttctgctgtgggctccctagggaagcccatccatctggatggtttcaaggatggtgaggaatttagagttgacctccagccccaacatccttcctgatcacctgaaccacagttttgctgccctctaggtgcacagacaattcaggtccatggcccagatggtacttgctgtcttctgcaaacctgccccttctgggtacttcccttgaccccgagatcactcaggagccagacaggaaacttattctattcctgttttctctttctgcccaccacatccaatctctcaaaacggtcaggtctaccttaacatctcttgatttgagccactcccactgtcatcagctttcacctggattatcgtgacagcctcctactgcttctctatcatgtggccagagctatcttcctaaaatgcattgcatagttgatcaagtcactctctggcctaaaaccttccttggctccctgctgccctcaggataaagtctggacccctcagcatggcttgtgagactcatggtgtccttgtccctgctcacctctctggtctcatcacttgccttcttgcattctgggtcccagcctcctgtatccagagatgcagtggctctccattgccactctgattcctcctttcttttggtcacagagaaagggtactttctctgtcaaatctcaacttagacttgacttcctccaaggagctttggctatactctctcctcccgacccccaccctggcatactacacagatcactctgggctcacttgcctgcctaatggtcatctccccagtagactgtaagctccttgagggcaaggattgtgttggaatttttgtattaacagtgcctggcttggtgcctggcacctagaaagcactcaataaatgtttgtttaatgaa

SEQ ID NO: 313400 - DNA, 3284 bp, Homo sapiens
ggcggcgctagcgcgagcctggccccgggcagcgctagggccgggctcctctcggcggcggcgcaccgtcgtcctgtcgtccgcggggcggggacgcggcggcggcggcggcggtggcggctgtgtgtcgccggagccgaagcgcgcaggcccgtcccggtggccggggagcgggcgggtgggggcgccatgtggttcatgtacctgctgagctggctgtcgctcttcatccaggtggccttcatcacgctggctgtcgcggctggactctattacctggcagaactgatagaagaatacacagtggccaccagcaggatcataaaatacatgatctgggactagtggtggtgaatcattacctagcatttcagttttttgcagaagaatattatcccttctcagaggtcctggcctatttcactttctgcctgtggataattccgtttgcgttttttgtgtcactttcggccggggagaacgtcctgccctctaccatgcagccaggagatgatgtcgtctccaattatttcaccaaaggcaagcggggcaaacgcttagggatcctggttgtcttctccttcatcaaagaggccattctacccagtcgtcagaagatatactgacccccatgcaggcaggatgtggggggcaagatcaggagagtcaggcccctgggcctctatgccaggtggggaccagaagtcgggaaggcacctaccacctgccctggctttcttcccctcaactctggagccccatccccaccctccttggggggctcagcttggctcagatctgatgcttcaagaggctgtaacctcagagggcaccaaggagggtggcagagcctgcttagccaggaggccgaggtccctcagtcctcccctgtcccttccaaggtgggtcaggaggttctggccccgctggggcaggcagggcagggtctgtgaagcttaagagcagatggtgacaagttctctgggcaggtggccatggggaggggccatggcttggcatgtccaacagaaatagtttttgctgttgaacggtgatttctgtccaagtgcagatttccgtttgaataaagcttcgcttctaggtggcactgtttgccttaataccctgacagttcatcttcctttcttcctgctaaccttctgctctggactggactcacttttctgctccagggactccttttctgggtttgggtcttgcccttcccaagggactgttcttgtggcccttaatgggaagggggcaggggtgaggagctgagcctgctcaaggagtgggaagtggggctataggcagcctctctgatgcactctcttccatctctttccccaaggctccgtgactgtcaaactgggagtaggagaggggacaatttaggactgggctagattttcagaagaacatctacaatatcctatttataaatcttcctctgggaaaaggagtggtttctggctgaatactatcttaggctcaaggagaaacaaaataaaaattagcttccaggcagcctgtttttaaagaaatgggactaatgggagaagctgtttgtcactctaagagcatccaagccctggcccgtctgtgcactcttggctcctggggagatatatctgccttctaagaaggcaggccaggtcttgggcacagacctgcatttgttgaccttgcactccaactatagtgccttgcaagtgctcaacagtacatattggaatgaagtccctatgagagccatttctggccatgttctatacctcaaagtgaggctggcaggtacagagatgaactgtacacatgtgatacatttaagccactggaaaaacccctgtgcttgaaaatatttcctctatatcatgcctggagttccatcatagcccttcatttccttggctttagcatttaccttctcttaagaataccagctttcccctttccctgagaggaagagcacatgttggtctcctcttagtgtgaacgagattgccaggcccttttctcctatgcacaccaggatagacaaggcaggggatactggcagcctgcatcatcctcccattgggctgacagctggccctactttcctccctctgctgcttggtccctcaccttgatgatgtggcttcgccccctccactctactgccagtgttctcccaggggttgctaaatccagcagacccctttcctgtcttactagatctgggcagcatttgacatggctgatcaccccttgcttcttggatggcacttccctggcacctctgtggctagttgtcctacctccctggctgttcctttcaggcttccgtgcaggcttctccacttgcccatgcacagtagggtctttcagggttctgctgtgggctccctagggaagcccatccatctggatggtttcaaggatggtgaggaatttagagttgacctccagccccaacatccttcctgatcacctgaaccacagttttgctgccctctaggtgcacagacaattcaggtccatggcccagatggtacttgctgtcttctgcaaacctgccccttctgggtacttcccttgaccccgagatcactcaggagccagacaggaaacttattctattcctgttttctctttctgcccaccacatccaatctctcaaaacggtcaggtctaccttaacatctcttgatttgagccactcccactgtcatcagctttcacctggattatcgtgacagcctcctactgcttctctatcatgtggccagagctatcttcctaaaatgcattgcatagttgatcaagtcactctctggcctaaaaccttccttggctccctgctgccctcaggataaagtctggacccctcagcatggcttgtgagactcatggtgtccttgtccctgctcacctctctggtctcatcacttgccttcttgcattctgggtcccagcctcctgtatccagagatgcagtggctctccattgccactctgattcctcctttcttttggtcacagagaaagggtactttctctgtcaaatctcaacttagacttgacttcctccaaggagctttggctatactctctcctcccgacccccaccctggcatactacacagatcactctgggctcacttgcctgcctaatggtcatctccccagtagactgtaagctccttgagggcaaggattgtgttggaatttttgtattaacagtgcctggcttggtgcctggcacctagaaagcactcaataaatgtttgtttaatgaa

SEQ ID NO: 313401 - DNA, 3614 bp, Homo sapiens
ggcggcgctagcgcgagcctggccccgggcagcgctagggccgggctcctctcggcggcggcgcaccgtcgtcctgtcgtccgcggggcggggacgcggcggcggcggcggcggtggcggctgtgtgtcgccggagccgaagcgcgcaggcccgtcccggtggccggggagcgggcgggtgggggcgccatgtggttcatgtacctgctgagctggctgtcgctcttcatccaggtggccttcatcacgctggctgtcgcggctggactctattacctggcagaactgatagaagaatacacagtggccaccagcaggatcataaaatacatgatctggttctccaccgctgtactgattggcctctacgtctttgagcgcttccccaccagcatgattggagtgggcctattcaccaacctcgtctactttggcctcctccagaccttccccttcatcatgctgacctcgcctaacttcatcctgtcgtgtggactagtggtggtgaatcattacctagcatttcagttttttgcagaagaatattatcccttctcagaggtcctggcctatttcactttctgcctgtggataattccgtttgcgttttttgtgtcactttcggccggggagaacgtcctgccctctaccatgcagccaggagatgatgtcgtctccaattatttcaccaaaggcaagcggggcaaacgcttagggatcctggttgtcttctccttcatcaaagaggccattctacccagtcgtcagaagatatactgacccccatgcaggcaggatgtggggggcaagatcaggagagtcaggcccctgggcctctatgccaggtggggaccagaagtcgggaaggcacctaccacctgccctggctttcttcccctcaactctggagccccatccccaccctccttggggggctcagcttggctcagatctgatgcttcaagaggctgtaacctcagagggcaccaaggagggtggcagagcctgcttagccaggaggccgaggtccctcagtcctcccctgtcccttccaaggtgggtcaggaggttctggccccgctggggcaggcagggcagggtctgtgaagcttaagagcagatggtgacaagttctctgggcaggtggccatggggaggggccatggcttggcatgtccaacagaaatagtttttgctgttgaacggtgatttctgtccaagtgcagatttccgtttgaataaagcttcgcttctaggtggcactgtttgccttaataccctgacagttcatcttcctttcttcctgctaaccttctgctctggactggactcacttttctgctccagggactccttttctgggtttgggtcttgcccttcccaagggactgttcttgtggcccttaatgggaagggggcaggggtgaggagctgagcctgctcaaggagtgggaagtggggctataggcagcctctctgatgcactctcttccatctctttccccaaggctccgtgactgtcaaactgggagtaggagaggggacaatttaggactgggctagattttcagaagaacatctacaatatcctatttataaatcttcctctgggaaaaggagtggtttctggctgaatactatcttaggctcaaggagaaacaaaataaaaattagcttccaggcagcctgtttttaaagaaatgggactaatgggagaagctgtttgtcactctaagagcatccaagccctggcccgtctgtgcactcttggctcctggggagatatatctgccttctaagaaggcaggccaggtcttgggcacagacctgcatttgttgaccttgcactccaactatagtgccttgcaagtgctcaacagtacatattggaatgaagtccctatgagagccatttctggccatgttctatacctcaaagtgaggctggcaggtacagagatgaactgtacacatgtgatacatttaagccactggaaaaacccctgtgcttgaaaatatttcctctatatcatgcctggagttccatcatagcccttcatttccttggctttagcatttaccttctcttaagaataccagctttcccctttccctgagaggaagagcacatgttggtctcctcttagtgtgaacgagattgccaggcccttttctcctatgcacaccaggatagacaaggcaggggatactggcagcctgcatcatcctcccattgggctgacagctggccctactttcctccctctgctgcttggtccctcaccttgatgatgtggcttcgccccctccactctactgccagtgttctcccaggggttgctaaatccagcagacccctttcctgtcttactagatctgggcagcatttgacatggctgatcaccccttgcttcttggatggcacttccctggcacctctgtggctagttgtcctacctccctggctgttcctttcaggcttccgtgcaggcttctccacttgcccatgcacagtagggtctttcagggttctgctgtgggctccctagggaagcccatccatctggatggtttcaaggatggtgaggaatttagagttgacctccagccccaacatccttcctgatcacctgaaccacagttttgctgccctctaggtgcacagacaattcaggtccatggcccagatggtacttgctgtcttctgcaaacctgccccttctgggtacttcccttgaccccgagatcactcaggagccagacaggaaacttattctattcctgttttctctttctgcccaccacatccaatctctcaaaacggtcaggtctaccttaacatctcttgatttgagccactcccactgtcatcagctttcacctggattatcgtgacagcctcctactgcttctctatcatgtggccagagctatcttcctaaaatgcattgcatagttgatcaagtcactctctggcctaaaaccttccttggctccctgctgccctcaggataaagtctggacccctcagcatggcttgtgagactcatggtgtccttgtccctgctcacctctctggtctcatcacttgccttcttgcattctgggtcccagcctcctgtatccagagatgcagtggctctccattgccactctgattcctcctttcttttggtcacagagaaagggtactttctctgtcaaatctcaacttagacttgacttcctccaaggagctttggctatactctctcctcccgacccccaccctggcatactacacagatcactctgggctcacttgcctgcctaatggtcatctccccagtagactgtaagctccttgagggcaaggattgtgttggaatttttgtattaacagtgcctggcttggtgcctggcacctagaaagcactcaataaatgtttgtttaatgaaaaaaaaaaaggggggggtctaaagttccttgagggcaagttagcgttccagtttgtcaaagggccctaggggcgataaaaagagggggggggtaaagcggtggaaggtcggttggagggccttggggcttggccacagaaggcggaaaatgttgaagttgggaggtgtgtaaaggg

SEQ ID NO: 313402 - DNA, 3580 bp, Homo sapiens
ggcggcgctagcgcgagcctggccccgggcagcgctagggccgggctcctctcggcggcggcgcaccgtcgtcctgtcgtccgcggggcggggacgcggcggcggcggcggcggtggcggctgtgtgtcgccggagccgaagcgcgcaggcccgtcccggtggccggggagcgggcgggtgggggcgccatgtggttcatgtacctgctgagctggctgtcgctcttcatccaggtggccttcatcacgctggctgtcgcggctggactctattacctggcagaactgatagaagaatacacagtggccaccagcaggatcataaaatacatgatctggttctccaccgctgtactgattggcctctacgtctttgagcgcttccccaccagcatgattggagtgggcctattcaccaacctcgtctactttggcctcctccagaccttccccttcatcatgctgacctcgcctaacttcatcctgtcgtgtggactagtggtggtgaatcattacctagcatttcagttttttgcagaagaatattatcccttctcagaggtcctggcctatttcactttctgcctgtggataattccgtttgcgttttttgtgtcactttcggccggggagaacgtcctgccctctaccatgcagccaggagatgatgtcgtctccaattatttcaccaaaggcaagcggggcaaacgcttagggatcctggttgtcttctccttcatcaaagaggccattctacccagtcgtcagaagatatactgacccccatgcaggcaggatgtggggggcaagatcaggagagtcaggcccctgggcctctatgccaggtggggaccagaagtcgggaaggcacctaccacctgccctggctttcttcccctcaactctggagccccatccccaccctccttggggggctcagcttggctcagatctgatgcttcaagaggctgtaacctcagagggcaccaaggagggtggcagagcctgcttagccaggaggccgaggtccctcagtcctcccctgtcccttccaaggtgggtcaggaggttctggccccgctggggcaggcagggcagggtctgtgaagcttaagagcagatggtgacaagttctctgggcaggtggccatggggaggggccatggcttggcatgtccaacagaaatagtttttgctgttgaacggtgatttctgtccaagtgcagatttccgtttgaataaagcttcgcttctaggtggcactgtttgccttaataccctgacagttcatcttcctttcttcctgctaaccttctgctctggactggactcacttttctgctccagggactccttttctgggtttgggtcttgcccttcccaagggactgttcttgtggcccttaatgggaagggggcaggggtgaggagctgagcctgctcaaggagtgggaagtggggctataggcagcctctctgatgcactctcttccatctctttccccaaggctccgtgactgtcaaactgggagtaggagaggggacaatttaggactgggctagattttcagaagaacatctacaatatcctatttataaatcttcctctgggaaaaggagtggtttctggctgaatactatcttaggctcaaggagaaacaaaataaaaattagcttccaggcagcctgtttttaaagaaatgggactaatgggagaagctgtttgtcactctaagagcatccaagccctggcccgtctgtgcactcttggctcctggggagatatatctgccttctaagaaggcaggccaggtcttgggcacagacctgcatttgttgaccttgcactccaactatagtgccttgcaagtgctcaacagtacatattggaatgaagtccctatgagagccatttctggccatgttctatacctcaaagtgaggctggcaggtacagagatgaactgtacacatgtgatacatttaagccactggaaaaacccctgtgcttgaaaatatttcctctatatcatgcctggagttccatcatagcccttcatttccttggctttagcatttaccttctcttaagaataccagctttcccctttccctgagaggaagagcacatgttggtctcctcttagtgtgaacgagattgccaggcccttttctcctatgcacaccaggatagacaaggcaggggatactggcagcctgcatcatcctcccattgggctgacagctggccctactttcctccctctgctgcttggtccctcaccttgatgatgtggcttcgccccctccactctactgccagtgttctcccaggggttgctaaatccagcagacccctttcctgtcttactagatctgggcagcatttgacatggctgatcaccccttgcttcttggatggcacttccctggcacctctgtggctagttgtcctacctccctggctgttcctttcaggcttccgtgcaggcttctccacttgcccatgcacagtagggtctttcagggttctgctgtgggctccctagggaagcccatccatctggatggtttcaaggatggtgaggaatttagagttgacctccagccccaacatccttcctgatcacctgaaccacagttttgctgccctctaggtgcacagacaattcaggtccatggcccagatggtacttgctgtcttctgcaaacctgccccttctgggtacttcccttgaccccgagatcactcaggagccagacaggaaacttattctattcctgttttctctttctgcccaccacatccaatctctcaaaacggtcaggtctaccttaacatctcttgatttgagccactcccactgtcatcagctttcacctggattatcgtgacagcctcctactgcttctctatcatgtggccagagctatcttcctaaaatgcattgcatagttgatcaagtcactctctggcctaaaaccttccttggctccctgctgccctcaggataaagtctggacccctcagcatggcttgtgagactcatggtgtccttgtccctgctcacctctctggtctcatcacttgccttcttgcattctgggtcccagcctcctgtatccagagatgcagtggctctccattgccactctgattcctcctttcttttggtcacagagaaagggtactttctctgtcaaatctcaacttagacttgacttcctccaaggagctttggctatactctctcctcccgacccccaccctggcatactacacagatcactctgggctcacttgcctgcctaatggtcatctccccagtagactgtaagctccttgagggcaaggattgtgttggaatttttgtattaacagtgcctggcttggtgcctggcacctagaaagcactcaataaatgtttgtttaatgaaaaaaaaaaaaaaaaaaaaaaaaactcgaggggggccccggtcccaaattgcccttatagggggccttataacaatccatgtggccgcgtttaaaacttcgagactgggaaacccgtggtgtccccaattaaatcgcttggag

SEQ ID NO: 313403 - DNA, 3574 bp, Homo sapiens
  misc_feature (3558)..(3558): n is a, c, g, or t
  misc_feature (3566)..(3566): n is a, c, g, or t
ggcggcgctagcgcgagcctggccccgggcagcgctagggccgggctcctctcggcggcggcgcaccgtcgtcctgtcgtccgcggggcggggacgcggcggcggcggcggcggtggcggctgtgtgtcgccggagccgaagcgcgcaggcccgtcccggtggccggggagcgggcgggtgggggcgccatgtggttcatgtacctgctgagctggctgtcgctcttcatccaggtggccttcatcacgctggctgtcgcggctggactctattacctggcagaactgatagaagaatacacagtggccaccagcaggatcataaaatacatgatctggttctccaccgctgtactgattggcctctacgtctttgagcgcttccccaccagcatgattggagtgggcctattcaccaacctcgtctactttggcctcctccagaccttccccttcatcatgctgacctcgcctaacttcatcctgtcgtgtggactagtggtggtgaatcattacctagcatttcagttttttgcagaagaatattatcccttctcagaggtcctggcctatttcactttctgcctgtggataattccgtttgcgttttttgtgtcactttcggccggggagaacgtcctgccctctaccatgcagccaggagatgatgtcgtctccaattatttcaccaaaggcaagcggggcaaacgcttagggatcctggttgtcttctccttcatcaaagaggccattctacccagtcgtcagaagatatactgacccccatgcaggcaggatgtggggggcaagatcaggagagtcaggcccctgggcctctatgccaggtggggaccagaagtcgggaaggcacctaccacctgccctggctttcttcccctcaactctggagccccatccccaccctccttggggggctcagcttggctcagatctgatgcttcaagaggctgtaacctcagagggcaccaaggagggtggcagagcctgcttagccaggaggccgaggtccctcagtcctcccctgtcccttccaaggtgggtcaggaggttctggccccgctggggcaggcagggcagggtctgtgaagcttaagagcagatggtgacaagttctctgggcaggtggccatggggaggggccatggcttggcatgtccaacagaaatagtttttgctgttgaacggtgatttctgtccaagtgcagatttccgtttgaataaagcttcgcttctaggtggcactgtttgccttaataccctgacagttcatcttcctttcttcctgctaaccttctgctctggactggactcacttttctgctccagggactccttttctgggtttgggtcttgcccttcccaagggactgttcttgtggcccttaatgggaagggggcaggggtgaggagctgagcctgctcaaggagtgggaagtggggctataggcagcctctctgatgcactctcttccatctctttccccaaggctccgtgactgtcaaactgggagtaggagaggggacaatttaggactgggctagattttcagaagaacatctacaatatcctatttataaatcttcctctgggaaaaggagtggtttctggctgaatactatcttaggctcaaggagaaacaaaataaaaattagcttccaggcagcctgtttttaaagaaatgggactaatgggagaagctgtttgtcactctaagagcatccaagccctggcccgtctgtgcactcttggctcctggggagatatatctgccttctaagaaggcaggccaggtcttgggcacagacctgcatttgttgaccttgcactccaactatagtgccttgcaagtgctcaacagtacatattggaatgaagtccctatgagagccatttctggccatgttctatacctcaaagtgaggctggcaggtacagagatgaactgtacacatgtgatacatttaagccactggaaaaacccctgtgcttgaaaatatttcctctatatcatgcctggagttccatcatagcccttcatttccttggctttagcatttaccttctcttaagaataccagctttcccctttccctgagaggaagagcacatgttggtctcctcttagtgtgaacgagattgccaggcccttttctcctatgcacaccaggatagacaaggcaggggatactggcagcctgcatcatcctcccattgggctgacagctggccctactttcctccctctgctgcttggtccctcaccttgatgatgtggcttcgccccctccactctactgccagtgttctcccaggggttgctaaatccagcagacccctttcctgtcttactagatctgggcagcatttgacatggctgatcaccccttgcttcttggatggcacttccctggcacctctgtggctagttgtcctacctccctggctgttcctttcaggcttccgtgcaggcttctccacttgcccatgcacagtagggtctttcagggttctgctgtgggctccctagggaagcccatccatctggatggtttcaaggatggtgaggaatttagagttgacctccagccccaacatccttcctgatcacctgaaccacagttttgctgccctctaggtgcacagacaattcaggtccatggcccagatggtacttgctgtcttctgcaaacctgccccttctgggtacttcccttgaccccgagatcactcaggagccagacaggaaacttattctattcctgttttctctttctgcccaccacatccaatctctcaaaacggtcaggtctaccttaacatctcttgatttgagccactcccactgtcatcagctttcacctggattatcgtgacagcctcctactgcttctctatcatgtggccagagctatcttcctaaaatgcattgcatagttgatcaagtcactctctggcctaaaaccttccttggctccctgctgccctcaggataaagtctggacccctcagcatggcttgtgagactcatggtgtccttgtccctgctcacctctctggtctcatcacttgccttcttgcattctgggtcccagcctcctgtatccagagatgcagtggctctccattgccactctgattcctcctttcttttggtcacagagaaagggtactttctctgtcaaatctcaacttagacttgacttcctccaaggagctttggctatactctctcctcccgacccccaccctggcatactacacagatcactctgggctcacttgcctgcctaatggtcatctccccagtagactgtaagctccttgagggcaaggattgtgttggaatttttgtattaacagtgcctggcttggtgcctggcacctagaaagcactcaataaatgtttgtttaatgaaaaaaaaaaaaaaacaaaaaaaaaccaaaaaaaaaaaaaaaaaaaaaaaaaaaaaaaaaaacaaaaaaaaaaaaaaaaacaaaaaaaaaaaaaaaaaaaaaaaaaaaaaaaaaaaaaaaangggggggngcgaacaa

SEQ ID NO: 313404 - DNA, 2090 bp, Homo sapiens
agatatgtatacgagatgaactgtacacatgtgatacatttaagccactggaaaaaccctgtgcttgaaatatttcctctatatcatgcctggagttccatcacagcccatcatttccttggctttagcatttaccttctcttccatctctttccccaaggctccgtgactgtcaaactgggagtaggagaggggacaatttaggactgggctagattttcagaagaacatctacaatatcctatttataaatcttcctctgggaaaaggagtggtttctggctgaatactatcttaggctcaaggagaaacaaaataaaaattagcttccaggcagcctgtttttaaagaaatgggactaatgggagaagctgtttgtcactctaagagcatccaagccctggcccgtctgtgcactcttggctcctggggagatatatctgccttctaagaaggcaggccaggtcttgggcacagacctgcatttgttgaccttgcactccaactatagtgccttgcaagtgctcaacagtacatattggaatgaagtccctatgagagccatttctggccatgttctatacctcaaagtgaggctggcaggtacagagatgaactgtacacatgtgatacatttaagccactggaaaaacccctgtgcttgaaaatatttcctctatatcatgcctggagttccatcatagcccttcatttccttggctttagcatttaccttctcttaagaataccagctttcccctttccctgagaggaagagcacatgttggtctcctcttagtgtgaacgagattgccaggcccttttctcctatgcacaccaggatagacaaggcaggggatactggcagcctgcatcatcctcccattgggctgacagctggccctactttcctccctctgctgcttggtccctcaccttgatgatgtggcttcgccccctccactctactgccagtgttctcccaggggttgctaaatccagcagacccctttcctgtcttactagatctgggcagcatttgacatggctgatcaccccttgcttcttggatggcacttccctggcacctctgtggctagttgtcctacctccctggctgttcctttcaggcttccgtgcaggcttctccacttgcccatgcacagtagggtctttcagggttctgctgtgggctccctagggaagcccatccatctggatggtttcaaggatggtgaggaatttagagttgacctccagccccaacatccttcctgatcacctgaaccacagttttgctgccctctaggtgcacagacaattcaggtccatggcccagatggtacttgctgtcttctgcaaacctgccccttctgggtacttcccttgaccccgagatcactcaggagccagacaggaaacttattctattcctgttttctctttctgcccaccacatccaatctctcaaaacggtcaggtctaccttaacatctcttgatttgagccactcccactgtcatcagctttcacctggattatcgtgacagcctcctactgcttctctatcatgtggccagagctatcttcctaaaatgcattgcatagttgatcaagtcactctctggcctaaaaccttccttggctccctgctgccctcaggataaagtctggacccctcagcatggcttgtgagactcatggtgtccttgtccctgctcacctctctggtctcatcacttgccttcttgcattctgggtcccagcctcctgtatccagagatgcagtggctctccattgccactctgattcctcctttcttttggtcacagagaaagggtactttctctgtcaaatctcaacttagacttgacttcctccaaggagctttggctatactctctcctcccgacccccaccctggcatactacacagatcactctgggctcacttgcctgcctaatggtcatctccccagtagactgtaagctccttgagggcaaggattgtgttggaatttttgtattaacagtgcctggcttggtgcctggcacctagaaagcactcaataaatgtttgtttaatgaa

SEQ ID NO: 313405 - DNA, 3312 bp, Homo sapiens
ggcggcgctagcgcgagcctggccccgggcagcgctagggccgggctcctctcggcggcggcgcaccgtcgtcctgtcgtccgcggggcggggacgcggcggcggcggcggcggtggcggctgtgtgtcgccggagccgaagcgcgcaggcccgtcccggtggccggggagcgggcgggtgggggcgccatgtggttcatgtacctgctgagctggctgtcgctcttcatccaggtggccttcatcacgctggctgtcgcggctggactctattacctggcagaactgatagaagaatacacagtggccaccagcaggatcataaaatacatgatctggttctccaccgctgtactgattggcctctacgtctttgagcgcttccccaccagcatgattggagtgggcctattcaccaacctcgtctactttggcctcctccagaccttccccttcatcatgctgacctcgcctaacttcatcctgtcgtgtggactagtggtggtgaatcattacctagcatttcagttttttgcagaagaatattatcccttctcagaggtcctggcctatttcactttctgcctgtggataattccgtttgcgttttttgtgtcactttcggccggggagaacgtcctgccctctaccatgcagccaggagatgatgtcgtctccaattatttcaccaaaggcaagcggggcaaacgcttagggatcctggttgtcttctccttcatcaaagaggccattctacccagtcgtcagaagatatactgacccccatgcaggcaggatgtggggggcaagatcaggagagtcaggcccctgggcctctatgccaggtggggaccagaagtcgggaaggcacctaccacctgccctggctttcttcccctcaactctggagccccatccccaccctccttggggggctcagcttggctcagatctgatgcttcaagaggctgtaacctcagagggcaccaaggagggtggcagagcctgcttagccaggaggccgaggtccctcagtcctcccctgtcccttccaaggtgggtcaggaggttctggccccgctggggcaggcagggcagggtctgtgaagcttaagagcagatggtgacaagttctctgggcaggtggccatggggaggggccatggcttggcatgtccaacagaaatagtttttgctgttgaacggtgatttctgtccaagtgcagatttccgtttgaataaagcttcgcttctaggtggcactgtttgccttaataccctgacagttcatcttcctttcttcctgctaaccttctgctctggactggactcacttttctgctccagggactccttttctgggtttgggtcttgcccttcccaagggactgttcttgtggcccttaatgggaagggggcaggggtgaggagctgagcctgctcaaggagtgggaagtggggctataggcagcctctctgatgcactctcttccatctctttccccaaggctccgtgactgtcaaactgggagtaggagaggggacaatttaggactgggctagattttcagaagaacatctacaatatcctatttataaatcttcctctgggaaaaggagtggtttctggctgaatactatcttaggctcaaggagaaacaaaataaaaattagcttccaggcagcctgtttttaaagaaatgggactaatgggagaagctgtttgtcactctaagagcatccaagccctggcccgtctgtgcactcttggctcctggggagatatatctgccttctaagaaggcaggccaggtcttgggcacagacctgcatttgttgaccttgcactccaactatagtgccttgcaagtgctcaacagtacatattggaatgaagtccctatgagagccatttctggccatgttctatacctcaaagtgaggctggcaggtacagagatgaactgtacacatgtgatacatttaagccactggaaaaacccctgtgcttgaaaatatttcctctatatcatgcctggagttccatcatagcccttcatttccttggctttagcatttaccttctcttaagaataccagctttcccctttccctgagaggaagagcacatgttggtctcctcttagtgtgaacgagattgccaggcccttttctcctatgcacaccaggatagacaaggcaggggatactggcagcctgcatcatcctcccattgggctgacagctggccctactttcctccctctgctgcttggtccctcaccttgatgatgtggcttcgccccctccactctactgccagtgttctcccaggggttgctaaatccagcagacccctttcctgtcttactagatctgggcagcatttgacatggctgatcaccccttgcttcttggatggcacttccctggcacctctgtggctagttgtcctacctccctggctgttcctttcaggcttccgtgcaggcttctccacttgcccatgcacagtagggtctttcagggttctgctgtgggctccctagggaagcccatccatctggatggtttcaaggatggtgaggaatttagagttgacctccagccccaacatccttcctgatcacctgaaccacagttttgctgccctctaggtgcacagacaattcaggtccatggcccagatggtacttgctgtcttctgcaaacctgccccttctgggtacttcccttgaccccgagatcactcaggagccagacaggaaacttattctattcctgttttctctttctgcccaccacatccaatctctcaaaacggtcaggtctaccttaacatctcttgatttgagccactcccactgtcatcagctttcacctggattatcgtgacagcctcctactgcttctctatcatgtggccagagctatcttcctaaaatgcattgcatagttgatcaagtcactctctggcctaaaaccttccttggctccctgctgccctcaggataaagtctggacccctcagcatggcttgtgagactcatggtgtccttgtccctgctcacctctctggtctcatcacttgccttcttgcattctgggtcccagcctcctgtatccagagatgcagtggctctccattgccactctgattcctcctttcttttggtcacagagaaagggtactttctctgtcaaatctcaacttagacttgaggcaaggattgtgttggaatttttgtattaacagtgcctggcttggtgcctggcacctagaaagcactcaataaatgtttgtttaatgaa

SEQ ID NO: 313406 - DNA, 3514 bp, Homo sapiens
ggcggcgctagcgcgagcctggccccgggcagcgctagggccgggctcctctcggcggcggcgcaccgtcgtcctgtcgtccgcggggcggggacgcggcggcggcggcggcggtggcggctgtgtgtcgccggagccgaagcgcgcaggcccgtcccggtggccggggagcgggcgggtgggggcgccatgtggttcatgtacctgctgagctggctgtcgctcttcatccaggtggccttcatcacgctggctgtcgcggctggactctattacctggcagaactgatagaagaatacacagtggccaccagcaggatcataaaatacatgatctggttctccaccgctgtactgattggcctctacgtctttgagcgcttccccaccagcatgattggagtgggcctattcaccaacctcgtctactttggcctcctccagaccttccccttcatcatgctgacctcgcctaacttcatcctgtcgtgtggactagtggtggtgaatcattacctagcatttcagttttttgcagaagaatattatcccttctcagaggtcctggcctatttcactttctgcctgtggataattccgtttgcgttttttgtgtcactttcggccggggagaacgtcctgccctctaccatgcagccaggagatgatgtcgtctccaattatttcaccaaaggcaagcggggcaaacgcttagggatcctggttgtcttctccttcatcaaagaggccattctacccagtcgtcagaagatatactgacccccatgcaggcaggatgtggggggcaagatcaggagagtcaggcccctgggcctctatgccaggtggggaccagaagtcgggaaggcacctaccacctgccctggctttcttcccctcaactctggagccccatccccaccctccttggggggctcagcttggctcagatctgatgcttcaagaggctgtaacctcagagggcaccaaggagggtggcagagcctgcttagccaggaggccgaggtccctcagtcctcccctgtcccttccaaggtgggtcaggaggttctggccccgctggggcaggcagggcagggtctgtgaagcttaagagcagatggtgacaagttctctgggcaggtggccatggggaggggccatggcttggcatgtccaacagaaatagtttttgctgttgaacggtgatttctgtccaagtgcagatttccgtttgaataaagcttcgcttctaggtggcactgtttgccttaataccctgacagttcatcttcctttcttcctgctaaccttctgctctggactggactcacttttctgctccagggactccttttctgggtttgggtcttgcccttcccaagggactgttcttgtggcccttaatgggaagggggcaggggtgaggagctgagcctgctcaaggagtgggaagtggggctataggcagcctctctgatgcactctcttccatctctttccccaaggctccgtgactgtcaaactgggagtaggagaggggacaatttaggactgggctagattttcagaagaacatctacaatatcctatttataaatcttcctctgggaaaaggagtggtttctggctgaatactatcttaggctcaaggagaaacaaaataaaaattagcttccaggcagcctgtttttaaagaaatgggactaatgggagaagctgtttgtcactctaagagcatccaagccctggcccgtctgtgcactcttggctcctggggagatatatctgccttctaagaaggcaggccaggtcttgggcacagacctgcatttgttgaccttgcactccaactatagtgccttgcaagtgctcaacagtacatattggaatgaagtccctatgagagccatttctggccatgttctatacctcaaagtgaggctggcaggtacagagatgaactgtacacatgtgatacatttaagccactggaaaaacccctgtgcttgaaaatatttcctctatatcatgcctggagttccatcatagcccttcatttccttggctttagcatttaccttctcttaagaataccagctttcccctttccctgagaggaagagcacatgttggtctcctcttagtgtgaacgagattgccaggcccttttctcctatgcacaccaggatagacaaggcaggggatactggcagcctgcatcatcctcccattgggctgacagctggccctactttcctccctctgctgcttggtccctcaccttgatgatgtggcttcgccccctccactctactgccagtgttctcccaggggttgctaaatccagcagacccctttcctgtcttactagatctgggcagcatttgacatggctgatcaccccttgcttcttggatggcacttccctggcacctctgtggctagttgtcctacctccctggctgttcctttcaggcttccgtgcaggcttctccacttgcccatgcacagtagggtctttcagggttctgctgtgggctccctagggaagcccatccatctggatggtttcaaggatggtgaggaatttagagttgacctccagccccaacatccttcctgatcacctgaaccacagttttgctgccctctaggtgcacagacaattcaggtccatggcccagatggtacttgctgtcttctgcaaacctgccccttctgggtacttcccttgaccccgagatcactcaggagccagacaggaaacttattctattcctgttttctctttctgcccaccacatccaatctctcaaaacggtcaggtctaccttaacatctcttgatttgagccactcccactgtcatcagctttcacctggattatcgtgacagcctcctactgcttctctatcatgtggccagagctatcttcctaaaatgcattgcatagttgatcaagtcactctctggcctaaaaccttccttggctccctgctgccctctctggtctcatcacttgccttcttgcattctgggtcccagcctcctgtatccagagatgcagtggctctccattgccactctgattcctcctttcttttggtcacagagaaagggtactttctctgtcaaatctcaacttagacttgacttcctccaaggagctttggctatactctctcctcccgacccccaccctggcatactacacagatcactctgggctcacttgcctgcctaatggtcatctccccagtagactgtaagctccttgagggcaaggattgtgttggaatttttgtattaacagtgcctggcttggtgcctggcacctagaaagcactcaataaatgtttgtttaatgaaaaaaaaaaaaaaaaaaaaaaaaactcgaggggggccccggtcccaaattgcccttatagggggccttataacaatccatgtggccgcgtttaaaacttcgagactgggaaacccgtggtgtccccaattaaatcgcttggag

SEQ ID NO: 313407 - DNA, 1980 bp, Homo sapiens
tatttgactgaagtgggagaaggctacgagttttttgtgtcattttgtgtaagggcgcagactgctgcgaacagagtggtgatagcgcctaagcatagtgttagagtttggattagtgggctattttctgctagggggtggaagcggatgagtaagaagattcctgctacaactatagtgcttaagcggatcagcgctgatccgcttaagcctgaccccgtacacagctctccctgggatgctggaggctgctgtgcacgccccaggtaactcagatgtcaccaggacatgatgtgccactcaggtcccaaagcccttggtgtcctatggtcaggtattcgaattccactaagcccagggataagccaagagctgcttcctgaatgaagagttacctgcaggaggaggcgtggtctttctctagaacctccagttctgcacagtgaatcttttggagcttgtgaaaacctgcataaaataatacactgcatttggaacatagatgctcttacattcgttgatttcttatttttttttttccccttaagcggatcagcatatttcctctatatcatgcctggagttccatcatagcccttcatttccttggctttagcatttaccttctcttaagaataccagctttcccctttccctgagaggaagagcacatgttggtctcctcttagtgtgaacgagattgccaggcccttttctcctatgcacaccaggatagacaaggcaggggatactggcagcctgcatcatcctcccattgggctgacagctggccctactttcctccctctgctgcttggtccctcaccttgatgatgtggcttcgccccctccactctactgccagtgttctcccaggggttgctaaatccagcagacccctttcctgtcttactagatctgggcagcatttgacatggctgatcaccccttgcttcttggatggcacttccctggcacctctgtggctagttgtcctacctccctggctgttcctttcaggcttccgtgcaggcttctccacttgcccatgcacagtagggtctttcagggttctgctgtgggctccctagggaagcccatccatctggatggtttcaaggatggtgaggaatttagagttgacctccagccccaacatccttcctgatcacctgaaccacagttttgctgccctctaggtgcacagacaattcaggtccatggcccagatggtacttgctgtcttctgcaaacctgccccttctgggtacttcccttgaccccgagatcactcaggagccagacaggaaacttattctattcctgttttctctttctgcccaccacatccaatctctcaaaacggtcaggtctaccttaacatctcttgatttgagccactcccactgtcatcagctttcacctggattatcgtgacagcctcctactgcttctctatcatgtggccagagctatcttcctaaaatgcattgcatagttgatcaagtcactctctggcctaaaaccttccttggctccctgctgccctcaggataaagtctggacccctcagcatggcttgtgagactcatggtgtccttgtccctgctcacctctctggtctcatcacttgccttcttgcattctgggtcccagcctcctgtatccagagatgcagtggctctccattgccactctgattcctcctttcttttggtcacagagaaagggtactttctctgtcaaatctcaacttagacttgacttcctccaaggagctttggctatactctctcctcccgacccccaccctggcatactacacagatcactctgggctcacttgcctgcctaatggtcatctccccagtagactgtaagctccttgagggcaaggattgtgttggaatttttgtattaacagtgcctggcttggtgcctggcacctagaaagcactcaataaatgtttgtttaatgaa

SEQ ID NO: 313408 - DNA, 1865 bp, Homo sapiens
  misc_feature (1288)..(1288): n is a, c, g, or t
ggcggcgctagcgcgagcctggccccgggcagcgctagggccgggctcctctcggcggcggcgcaccgtcgtcctgtcgtccgcggggcggggacgcggcggcggcggcggcggtggcggctgtgtgtcgccggagccgaagcgcgcaggcccgtcccggtggccggggagcgggcgggtgggggcgccatgtggttcatgtacctgctgagctggctgtcgctcttcatccaggtggccttcatcacgctggctgtcgcggctggactctattacctggcagaactgatagaagaatacacagtggccaccagcaggatcataaaatacatgatctggttctccaccgctgtactgattggcctctacgtctttgagcgcttccccaccagcatgattggagtgggcctattcaccaacctcgtctactttggcctcctccagaccttccccttcatcatgctgacctcgcctaacttcatcctgtcgtgtggactagtggtggtgaatcattacctagcatttcagttttttgcagaagaatattatcccttctcagaggtcctggcctatttcactttctgcctgtggataattccgtttgcgttttttgtgtcactttcggccggggagaacgtcctgccctctaccatgcagccaggagatgatgtcgtctccaattatttcaccaaaggcaagcggggcaaacgcttagggatcctggttgtcttctccttcatcaaagaggccattctacccagtcgtcagaagatatactgacccccatgcaggcaggatgtggggggcaagatcaggagagtcaggcccctgggcctctatgccaggtggggaccagaagtcgggaaggcacctaccacctgccctggctttcttcccctcaactctggagccccatccccaccctccttggggggctcagcttggctcagatctgatgcttcaagaggctgtaacctcagagggcaccaaggagggtggcagagcctgcttagccaggaggccgaggtccctcagtcctcccctgtcccttccaaggtgggtcaggaggttctggccccgctggggcaggcagggcagggtctgtgaagcttaagagcagatggtgacaagttctctgggcaggtggccatggggaggggccatggcttggcatgtccaacagaaatagtttttgctgttgaacggtgatttctgtccaagtgcagatttccgtttgaataaagcttcgcttctaggtgggccacaaaaaaaaaatcatttatacgcngcccgcattcggggtcacttggcacattggcctatagggagtcgtatacaattcaatggccgcgggttacaacgcggggccgggaaaccctgcggtaccaacttaatgcctttgagacattcccttttccagttgcggaatacgaaaggccccgaccgttggccttccaacgttgccaacctgaggggaaggaaatgtagcgtaatattggtaaattcgcgtaattctgtaacccgcatttttacccaagccgcaatggaaaaccttttatcaacgaaatcccgcttaggctttaaggtgttcattggcgggcactttcgcgttcaccgcgaagggcgatacgcgcttctgggctggccctcgggactacctcttaacattcttcgtgcagggctccaggcctaattggccctcggggctctttctaactttcgttatattccttcacgccacgttcgctctacgacagactctccgctatcgagactgcctctctgcctcactctcttcttcgcttctctcactagcctagctgtttcttctcttctgcgcgctatctctcgctctattatccccg

SEQ ID NO: 313409 - DNA, 391 bp, Homo sapiens
agcccatgacccctaaccggggccctctcagccctcctaatgacctcccagccattctgggtcccagcctcctgtatccagagatgcagtggctctccattgccactctgattcctcctttcttttggtcacagagaaagggtactttctctgtcaaatctcaacttagacttgacttcctccaaggagctttggctatactctctcctcccgacccccaccctggcatactacacagatcactctgggctcacttgcctgcctaatggtcatctccccagtagactgtaagctccttgagggcaaggattgtgttggaatttttgtattaacagtgcctggcttggtgcctggcacctagaaagcactcaataaatgtttgtttaatgaa

SEQ ID NO: 313410 - DNA, 496 bp, Homo sapiens
tgccgcccccgcgtctgcggaccgctaaccgctgcggctcccactcttcgcgggcctgccgcgcggaacttttccccaacgcctaccgccgcctttgcgcctctggcccttcatgctccctgctctctccacctttgacacttctcctctggctggttcccattcggcctcagttgagatgtcatcttttccgggaagtccacaggggttgatggtccagcagtgccctgtcctttccctaaagtagcatttctcacactaaactcgtctgtctctccctactgttccccttccctttcccaagctgggtcagggaaggacccttgtctgtctttttcagctgtattctcagcccagggacctggctcatgccaagtgcccagcaggtgtttattgaatacgtgaaattccgttttctgagccagaggttatcattgtactgtggcatcaaatgcagactttcgttgatttttatgagatttgtccttagttgccc

SEQ ID NO: 313411 - DNA, 3278 bp, Homo sapiens
ttgcgcctctggcccttcatgctccctgctctctccacctttgacacttctcctctggctggttcccattcggcctcagttgagatgtcatcttttccgcggctggactctattacctggcagaactgatagaagaatacacagtggccaccagcaggatcataaaatacatgatctggttctccaccgctgtactgattggcctctacgtctttgagcgcttccccaccagcatgattggagtgggcctattcaccaacctcgtctactttggcctcctccagaccttccccttcatcatgctgacctcgcctaacttcatcctgtcgtgtggactagtggtggtgaatcattacctagcatttcagttttttgcagaagaatattatcccttctcagaggtcctggcctatttcactttctgcctgtggataattccgtttgcgttttttgtgtcactttcggccggggagaacgtcctgccctctaccatgcagccaggagatgatgtcgtctccaattatttcaccaaaggcaagcggggcaaacgcttagggatcctggttgtcttctccttcatcaaagaggccattctacccagtcgtcagaagatatactgacccccatgcaggcaggatgtggggggcaagatcaggagagtcaggcccctgggcctctatgccaggtggggaccagaagtcgggaaggcacctaccacctgccctggctttcttcccctcaactctggagccccatccccaccctccttggggggctcagcttggctcagatctgatgcttcaagaggctgtaacctcagagggcaccaaggagggtggcagagcctgcttagccaggaggccgaggtccctcagtcctcccctgtcccttccaaggtgggtcaggaggttctggccccgctggggcaggcagggcagggtctgtgaagcttaagagcagatggtgacaagttctctgggcaggtggccatggggaggggccatggcttggcatgtccaacagaaatagtttttgctgttgaacggtgatttctgtccaagtgcagatttccgtttgaataaagcttcgcttctaggtggcactgtttgccttaataccctgacagttcatcttcctttcttcctgctaaccttctgctctggactggactcacttttctgctccagggactccttttctgggtttgggtcttgcccttcccaagggactgttcttgtggcccttaatgggaagggggcaggggtgaggagctgagcctgctcaaggagtgggaagtggggctataggcagcctctctgatgcactctcttccatctctttccccaaggctccgtgactgtcaaactgggagtaggagaggggacaatttaggactgggctagattttcagaagaacatctacaatatcctatttataaatcttcctctgggaaaaggagtggtttctggctgaatactatcttaggctcaaggagaaacaaaataaaaattagcttccaggcagcctgtttttaaagaaatgggactaatgggagaagctgtttgtcactctaagagcatccaagccctggcccgtctgtgcactcttggctcctggggagatatatctgccttctaagaaggcaggccaggtcttgggcacagacctgcatttgttgaccttgcactccaactatagtgccttgcaagtgctcaacagtacatattggaatgaagtccctatgagagccatttctggccatgttctatacctcaaagtgaggctggcaggtacagagatgaactgtacacatgtgatacatttaagccactggaaaaacccctgtgcttgaaaatatttcctctatatcatgcctggagttccatcatagcccttcatttccttggctttagcatttaccttctcttaagaataccagctttcccctttccctgagaggaagagcacatgttggtctcctcttagtgtgaacgagattgccaggcccttttctcctatgcacaccaggatagacaaggcaggggatactggcagcctgcatcatcctcccattgggctgacagctggccctactttcctccctctgctgcttggtccctcaccttgatgatgtggcttcgccccctccactctactgccagtgttctcccaggggttgctaaatccagcagacccctttcctgtcttactagatctgggcagcatttgacatggctgatcaccccttgcttcttggatggcacttccctggcacctctgtggctagttgtcctacctccctggctgttcctttcaggcttccgtgcaggcttctccacttgcccatgcacagtagggtctttcagggttctgctgtgggctccctagggaagcccatccatctggatggtttcaaggatggtgaggaatttagagttgacctccagccccaacatccttcctgatcacctgaaccacagttttgctgccctctaggtgcacagacaattcaggtccatggcccagatggtacttgctgtcttctgcaaacctgccccttctgggtacttcccttgaccccgagatcactcaggagccagacaggaaacttattctattcctgttttctctttctgcccaccacatccaatctctcaaaacggtcaggtctaccttaacatctcttgatttgagccactcccactgtcatcagctttcacctggattatcgtgacagcctcctactgcttctctatcatgtggccagagctatcttcctaaaatgcattgcatagttgatcaagtcactctctggcctaaaaccttccttggctccctgctgccctcaggataaagtctggacccctcagcatggcttgtgagactcatggtgtccttgtccctgctcacctctctggtctcatcacttgccttcttgcattctgggtcccagcctcctgtatccagagatgcagtggctctccattgccactctgattcctcctttcttttggtcacagagaaagggtactttctctgtcaaatctcaacttagacttgacttcctccaaggagctttggctatactctctcctcccgacccccaccctggcatactacacagatcactctgggctcacttgcctgcctaatggtcatctccccagtagactgtaagctccttgagggcaaggattgtgttggaatttttgtattaacagtgcctggcttggtgcctggcacctagaaagcactcaataaatgtttgtttaatgaa

SEQ ID NO: 313412 - DNA, 3311 bp, Homo sapiens
ggcggcgctagcgcgagcctggccccgggcagcgctagggccgggctcctctcggcggcggcgcaccgtcgtcctgtcgtccgcggggcggggacgcggcggcggcggcggcggtggcggctgtgtgtcgccggagccgaagcgcgcaggcccgtcccggtggccggggagcgggcgggtgggggcgccatgtggttcatgtacctgctgagctggctgtcgctcttcatccaggtggccttcatcacgctggctgtcgcggctggactctattacctggcagaactgatagaagaatacacagtggccaccagcaggatcataaaatacatgatctggttctccaccgctgtactgattggcctctacgtctttgagcgcttccccaccagcatgattggagtgggcctattcaccaacctcgtctactttggcctcctccagaccttccccttcatcatgctgacctcgcctaacttcatcctgtcgtgtggactagtggtggtgaatcattacctagcatttcagttttttgcagaagaatattatcccttctcagaggtcctggcctatttcactttctgcctgtggataattccgtttgcgttttttgtgtcactttcggccggggagaacgtcctgccctctaccatgcagccaggagatgatgtcgtctccaattatttcaccaaaggcaagcggggcaaacgcttagggatcctggttgtcttctccttcatcaaagaggccattctacccagtcgtcagaagatatactgacccccatgcaggcaggatgtggggggcaagatcaggagagtcaggcccctgggcctctatgccaggtggggaccagaagtcgggaaggcacctaccacctgcttagccaggaggccgaggtccctcagtcctcccctgtcccttccaaggtgggtcaggaggttctggccccgctggggcaggcagggcagggtctgtgaagcttaagagcagatggtgacaagttctctgggcaggtggccatggggaggggccatggcttggcatgtccaacagaaatagtttttgctgttgaacggtgatttctgtccaagtgcagatttccgtttgaataaagcttcgcttctaggtggcactgtttgccttaataccctgacagttcatcttcctttcttcctgctaaccttctgctctggactggactcacttttctgctccagggactccttttctgggtttgggtcttgcccttcccaagggactgttcttgtggcccttaatgggaagggggcaggggtgaggagctgagcctgctcaaggagtgggaagtggggctataggcagcctctctgatgcactctcttccatctctttccccaaggctccgtgactgtcaaactgggagtaggagaggggacaatttaggactgggctagattttcagaagaacatctacaatatcctatttataaatcttcctctgggaaaaggagtggtttctggctgaatactatcttaggctcaaggagaaacaaaataaaaattagcttccaggcagcctgtttttaaagaaatgggactaatgggagaagctgtttgtcactctaagagcatccaagccctggcccgtctgtgcactcttggctcctggggagatatatctgccttctaagaaggcaggccaggtcttgggcacagacctgcatttgttgaccttgcactccaactatagtgccttgcaagtgctcaacagtacatattggaatgaagtccctatgagagccatttctggccatgttctatacctcaaagtgaggctggcaggtacagagatgaactgtacacatgtgatacatttaagccactggaaaaacccctgtgcttgaaaatatttcctctatatcatgcctggagttccatcatagcccttcatttccttggctttagcatttaccttctcttaagaataccagctttcccctttccctgagaggaagagcacatgttggtctcctcttagtgtgaacgagattgccaggcccttttctcctatgcacaccaggatagacaaggcaggggatactggcagcctgcatcatcctcccattgggctgacagctggccctactttcctccctctgctgcttggtccctcaccttgatgatgtggcttcgccccctccactctactgccagtgttctcccaggggttgctaaatccagcagacccctttcctgtcttactagatctgggcagcatttgacatggctgatcaccccttgcttcttggatggcacttccctggcacctctgtggctagttgtcctacctccctggctgttcctttcaggcttccgtgcaggcttctccacttgcccatgcacagtagggtctttcagggttctgctgtgggctccctagggaagcccatccatctggatggtttcaaggatggtgaggaatttagagttgacctccagccccaacatccttcctgatcacctgaaccacagttttgctgccctctaggtgcacagacaattcaggtccatggcccagatggtacttgctgtcttctgcaaacctgccccttctgggtacttcccttgaccccgagatcactcaggagccagacaggaaacttattctattcctgttttctctttctgcccaccacatccaatctctcaaaacggtcaggtctaccttaacatctcttgatttgagccactcccactgtcatcagctttcacctggattatcgtgacagcctcctactgcttctctatcatgtggccagagctatcttcctaaaatgcattgcatagttgatcaagtcactctctggcctaaaaccttccttggctccctgctgccctcaggataaagtctggacccctcagcatggcttgtgagactcatggtgtccttgtccctgctcacctctctggtctcatcacttgccttcttgcattctgggtcccagcctcctgtatccagagatgcagtggctctccattgccactctgattcctcctttcttttggtcacagagaaagggtactttctctgtcaaatctcaacttagacttgacttcctccaaggagctttggctatactctctcctcccgacccccaccctggcatactacacagatcactctgggctcacttgcctgcctaatggtcatctccccagtagactgtaagctccttgagggcaaggattgtgttggaatttttgtattaacagtgcctggcttggtgcctggcacctagaaagcactcaataaatgtttgtttaatgaa

SEQ ID NO: 313413 - DNA, 3515 bp, Homo sapiens
  misc_feature (3499)..(3499): n is a, c, g, or t
  misc_feature (3507)..(3507): n is a, c, g, or t
ggcggcgctagcgcgagcctggccccgggcagcgctagggccgggctcctctcggcggcggcgcaccgtcgtcctgtcgtccgcggggcggggacgcggcggcggcggcggcggtggcggctgtgtgtcgccggagccgaagcgcgcaggcccgtcccggtggccggggagcgggcgggtgggggcgccatgtggttcatgtacctgctgagctggctgtcgctcttcatccaggtggccttcatcacgctggctgtcgcggctggactctattacctggcagaactgatagaagaatacacagtggccaccagcaggatcataaaatacatgatctggttctccaccgctgtactgattggcctctacgtctttgagcgcttccccaccagcatgattggagtgggcctattcaccaacctcgtctactttggcctcctccagaccttccccttcatcatgctgacctcgcctaacttcatcctgtcgtgtggactagtggtggtgaatcattacctagcatttcagttttttgcagaagaatattatcccttctcagaggtcctggcctatttcactttctgcctgtggataattccgtttgcgttttttgtgtcactttcggccggggagaacgtcctgccctctaccatgcagccaggagatgatgtcgtctccaattatttcaccaaaggcaagcggggcaaacgcttagggatcctggttgtcttctccttcatcaaagaggccattctacccagtcgtcagaagatatactgacccccatgcaggcaggatgtggggggcaagatcaggagagtcaggcccctgggcctctatgccaggtggggaccagaagtcgggaaggcacctaccacctgccctggctttcttcccctcaactctggagccccatccccaccctccttggggggctcagcttggctcagatctgatgcttcaagaggctgtaacctcagagggcaccaaggagggtggcagagcctgcttagccaggaggccgaggtccctcagtcctcccctgtcccttccaaggtgggtcaggaggttctggccccgctggggcaggcagggcagggtctgtgaagcttaagagcagatggtgacaagttctctgggcaggtggccatggggaggggccatggcttggcatgtccaacagaaatagtttttgctgttgaacggtgatttctgtccaagtgcagatttccgtttgaataaagcttcgcttctaggtggcactgtttgccttaataccctgacagttcatcttcctttcttcctgctaaccttctgctctggactggactcacttttctgctccagggactccttttctgggtttgggtcttgcccttcccaagggactgttcttgtggcccttaatgggaagggggcaggggtgaggagctgagcctgctcaaggagtgggaagtggggctataggcagcctctctgatgcactctcttccatctctttccccaaggctccgtgactgtcaaactgggagtaggagaggggacaatttaggactgggctagattttcagaagaacatctacaatatcctatttataaatcttcctctgggaaaaggagtggtttctggctgaatactatcttaggctcaaggagaaacaaaataaaaattagcttccaggcagcctgtttttaaagaaatgggactaatgggagaagctgtttgtcactctaagagcatccaagccctggcccgtctgtgcactcttggctcctggggagatatatctgccttctaagaaggcaggccaggtcttgggcacagacctgcatttgttgaccttgcactccaactatagtgccttgcaagtgctcaacagtacatattggaatgaagtccctatgagagccatttctggccatgttctatacctcaaagtgaggctggcaggtacagagatgaactgtacacatgtgatacatttaagccactggaaaaacccctgtgcttgaaaatatttcctctatatcatgcctggagttccatcatagcccttcatttccttggctttagcatttaccttctcttaagaataccagctttcccctttccctgagaggaagagcacatgttggtctcctcttagtgtgaacgagattgccaggcccttttctcctatgcacaccaggatagacaaggcaggggatactggcagcctgcatcatcctcccattgggctgacagctggccctactttcctccctctgctgcttggtccctcaccttgatgatgtggcttcgccccctccactctactgccagtgttctcccaggggttgctaaatccagcagacccctttcctgtcttactagatctgggcagcatttgacatggctgatcaccccttgcttcttggatggcacttccctggcacctctgtggctagttgtcctacctccctggctgttcctttcaggcttccgtgcaggcttctccacttgcccatgcacagtagggtctttcagggttctgctgtgggctccctagggaagcccatccatctggatggtttcaaggatggtgaggaatttagagttgacctccagccccaacatccttcctgatcacctgaaccacagttttgctgccctctaggtgcacagacaattcaggtccatggcccagatggtacttgctgtcttctgcaaacctgccccttctgggtacttcccttgaccccgagatcactcaggagccagacaggaaacttattctattcctgttttctctttctgcccaccacatccaatctctcaaaacggtcaggtctaccttaacatctcttgatttgagccactcccactgtcatcagctttcacctggattatcgtgacagcctcctactgcttctctatcatgtggccagagctatcttcctaaaatgcattgcatagttgatcaagtcactctctggcctaaaaccttccttggctccctgctgccctcaggataaagtctggacccctcagcatggcttgtgagactcatggtgtccttgtccctgctcacctctctggtctcatcacttgccttcttgcattctgggtcccagcctcctgtatccagagatgcagtggctctccattgccactctgattcctcctttcttttggtcacagagaaagggtactttctctgtcaaatctcaacttagacttgacttcctccaaggagctttggctatactctctcctcccgacccccaccctggcatactacacagatcactctgggctcacttgcctgcctaatggtcatctccccagtagactgtaagctccttgagggcaaggattgtgttggaatttttgtattaacagtgcctggcttggtgcctggcacctagaaagcactcaataaatgtttgtttaatgaaaaaaaaaaaaaaaaaaaaaaaaaaaaaaaaaaaaaaaaaaaaaaaaaaaaaaaaaaaaaangggggggngcgaacaa

SEQ ID NO: 313414 - DNA, 3298 bp, Homo sapiens
ggcggcgctagcgcgagcctggccccgggcagcgctagggccgggctcctctcggcggcggcgcaccgtcgtcctgtcgtccgcggggcggggacgcggcggcggcggcggcggtggcggctgtgtgtcgccggagccgaagcgcgcaggcccgtcccggtggccggggagcgggcgggtgggggcgccatgtggttcatgtacctgctgagctggctgtcgctcttcatccaggtggccttcatcacgctggctgtcgcggctggactctattacctggcagaactgatagaagaatacacagtggccaccagcaggatcataaaatacatgatctggttctccaccgctgtactgattggcctctacgtctttgagcgcttccccaccagcatgattggagtgggcctattcaccaacctcgtctactttggcctcctccagaccttccccttcatcatgctgacctcgcctaacttcatcctgtcgtgtggactagtggtggtgaatcattacctagcatttcagttttttgcagaagaatattatcccttctcagaggtcctggcctatttcactttctgcctgtggataattccgtttgcgttttttgtgtcactttcggccggggagaacgtcctgccctctaccatgcagccaggagatgatgtcgtctccaattatttcaccaaaggcaagcggggcaaacgcttagggatcctggttgtcttctccttcatcaaagaggccattctacccagtcgtcagaagatatactgacccccatgcaggcaggatgtggggggcaagatcaggagagtcaggcccctgggcctctatgccaggtggggaccagaagtcgggaaggcacctaccacctgccctggctttcttcccctcaactctggagccccatccccaccctccttggggggctcagcttggctcagatctgatgcttcaagaggctgtaacctcagagggcaccaaggagggtggcagagcctgcttagccaggaggccgaggtccctcagtcctcccctgtcccttccaaggtgggtcaggaggttctggccccgctggggcaggcagggcagggtctgtgaagcttaagagcagatggtgacaagttctctgggcaggtggccatggggaggggccatggcttggcatgtccaacagaaatagtttttgctgttgaacggtgatttctgtccaagtgcagatttccgtttgaataaagcttcgcttctaggtggcactgtttgccttaataccctgacagttcatcttcctttcttcctgctaaccttctgctctggactggactcacttttctgctccagggactccttttctgggtttgggtcttgcccttcccaagggactgttcttgtggcccttaatgggaagggggcaggggtgaggagctgagcctgctcaaggagtgggaagtggggctataggcagcctctctgatgcactctcttccatctctttccccaaggctccgtgactgtcaaactgggagtaggagaggggacaatttaggactgggctagattttcagaagaacatctacaatatcctatttataaatcttcctctgggaaaaggagtggtttctggctgaatactatcttaggctcaaggagaaacaaaataaaaattagcttccagacagacctgcatttgttgaccttgcactccaactatagtgccttgcaagtgctcaacagtacatattggaatgaagtccctatgagagccatttctggccatgttctatacctcaaagtgaggctggcaggtacagagatgaactgtacacatgtgatacatttaagccactggaaaaacccctgtgcttgaaaatatttcctctatatcatgcctggagttccatcatagcccttcatttccttggctttagcatttaccttctcttaagaataccagctttcccctttccctgagaggaagagcacatgttggtctcctcttagtgtgaacgagattgccaggcccttttctcctatgcacaccaggatagacaaggcaggggatactggcagcctgcatcatcctcccattgggctgacagctggccctactttcctccctctgctgcttggtccctcaccttgatgatgtggcttcgccccctccactctactgccagtgttctcccaggggttgctaaatccagcagacccctttcctgtcttactagatctgggcagcatttgacatggctgatcaccccttgcttcttggatggcacttccctggcacctctgtggctagttgtcctacctccctggctgttcctttcaggcttccgtgcaggcttctccacttgcccatgcacagtagggtctttcagggttctgctgtgggctccctagggaagcccatccatctggatggtttcaaggatggtgaggaatttagagttgacctccagccccaacatccttcctgatcacctgaaccacagttttgctgccctctaggtgcacagacaattcaggtccatggcccagatggtacttgctgtcttctgcaaacctgccccttctgggtacttcccttgaccccgagatcactcaggagccagacaggaaacttattctattcctgttttctctttctgcccaccacatccaatctctcaaaacggtcaggtctaccttaacatctcttgatttgagccactcccactgtcatcagctttcacctggattatcgtgacagcctcctactgcttctctatcatgtggccagagctatcttcctaaaatgcattgcatagttgatcaagtcactctctggcctaaaaccttccttggctccctgctgccctcaggataaagtctggacccctcagcatggcttgtgagactcatggtgtccttgtccctgctcacctctctggtctcatcacttgccttcttgcattctgggtcccagcctcctgtatccagagatgcagtggctctccattgccactctgattcctcctttcttttggtcacagagaaagggtactttctctgtcaaatctcaacttagacttgacttcctccaaggagctttggctatactctctcctcccgacccccaccctggcatactacacagatcactctgggctcacttgcctgcctaatggtcatctccccagtagactgtaagctccttgagggcaaggattgtgttggaatttttgtattaacagtgcctggcttggtgcctggcacctagaaagcactcaataaatgtttgtttaatgaa

SEQ ID NO: 313415 - DNA, 3372 bp, Homo sapiens
ggcggcgctagcgcgagcctggccccgggcagcgctagggccgggctcctctcggcggcggcgcaccgtcgtcctgtcgtccgcggggcggggacgcggcggcggcggcggcggtggcggctgtgtgtcgccggagccgaagcgcgcaggcccgtcccggtggccggggagcgggcgggtgggggcgccatgtggttcatgtacctgctgagctggctgtcgctcttcatccaggtggccttcatcacgctggctgtcgcggctggactctattacctggcagaactgatagaagaatacacagtggccaccagcaggatcataaaatacatgatctggttctccaccgctgtactgattggcctctacgtctttgagcgcttccccaccagcatgattggagtgggcctattcaccaacctcgtctactttggcctcctccagaccttccccttcatcatgctgacctcgcctaacttcatcctgtcgtgtggactagtggtggtgaatcattacctagcatttcagttttttgcagaagaatattatcccttctcagaggtcctggcctatttcactttctgcctgtggataattccgtttgcgttttttgtgtcactttcggccggggagaacgtcctgccctctaccatgcagccaggagatgatgtcgtctccaattatttcaccaaaggcaagcggggcaaacgcttagggatcctggttgtcttctccttcatcaaagaggccattctacccagtcgtcagaagatatactgacccccatgcaggcaggatgtggggggcaagatcaggagagtcaggcccctgggcctctatgccaggtggggaccagaagtcgggaaggcacctaccacctgccctggctttcttcccctcaactctggagccccatccccaccctccttggggggctcagcttggctcagatctgatgcttcaagaggctgtaacctcagagggcaccaaggagggtggcagagcctgcttagccaggaggccgaggtccctcagtcctcccctgtcccttccaaggtgggtcaggaggttctggccccgctggggcaggcagggcagggtctgtgaagcttaagagcagatggtgacaagttctctgggcaggtggccatggggaggggccatggcttggcatgtccaacagaaatagtttttgctgttgaacggtgatttctgtccaagtgcagatttccgtttgaataaagcttcgcttctaggtggcactgtttgccttaataccctgacagttcatcttcctttcttcctgctaaccttctgctctggactggactcacttttctgctccagggactccttttctgggtttgggtcttgcccttcccaagggactgttcttgtggcccttaatgggaagggggcaggggtgaggagctgagcctgctcaaggagtgggaagtggggctataggcagcctctctgatgcactctcttccatctctttccccaaggctccgtgactgtcaaactgggagtaggagaggggacaatttaggactgggctagattttcagaagaacatctacaatatcctatttataaatcttcctctgggaaaaggagtggtttctggctgaatactatcttaggctcaaggagaaacaaaataaaaattagcttccaggcagcctgtttttaaagaaatgggactaatgggagaagctgtttgtcactctaagagcatccaagccctggcccgtctgtgcactcttggctcctggggagatatatctgccttctaagaaggcaggccaggtcttgggcacagacctgcatttgttgaccttgcactccaactatagtgccttgcaagtgctcaacagtacatattggaatgaagtccctatgagagccatttctggccatgttctatacctcaaagtgaggctggcaggtacagagatgaactgtacacatgtgatacatttaagccactggaaaaacccctgtgcttgaaaatatttcctctatatcatgcctggagttccatcatagcccttcatttccttggctttagcatttaccttctcttaagaataccagctttcccctttccctgagaggaagagcacatgttggtctcctcttagtgtgaacgagattgccaggcccttttctcctatgcacaccaggatagacaaggcaggggatactggcagcctgcatcatcctcccattgggctgacagctggccctactttcctccctctgctgcttggtccctcaccttgatgatgtggcttcgccccctccactctactgccagtgttctcccaggggttgctaaatccagcagacccctttcctgtcttactagatctgggcagcatttgacatggctgatcaccccttgcttcttggatggcacttccctggcacctctgtggctagttgtcctacctccctggctgttcctttcaggcttccgtgcaggcttctccacttgcccatgcacagtagggtctttcagggttctgctgtgggctccctagggaagcccatccatctggatggtttcaaggatggtgaggaatttagagttgacctccagccccaacatccttcctgatcacctgaaccacagttttgctgccctctaggtgcacagacaattcaggtccatggcccagatggtacttgctgtcttctgcaaacctgccccttctgggtacttcccttgaccccgagatcactcaggagccagacaggaaacttattctattcctgttttctctttctgcccaccacatccaatctctcaaaacggtcaggtctaccttaacatctcttgatttgagccactcccactgtcatcagctttcacctggattatcgtgacagcctcctactgcttctctatcatgtggccagagctatcttcctaaaatgcattgcatagttgatcaagtcactctctggcctaaaaccttccttggctccctgctgccctctctggtctcatcacttgccttcttgcattctgggtcccagcctcctgtatccagagatgcagtggctctccattgccactctgattcctcctttcttttggtcacagagaaagggtactttctctgtcaaatctcaacttagacttgacttcctccaaggagctttggctatactctctcctcccgacccccaccctggcatactacacagatcactctgggctcacttgcctgcctaatggtcatctccccagtagactgtaagctccttgagggcaaggattgtgttggaatttttgtattaacagtgcctggcttggtgcctggcacctagaaagcactcaataaatgtttgtttaatgaa

SEQ ID NO: 313416 - DNA, 1523 bp, Homo sapiens
ggcggcgctagcgcgagcctggccccgggcagcgctagggccgggctcctctcggcggcggcgcaccgtcgtcctgtcgtccgcggggcggggacgcggcggcggcggcggcggtggcggctgtgtgtcgccggagccgaagcgcgcaggcccgtcccggtggccggggagcgggcgggtgggggcgccatgtggttcatgtacctgctgagctggctgtcgctcttcatccaggtggccttcatcacgctggctgtcgcggctggactctattacctggcagaactgatagaagaatacacagtggccaccagcaggatcataaaatacatgatctggttctccaccgctgtactgattggcctctacgtctttgagcgcttccccaccagcatgattggagtgggcctattcaccaacctcgtctactttggcctcctccagaccttccccttcatcatgctgacctcgcctaacttcatcctgtcgtgtggactagtggtggtgaatcattacctagcatttcagttttttgcagaagaatattatcccttctcagaggtcctggcctatttcactttctgcctgtggataattccgtttgcgttttttgtgtcactttcggccggggagaacgtcctgccctctaccatgcagccaggagatgatgtcgtctccaattatttcaccaaaggcaagcggggcaaacgcttagggatcctggttgtcttctccttcatcaaagaggccattctacccagtcgtcagaagatatactgacccccatgcaggcaggatgtggggggcaagatcaggagagtcaggcccctgggcctctatgccaggtggggaccagaagtcgggaaggcacctaccacctgccctggctttcttcccctcaactctggagccccatccccaccctccttggggggctcagcttggctcagatctgatgcttcaagaggctgtaacctcagagggcaccaaggagggtggcagagcctgcttagccaggaggccgaggtccctcagtcctcccctgtcccttccaaggtgggtcaggaggttctggccccgctggggcaggcagggcagggtctgtgaagcttaagagcagatggtgacaagttctctgggcaggtggccatggggaggggccatggcttggcatgtccaacagaaatagtttttgctgttgaacggtgatttctgtccaagtgcagatttccgtttgaataaagcttcgcttctaggtggcactgtttgccttaataccctgacagttcatcttcctttcttcctgctaaccttctgctctggactggactcacttttcccagaggaagatttataaataggatattgtagatgttcttctgaaaatctagcccagtcctaaattgtcccctctcctactcccagtttgacattcacggagccttggggaaagagatggaagagagtgcatcagagaggctgcctatagccccacttcccactccttgagcaggctcagctcc

SEQ ID NO: 313417 - DNA, 1336 bp, Homo sapiens
ggcggcgctagcgcgagcctggccccgggcagcgctagggccgggctcctctcggcggcggcgcaccgtcgtcctgtcgtccgcggggcggggacgcggcggcggcggcggcggtggcggctgtgtgtcgccggagccgaagcgcgcaggcccgtcccggtggccggggagcgggcgggtgggggcgccatgtggttcatgtacctgctgagctggctgtcgctcttcatccaggtggccttcatcacgctggctgtcgcggctggactctattacctggcagaactgatagaagaatacacagtggccaccagcaggatcataaaatacatgatctggttctccaccgctgtactgattggcctctacgtctttgagcgcttccccaccagcatgattggagtgggcctattcaccaacctcgtctactttggcctcctccagaccttccccttcatcatgctgacctcgcctaacttcatcctgtcgtgtggactagtggtggtgaatcattacctagcatttcagttttttgcagaagaatattatcccttctcagaggtcctggcctatttcactttctgcctgtggataattccgtttgcgttttttgtgtcactttcggccggggagaacgtcctgccctctaccatgcagccaggagatgatgtcgtctccaattatttcaccaaaggcaagcggggcaaacgcttagggatcctggttgtcttctccttcatcaaagaggccattctacccagtcgtcagaagatatactgacccccatgcaggcaggatgtggggggcaagatcaggagagtcaggcccctgggcctctatgccaggtggggaccagaagtcgggaaggcacctaccacctgccctggctttcttcccctcaactctggagccccatccccaccctccttggggggctcagcttggctcagatctgatgcttcaagaggctgtaacctcagagggcaccaaggagggtggcagagcctgcttagccaggaggccgaggtccctcagtcctcccctgtcccttccaaggtgggtcaggaggttctggccccgctggggcaggcagggcagggtctgtgaagcttaagagcagatggtgacaagttctctgggcaggtggccatggggaggggccatggcctggcatactacacagatcactctgggctcacttgcctgcctaatggtcatctccccagtagactgtaagctccttgagggcaaggattgtgttggaatttttgtattaacagtgcctggcttggtgcctggcacctagaaagcactcaataaatgtttgtttaatgaa

SEQ ID NO: 313418 - DNA, 702 bp, Homo sapiens
cgtctacttaaattttccagatatttagtgaatttctgctgtgagccatgatctctgctagcccactgggaagaggagtgctggttcatgacccgtcatctgcatggtggtgcaggaagctcttctttctcttcgtacatgagggtaatagacagcagtcttcagcctgagacccatcactagaaacagcataatcggtgtcgtgaagaaaagacaaaggatctctcagcaaggcaatctttactttctgcagaaagggtgcccctcgcagatcgaacaatcgtgacagcacacttgaacaaaggaaaagcagacatatttatcatttacgtatttgggtcagccttactgctcagtcctgcatccattggctggagctggaccccacagtcttcaactgataccaaatctgctaataacctaaaactttcctaaacagatgccggagaccccaactggggactcagacccgcaacctgctcctaaaaaaatgaaaacatctgagtcctcgaccatactagtggttcgctacaggaggaacgtgaaaagaacatctccagaggaactgctgaatgaccacgcccgagagaacagaatcaaccccgaccaaatggaggaggaggaattcatagaaataacgactgaaagacctaaaaagtagcaagaagctacatctctcaaccttgggcaatgaaaataaag

SEQ ID NO: 313419 - DNA, 313 bp, Homo sapiens
tttgtagagatggggtcttgccttgttgcctaggctggtgttgaactcctggcctcaagcaatcctcctgccttggcctcccaacccaaagctacttttcaacacttcactttcctgatcaaaaacgtctacttaaattttccagatatttagtgaatttctgctgtgagccatgatctctgctagcccactgggaagaggagtgctggttcatgacccgtcatctgcatggtggtgcaggaagctcttctttctcttcgtacatgaggtattcaactagctcctagttaataaacctcaaaaccccctttta

SEQ ID NO: 313420 - DNA, 456 bp, Homo sapiens
gtcaccaggagggtatgcatagggagggcaagagctctgggccactgcgaagattcaaaagctccaaaaacctactgtagacatcgaagaaccaatatatacaatgggccaacaatccagtgtccgcaggctgaagaggagcgtcccctgtgaatccaacgaggccaacgaggccaatgaggccaacaagacgatgccggagaccccaactggggactcagacccgcaacctgctcctaaaaaaatgaaaacatctgagtcctcgaccatactagtggttcgctacaggaggaacgtgaaaagaacatctccagaggaactgctgaatgaccacgcccgagagaacagaatcaaccccgaccaaatggaggaggaggaattcatagaaataacgactgaaagacctaaaaagtagcaagaagctacatctctcaaccttgggcaatgaaaataaag

SEQ ID NO: 313421 - DNA, 1362 bp, Homo sapiens
ataaaggtaatatgaaatgagggctaaacaatgtaatataactgccagttaaggtagacagtagttgtggtcttagttacatttgatatggagttgtgtaatattaagcagatcccagtggagttagtaaaaacataggtattgagttttaatggctaccaattgggatatatacttagcctgcaggctgaactttagtcagtgtttttctatcatgttgttttgtgaacaagtcaaaatttatacaaagctaccctaagtgctgcaattgcagaggaacttgcctcttcgtgatattagagggcagtccaactccgctcaaactgagtccaagatttgaattcatccagaaaaacaaatggaggagaaaagcctaatgcaccacatgtgtttggcatttcatggctgggacaatggagtagagggtaggaagacaagctgtagaacaaaagcaaagtgaggtagaaagtaacaggtcccagaagaggacagacttagagatgtgtaaccttggatcctctttttcacttagaatatgggtaaacttcttagcacaagactggattaagagaagttctttctgttaaactcacctagggtagtggctttgaaggcctcagaggattaatagattcccaaaattttcttccagacctgggagatggagagaaagaggttcttgctttaaagcggctcgaagacaatctttatgacttcagcaactcttcaacatagtagcaccaataaaggagagattatgttaacttcctagtggtgagaataccatgggatgggagaagggccagtgagtgggatgggaatgagcttcatcaggaacagatttcagactctgcagggtgcaccggttctagcctcaaataacaacattgcaaggaggtggactacagggtccacaccctctgtccttcggggcccatggtcaggccattccctctttgttttgctcctagaggatgagcatgtaagatgagatcaggagggaaattgggtgctctgcctcaggctgttaaaatgctgctacctgcattctaaaacgtgcaagtcatgccccacaagacacctccttagggcagcatccactgtggtgtgccagcctgacacccctgcagtcacggtgtttgaatggcagctgatgctggcccacccagagtatcggtgcatctctcctaaagccacagttcagcactgcatgttgaccaggcggatatcctataatatagatgctcgtttggatccaaaaggaaaaccattaaaaataaaagaaagatgaaaaactttaatgttttgggggggataaaagaaaagaataaataaaaccttgttgtaaagaaaacatcggcc

SEQ ID NO: 313422 - DNA, 828 bp, Homo sapiens
caggccggggcgaggccgcgctggccctcccttggcggcggcggcgcgtcgtgggagacggctgcacgtgggacggctggtggatgaccgctgtgtggtggagcccgcggccggggacctggacaacccccctaagaagttccgtgactgcctcttcaaggtgtgccccatgaaccgctactcggcccagaagcagtactggaaggccaagcagactaagcaggacaaggagaagatcgctgatgtggtgttgctgcagaagctgcagcatgcggcgcagatggagcagaagcaaaatgacacggagaacaagaaggtgcatggggatgtcgtgaagtatggcagtgtgatccagctcctgcacatgaagagcaacaagtacctgacagtgaacaagcggcttccggccttgctggagaagaacgccatgcgggtgactctggatgccacaggcaacgagggttcctggctcttcatccagcccttctggaagctgcggagcaacggggacaacgtggtcgtgggggacaaggtgatcctgaatcctgtcaatgccgggcagcctctgcatgccagcaattacgagctcagcgacaacgccggctgcaaggaggtcaattctgtgaactgcaacaccagctggaagatcaacctgtttatgcagtttcgggaccacctggaggaggtgttgaaaggggtaaggactgggaacccctgccctgcccagctggccacctagccctccccaccagggccctcttcctgccttctccacccgccaggcctcaggcccttaccctctccccagctttgcaccccccagcctcc

SEQ ID NO: 313423 - DNA, 606 bp, Homo sapiens
gggttgtatgtgtatgttttttaagtgctaaacagtgactcattctgactggtccccccacacaggaaacagccccatctccaatcatgccctgaacagagcttcctcatagccagcctccgcactggcctccactaacctccagggatccccacccaggaacactcccagtcccaccagagtgcagcctagcccccagatatcacacccaggccccaggccccaaaaaaaaaaaaaaaaacaaacacaaaaaaaacaaaaaaaaaaaaaaaggtggggcttcagagaggactcctcggtgtcaggccaaccccttcatttgggtatgactcaaccctgacatcttatgctgacctgtccccaggcccaccctggctcctgactccaatcttagtctcatctccccttttgaccctcagccccttgccatgactgatcttgatctcagtatgtcccaggcctcaccttgacgctgaccgtgacacttcaccttgccccaactccagcctcatcttggccattgagctcccgcccctcacacatttccatcctgacctgggggccccactttccctttacgctggcctcttcacggtcccagtccca

SEQ ID NO: 313424 - DNA, 10094 bp, Homo sapiens
  misc_feature (4486)..(4486): n is a, c, g, or t
ttatttatttatttatttatttttttgtctatttgttgtgtaggggctatttcttgggctaatgcaagggcagggaccgaacccgcaacctcatggttcctagtcggattcgttaaccactgcgccacgacaggaactcccctgtgtctgacagttttaaagaaagcttttaagtggtgactcgacatcccgaggtgttgcggtcctattatcgcaatgggcactctatcttaggcgttcaaataaaggactaggaagcaaacacccaagcaccggggaacagaacagaaagaaagacggaaggagccaagagttttggagccaactcctggagagggagcggctgaactgattcggaagttggatctctttgtacacaggaatgcggagagaaaaaaaacaaaacccaccccattgcttcatttcccctccaagcctgagcactttctattgtgcaatgaaaaggcttttcacgttgagaaaaatgaatcccgaatttgctctgcaaagggatgagcgcgcctctgggcgccagcctgctctcagctgggcgcggagaccgcgcggtggccgcagggcggccgcggccagggcgctccagggcgcgccctccgcgagcggctccggggtgacgcccgccggagagctggactcccccttccgcgggcgcctgcactggctcttagccagccgagggcccgggtgcagatagtccgggaaccccgagggcggagagctccccactacgcctgggcctcccagggatggcagctccgagagccccctagacccggtgccttgcaggacgcctctggagatcaggagggctggcggcgcattcggcgtccgggaggccgggccccggacgcgcgaggagcgcggggcgcgggaaggcaggcgggtgcacatgggtgccggcgggcgagctgcggggggagggggggcggggtgtggcctccccgcctcccgggcgggatttgcatgtgtgtggtggccccagacttcctgctccttctacgctgcaggtacgcgcgggccgggcggggcgggcgggcggcgggcgcgccaagacgtgggcacctcctcacccggaccccgggccccgccgagccgcctcctggctcccgtggccgccagcccgccccggccgcaccgagcgtcgggatccgaggtgggagcgtacccctccccgctccccggacgcctcagtcctccgcactgagcttggccacgcgcccctaggcgccccccacgccctgggccccggagggccgcagccatgagtgaaatgtccagctttcttcacatcggggacatcgtctccctgtacgccgagggctccgtcaatggcttcatcagcactttggggctggtggatgaccgctgtgtggtggagcccgcggccggggacctggacaacccccctaagaagttccgtgactgcctcttcaaggtgtgccccatgaaccgctactcggcccagaagcagtactggaaggccaagcagactaagcaggacaaggagaagatcgctgatgtggtgttgctgcagaagctgcagcatgcggcgcagatggagcagaagcaaaatgacacggagaacaagaaggtgcatggggatgtcgtgaagtatggcagtgtgatccagctcctgcacatgaagagcaacaagtacctgacagtgaacaagcggcttccggccttgctggagaagaacgccatgcgggtgactctggatgccacaggcaacgagggttcctggctcttcatccagcccttctggaagctgcggagcaacggggacaacgtggtcgtgggggacaaggtgatcctgaatcctgtcaatgccgggcagcctctgcatgccagcaattacgagctcagcgacaacgccggctgcaaggaggtcaattctgtgaactgcaacaccagctggaagatcaacctgtttatgcagtttcgggaccacctggaggaggtgttgaaagggggagacgtggtgcggctgttccatgcggagcaggagaagttcctgacgtgtgacgagtacaagggcaagctgcaggtgttcctgcgaactacactgcgccagtctgccacctcggccaccagctccaatgctctctgggaggtggaggtggtccaccacgacccctgccgtggaggagctgggcactggaatggcttgtaccgcttcaagcacctggctacaggcaactacctggctgctgaggagaaccccagttacaaaggtgatgcctcagatcccaaggcagcaggaatgggggcacagggccgcacaggccgcaggaatgctggggagaagatcaagtactgcctggtggctgtgcctcatggcaatgacatcgcctctctctttgagctggaccccaccaccttgcagaaaaccgactctttcgtgccccggaactcgtacgtccggctgcggcacctctgcaccaacacgtggattcagagcaccaatgtgcccattgacatcgaggaggagcggcccatccggctcatgctgggcacctgccccaccaaggaggacaaggaggcctttgccatcgtgtcagtgcccgtgtctgagatccgagacctggactttgccaatgacgccagctccatgctggccagtgccgtggagaaactcaacgagggcttcatcagccagaatgaccgcaggtttgtcatccagctgctggaagacctggtgttctttgtcagcgatgtccccaacaatgggcagaatgtcctggacatcatggtcactaagcccaaccgggaacggcagaagctgatgagggagcagaacatcctcaaacaggtctttggcattctgaaggccccgttccgtgagaaggggggtgaaggtcccctggtgcggctggaggagctgtcagaccagaagaacgccccctaccagcacatgttccgcctgtgctaccgcgtgttgcggcattcccaggaggactaccgcaagaaccaggagcacattgccaagcagtttgggatgatgcagtcccagattggctacgacatcctggccgaggacaccatcactgccctgctgcacaacaaccgcaagctcctggaaaagcacatcaccaagaccgaggtggagaccttcgtcagccttgtgcgcaagaaccgggagcccaggttcctggactacctctctgacctgtgtgtgtccaaccacatcgccatccccgtcacccaagagctcatctgcaagtgtgtgctggaccccaagaacagtgacattctcatccggaccgagcttcggcccgtgaaggagatggcccaatcccacgagtacctgagcatcgagtactcagaagaggaagtgtggctcacgtggactgacaagaataacgagcatcatgagaagagtgtgaggcagctggcccaggaggcgcgggccggcaacgcccacgacgagaatgtgctcagctactacaggtaccagctgaagctctttgcccgcatgtgcttggaccgccagtacttggccatcgacgagatctcccagcagctgggcgtggacctgattttcctgtgcatggcagacgagatgctgccctttgacctgcgcgcctccttctgccacctgatgctgcacgtgcacgtggaccgtgacccccaggagctggtcacgccggtcaagtttgcccgtctctggactgagatccccacagccatcaccatcaaggactatgattccaacctcaacgcgtcccgagatgacaagaagaacaagtttgccaacaccatggagttcgtggaggactacctcaacaatgtagtcagcgaggccgtgccctttgccaacgaggagaagaacaagctcacttttgaggtggtcagcctggcgcacaatctcatctacttcggcttctacagcttcagcgagctgctgcggctcactcgcacactgctgggcatcatcgactgtgtgcaggggcccccggccatgctgcaggcctatgaggaccccggtggcaagaatgtgcggcggtccatccagggcgtggggcacatgatgtccaccatggtgctgagccgcaagcagtccgtcttcagtgcccccagcctgtctgctggggccagtgctgctgagccgctggacagaagcaagtttgaggagaatgaggacattgtggtgatggagaccaagctgaagatcctggaaatccttcagttcatcctcaacgtccgcctggattaccgcatatcctacctgctgtctgtcttcaagaaggagtttgtggaggtgtttcccatgcaggacagtggggctgatggcacagcccctgccttcgactctaccactgccaacatgaacctggatcgcatcggggagcaggcggaggccatgtttggagtggggaagacaagcagcatgctggaggtggatgacgagggcggccgcatgttcctgcgcgtgctcatccacctcaccatgcacgactatgcgccnctggtctcgggtgccctgcagctgctcttcaagcacttcagccagcgccaggaggccatgcacaccttcaagcaggttcagctgctgatctcagcgcaggacgtggagaactacaaggtgatcaagtcggagctggaccggctgcggaccatggtggagaagtcagagctgtgggtggacaagaagggcagtggcaagggtgaggaggtggaggcaggcgccgccaaggacaagaaagagcgtcccacggacgaggagggctttctgcacccaccaggggagaaaagcagtgagaactaccagatcgtcaagggcatcctggaaaggctgaacaagatgtgcggggttggggagcaaatgaggaagaagcagcaacggctgctgaagaacatggatgcccacaaggtcatgctggacctgctgcagatcccctatgacaagggtgatgccaagatgatggagatcctgcgctacacgcaccagttcctgcagaagttctgtgcagggaaccccggcaaccaggccctgctgcacaaacacctgcacctcttcctcacgccagggctcctggaggcagagaccatgcagcacatcttcctgaacaactatcagctctgctccgagatcagcgagcctgtgttgcagcacttcgtgcacctgctggccacgcacgggcgccatgtgcagtacctggacttcctgcacaccgtcattaaggccgagggcaagtacgtcaagaagtgccaggacatgatcatgactgagctgaccaatgcaggtgacgatgtggtcgtgttctacaatgataaggcatcgctggcccacctgctggacatgatgaaggccgcccgcgacggcgtggaggaccacagccccctcatgtaccacatttccctggtggacctgctggccgcctgtgccgagggcaaaaacgtctacactgagatcaagtgcacctccctgctgccgctggaggacgtggtgtctgtggtgacgcatgaggactgcatcactgaggtgaaaatggcctatgtgaacttcgtgaaccactgctacgtggacacggaggtggagatgaaggagatctacaccagcaaccacatctggacgctctttgagaacttcaccctggacatggctcgggtctgcagcaagcgtgagaagcgcgtggctgaccccaccttggagaagtacgtgctgagcgttgtgctggacaccatcaacgccttcttcagctccccattctctgagaacagcacttccctgcagacacaccagacgattgtggtgcagctgctgcagtctaccacacgcctcctcgagtgtccgtggctacagcagcagcacaagggctccgtggaggcctgcatccggaccctcgccatggtggccaagggccgggccatcttgctgcccatggacctggatgcccacatcagctcgatgctcagcagtggagccagctgtgcagctgccgcccagcggaacgcctccagctacaaggcaaccacgcgggccttcccccgcgtcacccccaccgccaaccagtgggactacaagaacatcattgagaagctgcaggacatcatcacagccctggaggagcggctgaagcccctggtacaggctgagctgtccgtgctggtggatgtcctgcactggcctgagctgctcttcctggagggcagtgaggcctaccagcgctgcgagagtgggggcttcctgtccaagctgatccagcacaccaaggacctcatggagtcggaggagaagctgtgcatcaaggtgctgcggaccctgcagcagatgctgctcaagaagaccaagtacggggaccggggcaaccagctgcgcaagatgctgctgcaaaactacctccagaaccggaagtccacctcgcggggggaccttcccgaccccataggcactggcctggacccagactggtcggcaatcgcagccacccagtgccggctggacaaggagggggccaccaagttggtatgcgacctcatcaccagcaccaagaacgagaagatcttccaggagagcatcggcctggccatccacctgctggatggtggcaacacagagatccagaaatccttccacaacctgatgatgagtgacaagaagtcagagcgcttcttcaaggtgctgcacgaccgcatgaagcgggcccagcaggagaccaagtccacggtggcagtcaacatgaatgacctgggcagccagccacatgaggaccgcgagccagtcgaccccaccaccaaaggccgcgtggcctccttctcgatacctggctcctcatcccgctactcgctgggccccagcctgcgccgggggcacgaggtgagcgaacgtgtgcagagcagtgagatgggcacatccgtgctcatcatgcagcccatcctgcgctttctgcagctgctgtgtgagaaccacaaccgggacctgcagaacttcctgcgctgtcagaacaacaaaaccaactacaacttggtatgcgagacgctgcagttcctggacatcatgtgcggcagcaccacgggcggcctggggctgctggggctctacatcaatgaggacaacgtgggcctcgtcatccagaccttggagaccctcactgagtactgccagggcccctgccatgagaaccagacttgcattgtgactcacgagtccaatggcatagacatcatcaccgcactgatcctcaatgacatcagccccctgtgcaagtaccgcatggatctggtgctgcagctcaaggacaatgcctccaagctgctcctggctctgatggagagccggcatgacagtgaaaatgctgagcgaatcctcatcagcctgcggccccaggagctggtggacgtcatcaagaaggcctacctgcaggaggaagagcgtgagaactcggaggtgagcccacgtgaagtgggccataacatctatatcctggcgctgcagctctccaggcacaataaacagctgcagcacctgctgaagccggtgaagcgcattcaagaggaggaggccgagggtatctcttccatgctcagcctcaacaacaagcagctgtcacagatgctcaagtcctcagcgccagcacaggaggaggaggaagaccccctggcctactatgagaaccacacgtcccagatcgagattgtgcggcaggaccgcagcatggagcagatcgtgttcccagtgcccggcatctgccagttcctgacggaggaaaccaagcaccggctcttcaccactactgagcaggacgagcagggcagcaaagtgagcgacttcttcgaccagtcctccttcctgcacaacgagatggagtggcagcgcaagctccgcagcatgccgctgatctactggttctcccgccgcatgaccctgtggggcagcatctccttcaacctggccgtgtttatcaacatcatcattgccttcttctacccttacatggagggcgcgtccacaggcgtgctggactcccctctcatctcattgctcttctggatcctcatctgcttctccatcgcggccctgttcaccaagcgctacagcatccgccccctcatcgtggcgctcatcctgcgctccatctactatctgggcatcgggcccacactcaacatcctgggtgccctcaatctgaccaacaagatcgtgtttgtggtgagcttcgtgggcaaccgtggcaccttcatccggggctataaggccatggtcatggacatggaattcctctaccacgtgggctacatcctgaccagtgtcctgggcctctttgctcatgagctgttctacagcatcctgctctttgacctcatctaccgcgaggagacgctgttcaacgtcatcaagagtgtgacccgcaatggccgctccatcctgctgacagccctgctggccctcatcctggtctacctcttctccatcgtcggcttcctcttcctcaaggatgacttcattctcgaggtcgaccggctgcccaacaaccactccacagccagccccctggggatgccacatggagctgctgcatttgtggacacctgcagtggggacaagatggactgtgtctcagggctctcggtgcctgaggtcctggaagaggacagggagctggacagcacagagcgggcctgtgacactctgttgatgtgcatcgtcactgtcatgaaccatgggctacgcaacggtggtggcgtgggcgacattctccgcaagccctccaaagatgagtctctcttcccagcccgagtggtctatgacctcctgttcttcttcatcgtcatcatcattgtgctgaacctcatctttggggtaatcatcgacaccttcgctgacctgcgtagtgagaagcagaagaaggaggagattcttaagacgacatgcttcatctgtggtctggagagggacaagtttgataacaagacagtgtcatttgaggaacacatcaagctggagcacaacatgtggaactacttgtacttcattgtgctggtccgcgtgaagaacaagaccgactacacgggccctgagagctacgtggcccagatgatcaagaacaagaacctggactggttcccccggatgcgggccatgtcccttgtcagcaatgagggcgagggggagcagaatgagattcggattctccaggacaagctcaactccaccatgaagctggtgtcccacctcactgcccagctcaacgagctcaaggagcagatgacggagcagcggaaacgcaggcaacgcctaggctttgtggatgtccagaactgcattagccgctgaggagagccaccgaaggccccaacaggggatgctcatcactggagactgcgactgggaagaacactgccccctccctcgggttgggtggcccagccagctggccagcctccactcccactctgccagacaccctgacacccacccaggctttgaagagcatggagggggagcctcagagctgacagtcctgcttagagcccttaaaaagacttgaaagttcactgggactcagtttaccttaatgccttagcagaagataaatcctacctagagacctttgttccttaaagcaataactgacaactctttgtagtcctccttgtgggtagttaagagtggggtcacccctttaactccaagcactacattttggcggctgccggcctctgggggaggtggcagttatgctgttactagtgattttagggctttgttatttaacttatttcaagggtgctgtgctcagccctgcccatggctgtgcagctccctccgtgcctcagatctgctgtagccagtgcagacctcactgtcgtgtccatgccacccccggcatggctccaggtggcctggtgactccatgatggacgatcttgctcccaggacctgcctcttcccaggcttcctggggaagagttgtacgcccaggcaacaagggctgagctgcgcttgcgtggctgtttcatgaccgcttgtttttctccttttggtgtaatgttttacaaatcctttggcctgagaactaatatgttaattgccttaaataaattaatagaaatctagtccgttaaaaaaaaaa

SEQ ID NO: 313425 - DNA, 10112 bp, Homo sapiens
  misc_feature (4504)..(4504): n is a, c, g, or t
ttatttatttatttatttatttttttgtctatttgttgtgtaggggctatttcttgggctaatgcaagggcagggaccgaacccgcaacctcatggttcctagtcggattcgttaaccactgcgccacgacaggaactcccctgtgtctgacagttttaaagaaagcttttaagtggtgactcgacatcccgaggtgttgcggtcctattatcgcaatgggcactctatcttaggcgttcaaataaaggactaggaagcaaacacccaagcaccggggaacagaacagaaagaaagacggaaggagccaagagttttggagccaactcctggagagggagcggctgaactgattcggaagttggatctctttgtacacaggaatgcggagagaaaaaaaacaaaacccaccccattgcttcatttcccctccaagcctgagcactttctattgtgcaatgaaaaggcttttcacgttgagaaaaatgaatcccgaatttgctctgcaaagggatgagcgcgcctctgggcgccagcctgctctcagctgggcgcggagaccgcgcggtggccgcagggcggccgcggccagggcgctccagggcgcgccctccgcgagcggctccggggtgacgcccgccggagagctggactcccccttccgcgggcgcctgcactggctcttagccagccgagggcccgggtgcagatagtccgggaaccccgagggcggagagctccccactacgcctgggcctcccagggatggcagctccgagagccccctagacccggtgccttgcaggacgcctctggagatcaggagggctggcggcgcattcggcgtccgggaggccgggccccggacgcgcgaggagcgcggggcgcgggaaggcaggcgggtgcacatgggtgccggcgggcgagctgcggggggagggggggcggggtgtggcctccccgcctcccgggcgggatttgcatgtgtgtggtggccccagacttcctgctccttctacgctgcaggtacgcgcgggccgggcggggcgggcgggcggcgggcgcgccaagacgtgggcacctcctcacccggaccccgggccccgccgagccgcctcctggctcccgtggccgccagcccgccccggccgcaccgagcgtcgggatccgaggtgggagcgtacccctccccgctccccggacgcctcagtcctccgcactgagcttggccacgcgcccctaggcgccccccacgccctgggccccggagggccgcagccatgagtgaaatgtccagctttcttcacatcggggacatcgtctccctgtacgccgagggctccgtcaatggcttcatcagcactttggggctggtggatgaccgctgtgtggtggagcccgcggccggggacctggacaacccccctaagaagttccgtgactgcctcttcaaggtgtgccccatgaaccgctactcggcccagaagcagtactggaaggccaagcagactaagcaggacaaggagaagatcgctgatgtggtgttgctgcagaagctgcagcatgcggcgcagatggagcagaagcaaaatgacacggagaacaagaaggtgcatggggatgtcgtgaagtatggcagtgtgatccagctcctgcacatgaagagcaacaagtacctgacagtgaacaagcggcttccggccttgctggagaagaacgccatgcgggtgactctggatgccacaggcaacgagggttcctggctcttcatccagcccttctggaagctgcggagcaacggggacaacgtggtcgtgggggacaaggtgatcctgaatcctgtcaatgccgggcagcctctgcatgccagcaattacgagctcagcgacaacgccggctgcaaggaggtcaattctgtgaactgcaacaccagctggaagatcaacctgtttatgcagtttcgggaccacctggaggaggtgttgaaagggggagacgtggtgcggctgttccatgcggagcaggagaagttcctgacgtgtgacgagtacaagggcaagctgcaggtgttcctgcgaactacactgcgccagtctgccacctcggccaccagctccaatgctctctgggaggtggaggtggtccaccacgacccctgccgtggaggagctgggcactggaatggcttgtaccgcttcaagcacctggctacaggcaactacctggctgctgaggagaaccccagttacaaaggtgatgcctcagatcccaaggcagcaggaatgggggcacagggccgcacaggccgcaggaatgctggggagaagatcaagtactgcctggtggctgtgcctcatggcaatgacatcgcctctctctttgagctggaccccaccaccttgcagaaaaccgactctttcgtgccccggaactcgtacgtccggctgcggcacctctgcaccaacacgtggattcagagcaccaatgtgcccattgacatcgaggaggagcggcccatccggctcatgctgggcacctgccccaccaaggaggacaaggaggcctttgccatcgtgtcagtgcccgtgtctgagatccgagacctggactttgccaatgacgccagctccatgctggccagtgccgtggagaaactcaacgagggcttcatcagccagaatgaccgcaggtttgtcatccagctgctggaagacctggtgttctttgtcagcgatgtccccaacaatgggcagaatgtcctggacatcatggtcactaagcccaaccgggaacggcagaagctgatgagggagcagaacatcctcaaacaggtctttggcattctgaaggccccgttccgtgagaaggggggtgaaggtcccctggtgcggctggaggagctgtcagaccagaagaacgccccctaccagcacatgttccgcctgtgctaccgcgtgttgcggcattcccaggaggactaccgcaagaaccaggagcacattgccaagcagtttgggatgatgcagtcccagattggctacgacatcctggccgaggacaccatcactgccctgctgcacaacaaccgcaagctcctggaaaagcacatcaccaagaccgaggtggagaccttcgtcagccttgtgcgcaagaaccgggagcccaggttcctggactacctctctgacctgtgtgtgtccaaccacatcgccatccccgtcacccaagagctcatctgcaagtgtgtgctggaccccaagaacagtgacattctcatccggaccgagttgctggtggtctgcaggcttcggcccgtgaaggagatggcccaatcccacgagtacctgagcatcgagtactcagaagaggaagtgtggctcacgtggactgacaagaataacgagcatcatgagaagagtgtgaggcagctggcccaggaggcgcgggccggcaacgcccacgacgagaatgtgctcagctactacaggtaccagctgaagctctttgcccgcatgtgcttggaccgccagtacttggccatcgacgagatctcccagcagctgggcgtggacctgattttcctgtgcatggcagacgagatgctgccctttgacctgcgcgcctccttctgccacctgatgctgcacgtgcacgtggaccgtgacccccaggagctggtcacgccggtcaagtttgcccgtctctggactgagatccccacagccatcaccatcaaggactatgattccaacctcaacgcgtcccgagatgacaagaagaacaagtttgccaacaccatggagttcgtggaggactacctcaacaatgtagtcagcgaggccgtgccctttgccaacgaggagaagaacaagctcacttttgaggtggtcagcctggcgcacaatctcatctacttcggcttctacagcttcagcgagctgctgcggctcactcgcacactgctgggcatcatcgactgtgtgcaggggcccccggccatgctgcaggcctatgaggaccccggtggcaagaatgtgcggcggtccatccagggcgtggggcacatgatgtccaccatggtgctgagccgcaagcagtccgtcttcagtgcccccagcctgtctgctggggccagtgctgctgagccgctggacagaagcaagtttgaggagaatgaggacattgtggtgatggagaccaagctgaagatcctggaaatccttcagttcatcctcaacgtccgcctggattaccgcatatcctacctgctgtctgtcttcaagaaggagtttgtggaggtgtttcccatgcaggacagtggggctgatggcacagcccctgccttcgactctaccactgccaacatgaacctggatcgcatcggggagcaggcggaggccatgtttggagtggggaagacaagcagcatgctggaggtggatgacgagggcggccgcatgttcctgcgcgtgctcatccacctcaccatgcacgactatgcgccnctggtctcgggtgccctgcagctgctcttcaagcacttcagccagcgccaggaggccatgcacaccttcaagcaggttcagctgctgatctcagcgcaggacgtggagaactacaaggtgatcaagtcggagctggaccggctgcggaccatggtggagaagtcagagctgtgggtggacaagaagggcagtggcaagggtgaggaggtggaggcaggcgccgccaaggacaagaaagagcgtcccacggacgaggagggctttctgcacccaccaggggagaaaagcagtgagaactaccagatcgtcaagggcatcctggaaaggctgaacaagatgtgcggggttggggagcaaatgaggaagaagcagcaacggctgctgaagaacatggatgcccacaaggtcatgctggacctgctgcagatcccctatgacaagggtgatgccaagatgatggagatcctgcgctacacgcaccagttcctgcagaagttctgtgcagggaaccccggcaaccaggccctgctgcacaaacacctgcacctcttcctcacgccagggctcctggaggcagagaccatgcagcacatcttcctgaacaactatcagctctgctccgagatcagcgagcctgtgttgcagcacttcgtgcacctgctggccacgcacgggcgccatgtgcagtacctggacttcctgcacaccgtcattaaggccgagggcaagtacgtcaagaagtgccaggacatgatcatgactgagctgaccaatgcaggtgacgatgtggtcgtgttctacaatgataaggcatcgctggcccacctgctggacatgatgaaggccgcccgcgacggcgtggaggaccacagccccctcatgtaccacatttccctggtggacctgctggccgcctgtgccgagggcaaaaacgtctacactgagatcaagtgcacctccctgctgccgctggaggacgtggtgtctgtggtgacgcatgaggactgcatcactgaggtgaaaatggcctatgtgaacttcgtgaaccactgctacgtggacacggaggtggagatgaaggagatctacaccagcaaccacatctggacgctctttgagaacttcaccctggacatggctcgggtctgcagcaagcgtgagaagcgcgtggctgaccccaccttggagaagtacgtgctgagcgttgtgctggacaccatcaacgccttcttcagctccccattctctgagaacagcacttccctgcagacacaccagacgattgtggtgcagctgctgcagtctaccacacgcctcctcgagtgtccgtggctacagcagcagcacaagggctccgtggaggcctgcatccggaccctcgccatggtggccaagggccgggccatcttgctgcccatggacctggatgcccacatcagctcgatgctcagcagtggagccagctgtgcagctgccgcccagcggaacgcctccagctacaaggcaaccacgcgggccttcccccgcgtcacccccaccgccaaccagtgggactacaagaacatcattgagaagctgcaggacatcatcacagccctggaggagcggctgaagcccctggtacaggctgagctgtccgtgctggtggatgtcctgcactggcctgagctgctcttcctggagggcagtgaggcctaccagcgctgcgagagtgggggcttcctgtccaagctgatccagcacaccaaggacctcatggagtcggaggagaagctgtgcatcaaggtgctgcggaccctgcagcagatgctgctcaagaagaccaagtacggggaccggggcaaccagctgcgcaagatgctgctgcaaaactacctccagaaccggaagtccacctcgcggggggaccttcccgaccccataggcactggcctggacccagactggtcggcaatcgcagccacccagtgccggctggacaaggagggggccaccaagttggtatgcgacctcatcaccagcaccaagaacgagaagatcttccaggagagcatcggcctggccatccacctgctggatggtggcaacacagagatccagaaatccttccacaacctgatgatgagtgacaagaagtcagagcgcttcttcaaggtgctgcacgaccgcatgaagcgggcccagcaggagaccaagtccacggtggcagtcaacatgaatgacctgggcagccagccacatgaggaccgcgagccagtcgaccccaccaccaaaggccgcgtggcctccttctcgatacctggctcctcatcccgctactcgctgggccccagcctgcgccgggggcacgaggtgagcgaacgtgtgcagagcagtgagatgggcacatccgtgctcatcatgcagcccatcctgcgctttctgcagctgctgtgtgagaaccacaaccgggacctgcagaacttcctgcgctgtcagaacaacaaaaccaactacaacttggtatgcgagacgctgcagttcctggacatcatgtgcggcagcaccacgggcggcctggggctgctggggctctacatcaatgaggacaacgtgggcctcgtcatccagaccttggagaccctcactgagtactgccagggcccctgccatgagaaccagacttgcattgtgactcacgagtccaatggcatagacatcatcaccgcactgatcctcaatgacatcagccccctgtgcaagtaccgcatggatctggtgctgcagctcaaggacaatgcctccaagctgctcctggctctgatggagagccggcatgacagtgaaaatgctgagcgaatcctcatcagcctgcggccccaggagctggtggacgtcatcaagaaggcctacctgcaggaggaagagcgtgagaactcggaggtgagcccacgtgaagtgggccataacatctatatcctggcgctgcagctctccaggcacaataaacagctgcagcacctgctgaagccggtgaagcgcattcaagaggaggaggccgagggtatctcttccatgctcagcctcaacaacaagcagctgtcacagatgctcaagtcctcagcgccagcacaggaggaggaggaagaccccctggcctactatgagaaccacacgtcccagatcgagattgtgcggcaggaccgcagcatggagcagatcgtgttcccagtgcccggcatctgccagttcctgacggaggaaaccaagcaccggctcttcaccactactgagcaggacgagcagggcagcaaagtgagcgacttcttcgaccagtcctccttcctgcacaacgagatggagtggcagcgcaagctccgcagcatgccgctgatctactggttctcccgccgcatgaccctgtggggcagcatctccttcaacctggccgtgtttatcaacatcatcattgccttcttctacccttacatggagggcgcgtccacaggcgtgctggactcccctctcatctcattgctcttctggatcctcatctgcttctccatcgcggccctgttcaccaagcgctacagcatccgccccctcatcgtggcgctcatcctgcgctccatctactatctgggcatcgggcccacactcaacatcctgggtgccctcaatctgaccaacaagatcgtgtttgtggtgagcttcgtgggcaaccgtggcaccttcatccggggctataaggccatggtcatggacatggaattcctctaccacgtgggctacatcctgaccagtgtcctgggcctctttgctcatgagctgttctacagcatcctgctctttgacctcatctaccgcgaggagacgctgttcaacgtcatcaagagtgtgacccgcaatggccgctccatcctgctgacagccctgctggccctcatcctggtctacctcttctccatcgtcggcttcctcttcctcaaggatgacttcattctcgaggtcgaccggctgcccaacaaccactccacagccagccccctggggatgccacatggagctgctgcatttgtggacacctgcagtggggacaagatggactgtgtctcagggctctcggtgcctgaggtcctggaagaggacagggagctggacagcacagagcgggcctgtgacactctgttgatgtgcatcgtcactgtcatgaaccatgggctacgcaacggtggtggcgtgggcgacattctccgcaagccctccaaagatgagtctctcttcccagcccgagtggtctatgacctcctgttcttcttcatcgtcatcatcattgtgctgaacctcatctttggggtaatcatcgacaccttcgctgacctgcgtagtgagaagcagaagaaggaggagattcttaagacgacatgcttcatctgtggtctggagagggacaagtttgataacaagacagtgtcatttgaggaacacatcaagctggagcacaacatgtggaactacttgtacttcattgtgctggtccgcgtgaagaacaagaccgactacacgggccctgagagctacgtggcccagatgatcaagaacaagaacctggactggttcccccggatgcgggccatgtcccttgtcagcaatgagggcgagggggagcagaatgagattcggattctccaggacaagctcaactccaccatgaagctggtgtcccacctcactgcccagctcaacgagctcaaggagcagatgacggagcagcggaaacgcaggcaacgcctaggctttgtggatgtccagaactgcattagccgctgaggagagccaccgaaggccccaacaggggatgctcatcactggagactgcgactgggaagaacactgccccctccctcgggttgggtggcccagccagctggccagcctccactcccactctgccagacaccctgacacccacccaggctttgaagagcatggagggggagcctcagagctgacagtcctgcttagagcccttaaaaagacttgaaagttcactgggactcagtttaccttaatgccttagcagaagataaatcctacctagagacctttgttccttaaagcaataactgacaactctttgtagtcctccttgtgggtagttaagagtggggtcacccctttaactccaagcactacattttggcggctgccggcctctgggggaggtggcagttatgctgttactagtgattttagggctttgttatttaacttatttcaagggtgctgtgctcagccctgcccatggctgtgcagctccctccgtgcctcagatctgctgtagccagtgcagacctcactgtcgtgtccatgccacccccggcatggctccaggtggcctggtgactccatgatggacgatcttgctcccaggacctgcctcttcccaggcttcctggggaagagttgtacgcccaggcaacaagggctgagctgcgcttgcgtggctgtttcatgaccgcttgtttttctccttttggtgtaatgttttacaaatcctttggcctgagaactaatatgttaattgccttaaataaattaatagaaatctagtccgttaaaaaaaaaa

SEQ ID NO: 313426 - DNA, 7818 bp, Homo sapiens
  misc_feature (2210)..(2210): n is a, c, g, or t
tacgcataggagccagtatgaaatgatctgctgcgtgtctgagacctaggattcatcttctttaactcgtagtttaccacgcaaactctttgccgacttggagactggacccaccgaccttgactagaaaaccgactctttctgtgccccggaactcgtacgtccggctgcggcacctctgcaccaacacgtggattcagagcaccaatgtgcccattgacatcgaggaggagcggcccatccggctcatgctgggcacctgccccaccaaggaggacaaggaggcctttgccatcgtgtcagtgcccgtgtctgagatccgagacctggactttgccaatgacgccagctccatgctggccagtgccgtggagaaactcaacgagggcttcatcagccagaatgaccgcaggtttgtcatccagctgctggaagacctggtgttctttgtcagcgatgtccccaacaatgggcagaatgtcctggacatcatggtcactaagcccaaccgggaacggcagaagctgatgagggagcagaacatcctcaaacaggtctttggcattctgaaggccccgttccgtgagaaggggggtgaaggtcccctggtgcggctggaggagctgtcagaccagaagaacgccccctaccagcacatgttccgcctgtgctaccgcgtgttgcggcattcccaggaggactaccgcaagaaccaggagcacattgccaagcagtttgggatgatgcagtcccagattggctacgacatcctggccgaggacaccatcactgccctgctgcacaacaaccgcaagctcctggaaaagcacatcaccaagaccgaggtggagaccttcgtcagccttgtgcgcaagaaccgggagcccaggttcctggactacctctctgacctgtgtgtgtccaaccacatcgccatccccgtcacccaagagctcatctgcaagtgtgtgctggaccccaagaacagtgacattctcatccggaccgagcttcggcccgtgaaggagatggcccaatcccacgagtacctgagcatcgagtactcagaagaggaagtgtggctcacgtggactgacaagaataacgagcatcatgagaagagtgtgaggcagctggcccaggaggcgcgggccggcaacgcccacgacgagaatgtgctcagctactacaggtaccagctgaagctctttgcccgcatgtgcttggaccgccagtacttggccatcgacgagatctcccagcagctgggcgtggacctgattttcctgtgcatggcagacgagatgctgccctttgacctgcgcgcctccttctgccacctgatgctgcacgtgcacgtggaccgtgacccccaggagctggtcacgccggtcaagtttgcccgtctctggactgagatccccacagccatcaccatcaaggactatgattccaacctcaacgcgtcccgagatgacaagaagaacaagtttgccaacaccatggagttcgtggaggactacctcaacaatgtagtcagcgaggccgtgccctttgccaacgaggagaagaacaagctcacttttgaggtggtcagcctggcgcacaatctcatctacttcggcttctacagcttcagcgagctgctgcggctcactcgcacactgctgggcatcatcgactgtgtgcaggggcccccggccatgctgcaggcctatgaggaccccggtggcaagaatgtgcggcggtccatccagggcgtggggcacatgatgtccaccatggtgctgagccgcaagcagtccgtcttcagtgcccccagcctgtctgctggggccagtgctgctgagccgctggacagaagcaagtttgaggagaatgaggacattgtggtgatggagaccaagctgaagatcctggaaatccttcagttcatcctcaacgtccgcctggattaccgcatatcctacctgctgtctgtcttcaagaaggagtttgtggaggtgtttcccatgcaggacagtggggctgatggcacagcccctgccttcgactctaccactgccaacatgaacctggatcgcatcggggagcaggcggaggccatgtttggagtggggaagacaagcagcatgctggaggtggatgacgagggcggccgcatgttcctgcgcgtgctcatccacctcaccatgcacgactatgcgccnctggtctcgggtgccctgcagctgctcttcaagcacttcagccagcgccaggaggccatgcacaccttcaagcaggttcagctgctgatctcagcgcaggacgtggagaactacaaggtgatcaagtcggagctggaccggctgcggaccatggtggagaagtcagagctgtgggtggacaagaagggcagtggcaagggtgaggaggtggaggcaggcgccgccaaggacaagaaagagcgtcccacggacgaggagggctttctgcacccaccaggggagaaaagcagtgagaactaccagatcgtcaagggcatcctggaaaggctgaacaagatgtgcggggttggggagcaaatgaggaagaagcagcaacggctgctgaagaacatggatgcccacaaggtcatgctggacctgctgcagatcccctatgacaagggtgatgccaagatgatggagatcctgcgctacacgcaccagttcctgcagaagttctgtgcagggaaccccggcaaccaggccctgctgcacaaacacctgcacctcttcctcacgccagggctcctggaggcagagaccatgcagcacatcttcctgaacaactatcagctctgctccgagatcagcgagcctgtgttgcagcacttcgtgcacctgctggccacgcacgggcgccatgtgcagtacctggacttcctgcacaccgtcattaaggccgagggcaagtacgtcaagaagtgccaggacatgatcatgactgagctgaccaatgcaggtgacgatgtggtcgtgttctacaatgataaggcatcgctggcccacctgctggacatgatgaaggccgcccgcgacggcgtggaggaccacagccccctcatgtaccacatttccctggtggacctgctggccgcctgtgccgagggcaaaaacgtctacactgagatcaagtgcacctccctgctgccgctggaggacgtggtgtctgtggtgacgcatgaggactgcatcactgaggtgaaaatggcctatgtgaacttcgtgaaccactgctacgtggacacggaggtggagatgaaggagatctacaccagcaaccacatctggacgctctttgagaacttcaccctggacatggctcgggtctgcagcaagcgtgagaagcgcgtggctgaccccaccttggagaagtacgtgctgagcgttgtgctggacaccatcaacgccttcttcagctccccattctctgagaacagcacttccctgcagacacaccagacgattgtggtgcagctgctgcagtctaccacacgcctcctcgagtgtccgtggctacagcagcagcacaagggctccgtggaggcctgcatccggaccctcgccatggtggccaagggccgggccatcttgctgcccatggacctggatgcccacatcagctcgatgctcagcagtggagccagctgtgcagctgccgcccagcggaacgcctccagctacaaggcaaccacgcgggccttcccccgcgtcacccccaccgccaaccagtgggactacaagaacatcattgagaagctgcaggacatcatcacagccctggaggagcggctgaagcccctggtacaggctgagctgtccgtgctggtggatgtcctgcactggcctgagctgctcttcctggagggcagtgaggcctaccagcgctgcgagagtgggggcttcctgtccaagctgatccagcacaccaaggacctcatggagtcggaggagaagctgtgcatcaaggtgctgcggaccctgcagcagatgctgctcaagaagaccaagtacggggaccggggcaaccagctgcgcaagatgctgctgcaaaactacctccagaaccggaagtccacctcgcggggggaccttcccgaccccataggcactggcctggacccagactggtcggcaatcgcagccacccagtgccggctggacaaggagggggccaccaagttggtatgcgacctcatcaccagcaccaagaacgagaagatcttccaggagagcatcggcctggccatccacctgctggatggtggcaacacagagatccagaaatccttccacaacctgatgatgagtgacaagaagtcagagcgcttcttcaaggtgctgcacgaccgcatgaagcgggcccagcaggagaccaagtccacggtggcagtcaacatgaatgacctgggcagccagccacatgaggaccgcgagccagtcgaccccaccaccaaaggccgcgtggcctccttctcgatacctggctcctcatcccgctactcgctgggccccagcctgcgccgggggcacgaggtgagcgaacgtgtgcagagcagtgagatgggcacatccgtgctcatcatgcagcccatcctgcgctttctgcagctgctgtgtgagaaccacaaccgggacctgcagaacttcctgcgctgtcagaacaacaaaaccaactacaacttggtatgcgagacgctgcagttcctggacatcatgtgcggcagcaccacgggcggcctggggctgctggggctctacatcaatgaggacaacgtgggcctcgtcatccagaccttggagaccctcactgagtactgccagggcccctgccatgagaaccagacttgcattgtgactcacgagtccaatggcatagacatcatcaccgcactgatcctcaatgacatcagccccctgtgcaagtaccgcatggatctggtgctgcagctcaaggacaatgcctccaagctgctcctggctctgatggagagccggcatgacagtgaaaatgctgagcgaatcctcatcagcctgcggccccaggagctggtggacgtcatcaagaaggcctacctgcaggaggaagagcgtgagaactcggaggtgagcccacgtgaagtgggccataacatctatatcctggcgctgcagctctccaggcacaataaacagctgcagcacctgctgaagccggtgaagcgcattcaagaggaggaggccgagggtatctcttccatgctcagcctcaacaacaagcagctgtcacagatgctcaagtcctcagcgccagcacaggaggaggaggaagaccccctggcctactatgagaaccacacgtcccagatcgagattgtgcggcaggaccgcagcatggagcagatcgtgttcccagtgcccggcatctgccagttcctgacggaggaaaccaagcaccggctcttcaccactactgagcaggacgagcagggcagcaaagtgagcgacttcttcgaccagtcctccttcctgcacaacgagatggagtggcagcgcaagctccgcagcatgccgctgatctactggttctcccgccgcatgaccctgtggggcagcatctccttcaacctggccgtgtttatcaacatcatcattgccttcttctacccttacatggagggcgcgtccacaggcgtgctggactcccctctcatctcattgctcttctggatcctcatctgcttctccatcgcggccctgttcaccaagcgctacagcatccgccccctcatcgtggcgctcatcctgcgctccatctactatctgggcatcgggcccacactcaacatcctgggtgccctcaatctgaccaacaagatcgtgtttgtggtgagcttcgtgggcaaccgtggcaccttcatccggggctataaggccatggtcatggacatggaattcctctaccacgtgggctacatcctgaccagtgtcctgggcctctttgctcatgagctgttctacagcatcctgctctttgacctcatctaccgcgaggagacgctgttcaacgtcatcaagagtgtgacccgcaatggccgctccatcctgctgacagccctgctggccctcatcctggtctacctcttctccatcgtcggcttcctcttcctcaaggatgacttcattctcgaggtcgaccggctgcccaacaaccactccacagccagccccctggggatgccacatggagctgctgcatttgtggacacctgcagtggggacaagatggactgtgtctcagggctctcggtgcctgaggtcctggaagaggacagggagctggacagcacagagcgggcctgtgacactctgttgatgtgcatcgtcactgtcatgaaccatgggctacgcaacggtggtggcgtgggcgacattctccgcaagccctccaaagatgagtctctcttcccagcccgagtggtctatgacctcctgttcttcttcatcgtcatcatcattgtgctgaacctcatctttggggtaatcatcgacaccttcgctgacctgcgtagtgagaagcagaagaaggaggagattcttaagacgacatgcttcatctgtggtctggagagggacaagtttgataacaagacagtgtcatttgaggaacacatcaagctggagcacaacatgtggaactacttgtacttcattgtgctggtccgcgtgaagaacaagaccgactacacgggccctgagagctacgtggcccagatgatcaagaacaagaacctggactggttcccccggatgcgggccatgtcccttgtcagcaatgagggcgagggggagcagaatgagattcggattctccaggacaagctcaactccaccatgaagctggtgtcccacctcactgcccagctcaacgagctcaaggagcagatgacggagcagcggaaacgcaggcaacgcctaggctttgtggatgtccagaactgcattagccgctgaggagagccaccgaaggccccaacaggggatgctcatcactggagactgcgactgggaagaacactgccccctccctcgggttgggtggcccagccagctggccagcctccactcccactctgccagacaccctgacacccacccaggctttgaagagcatggagggggagcctcagagctgacagtcctgcttagagcccttaaaaagacttgaaagttcactgggactcagtttaccttaatgccttagcagaagataaatcctacctagagacctttgttccttaaagcaataactgacaactctttgtagtcctccttgtgggtagttaagagtggggtcacccctttaactccaagcactacattttggcggctgccggcctctgggggaggtggcagttatgctgttactagtgattttagggctttgttatttaacttatttcaagggtgctgtgctcagccctgcccatggctgtgcagctccctccgtgcctcagatctgctgtagccagtgcagacctcactgtcgtgtccatgccacccccggcatggctccaggtggcctggtgactccatgatggacgatcttgctcccaggacctgcctcttcccaggcttcctggggaagagttgtacgcccaggcaacaagggctgagctgcgcttgcgtggctgtttcatgaccgcttgtttttctccttttggtgtaatgttttacaaatcctttggcctgagaactaatatgttaattgccttaaataaattaatagaaatctagtccgttaaaaaaaaaa

SEQ ID NO: 313427 - DNA, 10165 bp, Homo sapiens
  misc_feature (4486)..(4486): n is a, c, g, or t
ttatttatttatttatttatttttttgtctatttgttgtgtaggggctatttcttgggctaatgcaagggcagggaccgaacccgcaacctcatggttcctagtcggattcgttaaccactgcgccacgacaggaactcccctgtgtctgacagttttaaagaaagcttttaagtggtgactcgacatcccgaggtgttgcggtcctattatcgcaatgggcactctatcttaggcgttcaaataaaggactaggaagcaaacacccaagcaccggggaacagaacagaaagaaagacggaaggagccaagagttttggagccaactcctggagagggagcggctgaactgattcggaagttggatctctttgtacacaggaatgcggagagaaaaaaaacaaaacccaccccattgcttcatttcccctccaagcctgagcactttctattgtgcaatgaaaaggcttttcacgttgagaaaaatgaatcccgaatttgctctgcaaagggatgagcgcgcctctgggcgccagcctgctctcagctgggcgcggagaccgcgcggtggccgcagggcggccgcggccagggcgctccagggcgcgccctccgcgagcggctccggggtgacgcccgccggagagctggactcccccttccgcgggcgcctgcactggctcttagccagccgagggcccgggtgcagatagtccgggaaccccgagggcggagagctccccactacgcctgggcctcccagggatggcagctccgagagccccctagacccggtgccttgcaggacgcctctggagatcaggagggctggcggcgcattcggcgtccgggaggccgggccccggacgcgcgaggagcgcggggcgcgggaaggcaggcgggtgcacatgggtgccggcgggcgagctgcggggggagggggggcggggtgtggcctccccgcctcccgggcgggatttgcatgtgtgtggtggccccagacttcctgctccttctacgctgcaggtacgcgcgggccgggcggggcgggcgggcggcgggcgcgccaagacgtgggcacctcctcacccggaccccgggccccgccgagccgcctcctggctcccgtggccgccagcccgccccggccgcaccgagcgtcgggatccgaggtgggagcgtacccctccccgctccccggacgcctcagtcctccgcactgagcttggccacgcgcccctaggcgccccccacgccctgggccccggagggccgcagccatgagtgaaatgtccagctttcttcacatcggggacatcgtctccctgtacgccgagggctccgtcaatggcttcatcagcactttggggctggtggatgaccgctgtgtggtggagcccgcggccggggacctggacaacccccctaagaagttccgtgactgcctcttcaaggtgtgccccatgaaccgctactcggcccagaagcagtactggaaggccaagcagactaagcaggacaaggagaagatcgctgatgtggtgttgctgcagaagctgcagcatgcggcgcagatggagcagaagcaaaatgacacggagaacaagaaggtgcatggggatgtcgtgaagtatggcagtgtgatccagctcctgcacatgaagagcaacaagtacctgacagtgaacaagcggcttccggccttgctggagaagaacgccatgcgggtgactctggatgccacaggcaacgagggttcctggctcttcatccagcccttctggaagctgcggagcaacggggacaacgtggtcgtgggggacaaggtgatcctgaatcctgtcaatgccgggcagcctctgcatgccagcaattacgagctcagcgacaacgccggctgcaaggaggtcaattctgtgaactgcaacaccagctggaagatcaacctgtttatgcagtttcgggaccacctggaggaggtgttgaaagggggagacgtggtgcggctgttccatgcggagcaggagaagttcctgacgtgtgacgagtacaagggcaagctgcaggtgttcctgcgaactacactgcgccagtctgccacctcggccaccagctccaatgctctctgggaggtggaggtggtccaccacgacccctgccgtggaggagctgggcactggaatggcttgtaccgcttcaagcacctggctacaggcaactacctggctgctgaggagaaccccagttacaaaggtgatgcctcagatcccaaggcagcaggaatgggggcacagggccgcacaggccgcaggaatgctggggagaagatcaagtactgcctggtggctgtgcctcatggcaatgacatcgcctctctctttgagctggaccccaccaccttgcagaaaaccgactctttcgtgccccggaactcgtacgtccggctgcggcacctctgcaccaacacgtggattcagagcaccaatgtgcccattgacatcgaggaggagcggcccatccggctcatgctgggcacctgccccaccaaggaggacaaggaggcctttgccatcgtgtcagtgcccgtgtctgagatccgagacctggactttgccaatgacgccagctccatgctggccagtgccgtggagaaactcaacgagggcttcatcagccagaatgaccgcaggtttgtcatccagctgctggaagacctggtgttctttgtcagcgatgtccccaacaatgggcagaatgtcctggacatcatggtcactaagcccaaccgggaacggcagaagctgatgagggagcagaacatcctcaaacaggtctttggcattctgaaggccccgttccgtgagaaggggggtgaaggtcccctggtgcggctggaggagctgtcagaccagaagaacgccccctaccagcacatgttccgcctgtgctaccgcgtgttgcggcattcccaggaggactaccgcaagaaccaggagcacattgccaagcagtttgggatgatgcagtcccagattggctacgacatcctggccgaggacaccatcactgccctgctgcacaacaaccgcaagctcctggaaaagcacatcaccaagaccgaggtggagaccttcgtcagccttgtgcgcaagaaccgggagcccaggttcctggactacctctctgacctgtgtgtgtccaaccacatcgccatccccgtcacccaagagctcatctgcaagtgtgtgctggaccccaagaacagtgacattctcatccggaccgagcttcggcccgtgaaggagatggcccaatcccacgagtacctgagcatcgagtactcagaagaggaagtgtggctcacgtggactgacaagaataacgagcatcatgagaagagtgtgaggcagctggcccaggaggcgcgggccggcaacgcccacgacgagaatgtgctcagctactacaggtaccagctgaagctctttgcccgcatgtgcttggaccgccagtacttggccatcgacgagatctcccagcagctgggcgtggacctgattttcctgtgcatggcagacgagatgctgccctttgacctgcgcgcctccttctgccacctgatgctgcacgtgcacgtggaccgtgacccccaggagctggtcacgccggtcaagtttgcccgtctctggactgagatccccacagccatcaccatcaaggactatgattccaacctcaacgcgtcccgagatgacaagaagaacaagtttgccaacaccatggagttcgtggaggactacctcaacaatgtagtcagcgaggccgtgccctttgccaacgaggagaagaacaagctcacttttgaggtggtcagcctggcgcacaatctcatctacttcggcttctacagcttcagcgagctgctgcggctcactcgcacactgctgggcatcatcgactgtgtgcaggggcccccggccatgctgcaggcctatgaggaccccggtggcaagaatgtgcggcggtccatccagggcgtggggcacatgatgtccaccatggtgctgagccgcaagcagtccgtcttcagtgcccccagcctgtctgctggggccagtgctgctgagccgctggacagaagcaagtttgaggagaatgaggacattgtggtgatggagaccaagctgaagatcctggaaatccttcagttcatcctcaacgtccgcctggattaccgcatatcctacctgctgtctgtcttcaagaaggagtttgtggaggtgtttcccatgcaggacagtggggctgatggcacagcccctgccttcgactctaccactgccaacatgaacctggatcgcatcggggagcaggcggaggccatgtttggagtggggaagacaagcagcatgctggaggtggatgacgagggcggccgcatgttcctgcgcgtgctcatccacctcaccatgcacgactatgcgccnctggtctcgggtgccctgcagctgctcttcaagcacttcagccagcgccaggaggccatgcacaccttcaagcaggttcagctgctgatctcagcgcaggacgtggagaactacaaggtgatcaagtcggagctggaccggctgcggaccatggtggagaagtcagagctgtgggtggacaagaagggcagtggcaagggtgaggaggtggaggcaggcgccgccaaggacaagaaagagcgtcccacggacgaggagggctttctgcacccaccaggggagaaaagcagtgagaactaccagatcgtcaagggcatcctggaaaggctgaacaagatgtgcggggttggggagcaaatgaggaagaagcagcaacggctgctgaagaacatggatgcccacaaggtcatgctggacctgctgcagatcccctatgacaagggtgatgccaagatgatggagatcctgcgctacacgcaccagttcctgcagaagttctgtgcagggaaccccggcaaccaggccctgctgcacaaacacctgcacctcttcctcacgccagggctcctggaggcagagaccatgcagcacatcttcctgaacaactatcagctctgctccgagatcagcgagcctgtgttgcagcacttcgtgcacctgctggccacgcacgggcgccatgtgcagtacctggacttcctgcacaccgtcattaaggccgagggcaagtacgtcaagaagtgccaggacatgatcatgactgagctgaccaatgcaggtgacgatgtggtcgtgttctacaatgataaggcatcgctggcccacctgctggacatgatgaaggccgcccgcgacggcgtggaggaccacagccccctcatgtaccacatttccctggtggacctgctggccgcctgtgccgagggcaaaaacgtctacactgagatcaagtgcacctccctgctgccgctggaggacgtggtgtctgtggtgacgcatgaggactgcatcactgaggtgaaaatggcctatgtgaacttcgtgaaccactgctacgtggacacggaggtggagatgaaggagatctacaccagcaaccacatctggacgctctttgagaacttcaccctggacatggctcgggtctgcagcaagcgtgagaagcgcgtggctgaccccaccttggagaagtacgtgctgagcgttgtgctggacaccatcaacgccttcttcagctccccattctctgagaacagcacttccctgcagacacaccagacgattgtggtgcagctgctgcagtctaccacacgcctcctcgagtgtccgtggctacagcagcagcacaagggctccgtggaggcctgcatccggaccctcgccatggtggccaagggccgggccatcttgctgcccatggacctggatgcccacatcagctcgatgctcagcagtggagccagctgtgcagctgccgcccagcggaacgcctccagctacaaggcaaccacgcgggccttcccccgcgtcacccccaccgccaaccagtgggactacaagaacatcattgagaagctgcaggacatcatcacagccctggaggagcggctgaagcccctggtacaggctgagctgtccgtgctggtggatgtcctgcactggcctgagctgctcttcctggagggcagtgaggcctaccagcgctgcgagagtgggggcttcctgtccaagctgatccagcacaccaaggacctcatggagtcggaggagaagctgtgcatcaaggtgctgcggaccctgcagcagatgctgctcaagaagaccaagtacggggaccggggcaaccagctgcgcaagatgctgctgcaaaactacctccagaaccggaagtccacctcgcggggggaccttcccgaccccataggcactggcctggacccagactggtcggcaatcgcagccacccagtgccggctggacaaggagggggccaccaagttggtatgcgacctcatcaccagcaccaagaacgagaagatcttccaggagagcatcggcctggccatccacctgctggatggtggcaacacagagatccagaaatccttccacaacctgatgatgagtgacaagaagtcagagcgcttcttcaaggtgctgcacgaccgcatgaagcgggcccagcaggagaccaagtccacggtggcagtcaacatgaatgacctgggcagccagccacatgaggaccgcgagccagtcgaccccaccaccaaaggccgcgtggcctccttctcgatacctggctcctcatcccgctactcgctgggccccagcctgcgccgggggcacgaggtgagcgaacgtgtgcagagcagtgagatgggcacatccgtgctcatcatgcagcccatcctgcgctttctgcagctgctgtgtgagaaccacaaccgggacctgcagaacttcctgcgctgtcagaacaacaaaaccaactacaacttggtatgcgagacgctgcagttcctggacatcatgtgcggcagcaccacgggcggcctggggctgctggggctctacatcaatgaggacaacgtgggcctcgtcatccagaccttggagaccctcactgagtactgccagggcccctgccatgagaaccagacttgcattgtgactcacgagtccaatggcatagacatcatcaccgcactgatcctcaatgacatcagccccctgtgcaagtaccgcatggatctggtgctgcagctcaaggacaatgcctccaagctgctcctggctctgatggagagccggcatgacagtgaaaatgctgagcgaatcctcatcagcctgcggccccaggagctggtggacgtcatcaagaaggcctacctgcaggaggaagagcgtgagaactcggaggtgagcccacgtgaagtgggccataacatctatatcctggcgctgcagctctccaggcacaataaacagctgcagcacctgctgaagccggtgaagcgcattcaagaggaggaggccgagggtatctcttccatgctcagcctcaacaacaagcagctgtcacagatgctcaagtcctcagcgccagcacaggaggaggaggaagaccccctggcctactatgagaaccacacgtcccagatcgaggtgggcctgtgggcagcaggggcgggcgtgggagcctgcgccgggcgtgaccatgtgctgtgtgtgctcagattgtgcggcaggaccgcagcatggagcagatcgtgttcccagtgcccggcatctgccagttcctgacggaggaaaccaagcaccggctcttcaccactactgagcaggacgagcagggcagcaaagtgagcgacttcttcgaccagtcctccttcctgcacaacgagatggagtggcagcgcaagctccgcagcatgccgctgatctactggttctcccgccgcatgaccctgtggggcagcatctccttcaacctggccgtgtttatcaacatcatcattgccttcttctacccttacatggagggcgcgtccacaggcgtgctggactcccctctcatctcattgctcttctggatcctcatctgcttctccatcgcggccctgttcaccaagcgctacagcatccgccccctcatcgtggcgctcatcctgcgctccatctactatctgggcatcgggcccacactcaacatcctgggtgccctcaatctgaccaacaagatcgtgtttgtggtgagcttcgtgggcaaccgtggcaccttcatccggggctataaggccatggtcatggacatggaattcctctaccacgtgggctacatcctgaccagtgtcctgggcctctttgctcatgagctgttctacagcatcctgctctttgacctcatctaccgcgaggagacgctgttcaacgtcatcaagagtgtgacccgcaatggccgctccatcctgctgacagccctgctggccctcatcctggtctacctcttctccatcgtcggcttcctcttcctcaaggatgacttcattctcgaggtcgaccggctgcccaacaaccactccacagccagccccctggggatgccacatggagctgctgcatttgtggacacctgcagtggggacaagatggactgtgtctcagggctctcggtgcctgaggtcctggaagaggacagggagctggacagcacagagcgggcctgtgacactctgttgatgtgcatcgtcactgtcatgaaccatgggctacgcaacggtggtggcgtgggcgacattctccgcaagccctccaaagatgagtctctcttcccagcccgagtggtctatgacctcctgttcttcttcatcgtcatcatcattgtgctgaacctcatctttggggtaatcatcgacaccttcgctgacctgcgtagtgagaagcagaagaaggaggagattcttaagacgacatgcttcatctgtggtctggagagggacaagtttgataacaagacagtgtcatttgaggaacacatcaagctggagcacaacatgtggaactacttgtacttcattgtgctggtccgcgtgaagaacaagaccgactacacgggccctgagagctacgtggcccagatgatcaagaacaagaacctggactggttcccccggatgcgggccatgtcccttgtcagcaatgagggcgagggggagcagaatgagattcggattctccaggacaagctcaactccaccatgaagctggtgtcccacctcactgcccagctcaacgagctcaaggagcagatgacggagcagcggaaacgcaggcaacgcctaggctttgtggatgtccagaactgcattagccgctgaggagagccaccgaaggccccaacaggggatgctcatcactggagactgcgactgggaagaacactgccccctccctcgggttgggtggcccagccagctggccagcctccactcccactctgccagacaccctgacacccacccaggctttgaagagcatggagggggagcctcagagctgacagtcctgcttagagcccttaaaaagacttgaaagttcactgggactcagtttaccttaatgccttagcagaagataaatcctacctagagacctttgttccttaaagcaataactgacaactctttgtagtcctccttgtgggtagttaagagtggggtcacccctttaactccaagcactacattttggcggctgccggcctctgggggaggtggcagttatgctgttactagtgattttagggctttgttatttaacttatttcaagggtgctgtgctcagccctgcccatggctgtgcagctccctccgtgcctcagatctgctgtagccagtgcagacctcactgtcgtgtccatgccacccccggcatggctccaggtggcctggtgactccatgatggacgatcttgctcccaggacctgcctcttcccaggcttcctggggaagagttgtacgcccaggcaacaagggctgagctgcgcttgcgtggctgtttcatgaccgcttgtttttctccttttggtgtaatgttttacaaatcctttggcctgagaactaatatgttaattgccttaaataaattaatagaaatctagtccgttaaaaaaaaaa

SEQ ID NO: 313428 - DNA, 9921 bp, Homo sapiens
  misc_feature (4486)..(4486): n is a, c, g, or t
ttatttatttatttatttatttttttgtctatttgttgtgtaggggctatttcttgggctaatgcaagggcagggaccgaacccgcaacctcatggttcctagtcggattcgttaaccactgcgccacgacaggaactcccctgtgtctgacagttttaaagaaagcttttaagtggtgactcgacatcccgaggtgttgcggtcctattatcgcaatgggcactctatcttaggcgttcaaataaaggactaggaagcaaacacccaagcaccggggaacagaacagaaagaaagacggaaggagccaagagttttggagccaactcctggagagggagcggctgaactgattcggaagttggatctctttgtacacaggaatgcggagagaaaaaaaacaaaacccaccccattgcttcatttcccctccaagcctgagcactttctattgtgcaatgaaaaggcttttcacgttgagaaaaatgaatcccgaatttgctctgcaaagggatgagcgcgcctctgggcgccagcctgctctcagctgggcgcggagaccgcgcggtggccgcagggcggccgcggccagggcgctccagggcgcgccctccgcgagcggctccggggtgacgcccgccggagagctggactcccccttccgcgggcgcctgcactggctcttagccagccgagggcccgggtgcagatagtccgggaaccccgagggcggagagctccccactacgcctgggcctcccagggatggcagctccgagagccccctagacccggtgccttgcaggacgcctctggagatcaggagggctggcggcgcattcggcgtccgggaggccgggccccggacgcgcgaggagcgcggggcgcgggaaggcaggcgggtgcacatgggtgccggcgggcgagctgcggggggagggggggcggggtgtggcctccccgcctcccgggcgggatttgcatgtgtgtggtggccccagacttcctgctccttctacgctgcaggtacgcgcgggccgggcggggcgggcgggcggcgggcgcgccaagacgtgggcacctcctcacccggaccccgggccccgccgagccgcctcctggctcccgtggccgccagcccgccccggccgcaccgagcgtcgggatccgaggtgggagcgtacccctccccgctccccggacgcctcagtcctccgcactgagcttggccacgcgcccctaggcgccccccacgccctgggccccggagggccgcagccatgagtgaaatgtccagctttcttcacatcggggacatcgtctccctgtacgccgagggctccgtcaatggcttcatcagcactttggggctggtggatgaccgctgtgtggtggagcccgcggccggggacctggacaacccccctaagaagttccgtgactgcctcttcaaggtgtgccccatgaaccgctactcggcccagaagcagtactggaaggccaagcagactaagcaggacaaggagaagatcgctgatgtggtgttgctgcagaagctgcagcatgcggcgcagatggagcagaagcaaaatgacacggagaacaagaaggtgcatggggatgtcgtgaagtatggcagtgtgatccagctcctgcacatgaagagcaacaagtacctgacagtgaacaagcggcttccggccttgctggagaagaacgccatgcgggtgactctggatgccacaggcaacgagggttcctggctcttcatccagcccttctggaagctgcggagcaacggggacaacgtggtcgtgggggacaaggtgatcctgaatcctgtcaatgccgggcagcctctgcatgccagcaattacgagctcagcgacaacgccggctgcaaggaggtcaattctgtgaactgcaacaccagctggaagatcaacctgtttatgcagtttcgggaccacctggaggaggtgttgaaagggggagacgtggtgcggctgttccatgcggagcaggagaagttcctgacgtgtgacgagtacaagggcaagctgcaggtgttcctgcgaactacactgcgccagtctgccacctcggccaccagctccaatgctctctgggaggtggaggtggtccaccacgacccctgccgtggaggagctgggcactggaatggcttgtaccgcttcaagcacctggctacaggcaactacctggctgctgaggagaaccccagttacaaaggtgatgcctcagatcccaaggcagcaggaatgggggcacagggccgcacaggccgcaggaatgctggggagaagatcaagtactgcctggtggctgtgcctcatggcaatgacatcgcctctctctttgagctggaccccaccaccttgcagaaaaccgactctttcgtgccccggaactcgtacgtccggctgcggcacctctgcaccaacacgtggattcagagcaccaatgtgcccattgacatcgaggaggagcggcccatccggctcatgctgggcacctgccccaccaaggaggacaaggaggcctttgccatcgtgtcagtgcccgtgtctgagatccgagacctggactttgccaatgacgccagctccatgctggccagtgccgtggagaaactcaacgagggcttcatcagccagaatgaccgcaggtttgtcatccagctgctggaagacctggtgttctttgtcagcgatgtccccaacaatgggcagaatgtcctggacatcatggtcactaagcccaaccgggaacggcagaagctgatgagggagcagaacatcctcaaacaggtctttggcattctgaaggccccgttccgtgagaaggggggtgaaggtcccctggtgcggctggaggagctgtcagaccagaagaacgccccctaccagcacatgttccgcctgtgctaccgcgtgttgcggcattcccaggaggactaccgcaagaaccaggagcacattgccaagcagtttgggatgatgcagtcccagattggctacgacatcctggccgaggacaccatcactgccctgctgcacaacaaccgcaagctcctggaaaagcacatcaccaagaccgaggtggagaccttcgtcagccttgtgcgcaagaaccgggagcccaggttcctggactacctctctgacctgtgtgtgtccaaccacatcgccatccccgtcacccaagagctcatctgcaagtgtgtgctggaccccaagaacagtgacattctcatccggaccgagcttcggcccgtgaaggagatggcccaatcccacgagtacctgagcatcgagtactcagaagaggaagtgtggctcacgtggactgacaagaataacgagcatcatgagaagagtgtgaggcagctggcccaggaggcgcgggccggcaacgcccacgacgagaatgtgctcagctactacaggtaccagctgaagctctttgcccgcatgtgcttggaccgccagtacttggccatcgacgagatctcccagcagctgggcgtggacctgattttcctgtgcatggcagacgagatgctgccctttgacctgcgcgcctccttctgccacctgatgctgcacgtgcacgtggaccgtgacccccaggagctggtcacgccggtcaagtttgcccgtctctggactgagatccccacagccatcaccatcaaggactatgattccaacctcaacgcgtcccgagatgacaagaagaacaagtttgccaacaccatggagttcgtggaggactacctcaacaatgtagtcagcgaggccgtgccctttgccaacgaggagaagaacaagctcacttttgaggtggtcagcctggcgcacaatctcatctacttcggcttctacagcttcagcgagctgctgcggctcactcgcacactgctgggcatcatcgactgtgtgcaggggcccccggccatgctgcaggcctatgaggaccccggtggcaagaatgtgcggcggtccatccagggcgtggggcacatgatgtccaccatggtgctgagccgcaagcagtccgtcttcagtgcccccagcctgtctgctggggccagtgctgctgagccgctggacagaagcaagtttgaggagaatgaggacattgtggtgatggagaccaagctgaagatcctggaaatccttcagttcatcctcaacgtccgcctggattaccgcatatcctacctgctgtctgtcttcaagaaggagtttgtggaggtgtttcccatgcaggacagtggggctgatggcacagcccctgccttcgactctaccactgccaacatgaacctggatcgcatcggggagcaggcggaggccatgtttggagtggggaagacaagcagcatgctggaggtggatgacgagggcggccgcatgttcctgcgcgtgctcatccacctcaccatgcacgactatgcgccnctggtctcgggtgccctgcagctgctcttcaagcacttcagccagcgccaggaggccatgcacaccttcaagcaggttcagctgctgatctcagcgcaggacgtggagaactacaaggtgatcaagtcggagctggaccggctgcggaccatggtggagaagtcagagctgtgggtggacaagaagggcagtggcaagggtgaggaggtggaggcaggcgccgccaaggacaagaaagagcgtcccacggacgaggagggctttctgcacccaccaggggagaaaagcagtgagaactaccagatcgtcaagggcatcctggaaaggctgaacaagatgtgcggggttggggagcaaatgaggaagaagcagcaacggctgctgaagaacatggatgcccacaaggtcatgctggacctgctgcagatcccctatgacaagggtgatgccaagatgatggagatcctgcgctacacgcaccagttcctgcagaagttctgtgcagggaaccccggcaaccaggccctgctgcacaaacacctgcacctcttcctcacgccagggctcctggaggcagagaccatgcagcacatcttcctgaacaactatcagctctgctccgagatcagcgagcctgtgttgcagcacttcgtgcacctgctggccacgcacgggcgccatgtgcagtacctggacttcctgcacaccgtcattaaggccgagggcaagtacgtcaagaagtgccaggacatgatcatgactgagctgaccaatgcaggtgacgatgtggtcgtgttctacaatgataaggcatcgctggcccacctgctggacatgatgaaggccgcccgcgacggcgtggaggaccacagccccctcatgtaccacatttccctggtggacctgctggccgcctgtgccgagggcaaaaacgtctacactgagatcaagtgcacctccctgctgccgctggaggacgtggtgtctgtggtgacgcatgaggactgcatcactgaggtgaaaatggcctatgtgaacttcgtgaaccactgctacgtggacacggaggtggagatgaaggagatctacaccagcaaccacatctggacgctctttgagaacttcaccctggacatggctcgggtctgcagcaagcgtgagaagcgcgtggctgaccccaccttggagaagtacgtgctgagcgttgtgctggacaccatcaacgccttcttcagctccccattctctgagaacagcacttccctgcagacacaccagacgattgtggtgcagctgctgcagtctaccacacgcctcctcgagtgtccgtggctacagcagcagcacaagggctccgtggaggcctgcatccggaccctcgccatggtggccaagggccgggccatcttgctgcccatggacctggatgcccacatcagctcgatgctcagcagtggagccagctgtgcagctgccgcccagcggaacgcctccagctacaaggcaaccacgcgggccttcccccgcgtcacccccaccgccaaccagtgggactacaagaacatcattgagaagctgcaggacatcatcacagccctggaggagcggctgaagcccctggtacaggctgagctgtccgtgctggtggatgtcctgcactggcctgagctgctcttcctggagggcagtgaggcctaccagcgctgcgagagtgggggcttcctgtccaagctgatccagcacaccaaggacctcatggagtcggaggagaagctgtgcatcaaggtgctgcggaccctgcagcagatgctgctcaagaagaccaagtacggggaccggggcaaccagctgcgcaagatgctgctgcaaaactacctccagaaccggaagtccacctcgcggggggaccttcccgaccccataggcactggcctggacccagactggtcggcaatcgcagccacccagtgccggctggacaaggagggggccaccaagttggtatgcgacctcatcaccagcaccaagaacgagaagatcttccaggagagcatcggcctggccatccacctgctggatggtggcaacacagagatccagaaatccttccacaacctgatgatgagtgacaagaagtcagagcgcttcttcaaggtgctgcacgaccgcatgaagcgggcccagcaggagaccaagtccacggtggcagtcaacatgaatgacctgggcagccagccacatgaggaccgcgagccagtcgaccccaccaccaaaggccgcgtggcctccttctcgatacctggctcctcatcccgctactcgctgggccccagcctgcgccgggggcacgaggtgagcgaacgtgtgcagagcagtgagatgggcacatccgtgctcatcatgcagcccatcctgcgctttctgcagctgctgtgtgagaaccacaaccgggacctgcagaacttcctgcgctgtcagaacaacaaaaccaactacaacttggtatgcgagacgctgcagttcctggacatcatgtgcggcagcaccacgggcggcctggggctgctggggctctacatcaatgaggacaacgtgggcctcgtcatccagaccttggagaccctcactgagtactgccagggcccctgccatgagaaccagacttgcattgtgactcacgagtccaatggcatagacatcatcaccgcactgatcctcaatgacatcagccccctgtgcaagtaccgcatggatctggtgctgcagctcaaggacaatgcctccaagctgctcctggctctgatggagagccggcatgacagtgaaaatgctgagcgaatcctcatcagcctgcggccccaggagctggtggacgtcatcaagaaggcctacctgcaggaggaagagcgtgagaactcggaggtgagcccacgtgaagtgggccataacatctatatcctggcgctgcagctctccaggcacaataaacagctgcagcacctgctgaagccggtgaagcgcattcaagaggaggaggccgagggtatctcttccatgctcagcctcaacaacaagcagctgtcacagatgctcaagtcctcagcgccagcacaggaggaggaggaagaccccctggcctactatgagaaccacacgtcccagatcgagattgtgcggcaggaccgcagcatggagcagatcgtgttcccagtgcccggcatctgccagttcctgacggaggaaaccaagcaccggctcttcaccactactgagcaggacgagcagggcagcaaagtgagcgacttcttcgaccagtcctccttcctgcacaacgagatggagtggcagcgcaagctccgcagcatgccgctgatctactggttctcccgccgcatgaccctgtggggcagcatctccttcaacctggccgtgtttatcaacatcatcattgccttcttctacccttacatggagggcgcgtccacagctgaccaacaagatcgtgtttgtggtgagcttcgtgggcaaccgtggcaccttcatccggggctataaggccatggtcatggacatggaattcctctaccacgtgggctacatcctgaccagtgtcctgggcctctttgctcatgagctgttctacagcatcctgctctttgacctcatctaccgcgaggagacgctgttcaacgtcatcaagagtgtgacccgcaatggccgctccatcctgctgacagccctgctggccctcatcctggtctacctcttctccatcgtcggcttcctcttcctcaaggatgacttcattctcgaggtcgaccggctgcccaacaaccactccacagccagccccctggggatgccacatggagctgctgcatttgtggacacctgcagtggggacaagatggactgtgtctcagggctctcggtgcctgaggtcctggaagaggacagggagctggacagcacagagcgggcctgtgacactctgttgatgtgcatcgtcactgtcatgaaccatgggctacgcaacggtggtggcgtgggcgacattctccgcaagccctccaaagatgagtctctcttcccagcccgagtggtctatgacctcctgttcttcttcatcgtcatcatcattgtgctgaacctcatctttggggtaatcatcgacaccttcgctgacctgcgtagtgagaagcagaagaaggaggagattcttaagacgacatgcttcatctgtggtctggagagggacaagtttgataacaagacagtgtcatttgaggaacacatcaagctggagcacaacatgtggaactacttgtacttcattgtgctggtccgcgtgaagaacaagaccgactacacgggccctgagagctacgtggcccagatgatcaagaacaagaacctggactggttcccccggatgcgggccatgtcccttgtcagcaatgagggcgagggggagcagaatgagattcggattctccaggacaagctcaactccaccatgaagctggtgtcccacctcactgcccagctcaacgagctcaaggagcagatgacggagcagcggaaacgcaggcaacgcctaggctttgtggatgtccagaactgcattagccgctgaggagagccaccgaaggccccaacaggggatgctcatcactggagactgcgactgggaagaacactgccccctccctcgggttgggtggcccagccagctggccagcctccactcccactctgccagacaccctgacacccacccaggctttgaagagcatggagggggagcctcagagctgacagtcctgcttagagcccttaaaaagacttgaaagttcactgggactcagtttaccttaatgccttagcagaagataaatcctacctagagacctttgttccttaaagcaataactgacaactctttgtagtcctccttgtgggtagttaagagtggggtcacccctttaactccaagcactacattttggcggctgccggcctctgggggaggtggcagttatgctgttactagtgattttagggctttgttatttaacttatttcaagggtgctgtgctcagccctgcccatggctgtgcagctccctccgtgcctcagatctgctgtagccagtgcagacctcactgtcgtgtccatgccacccccggcatggctccaggtggcctggtgactccatgatggacgatcttgctcccaggacctgcctcttcccaggcttcctggggaagagttgtacgcccaggcaacaagggctgagctgcgcttgcgtggctgtttcatgaccgcttgtttttctccttttggtgtaatgttttacaaatcctttggcctgagaactaatatgttaattgccttaaataaattaatagaaatctagtccgttaaaaaaaaaa

SEQ ID NO: 313429 - DNA, 5765 bp, Homo sapiens
  misc_feature (4)..(4): n is a, c, g, or t
  misc_feature (157)..(157): n is a, c, g, or t
gganccccaactctgccacccacagcccgcagcgccggagccggcggaggccatttttggagtggggaagacaagcagcatgctggaggtggatgacgagggcggccgcatgttcctgcgcgtgctcatccacctcaccatgcacgactatgcgccnctggtctcgggtgccctgcagctgctcttcaagcacttcagccagcgccaggaggccatgcacaccttcaagcaggttcagctgctgatctcagcgcaggacgtggagaactacaaggtgatcaagtcggagctggaccggctgcggaccatggtggagaagtcagagctgtgggtggacaagaagggcagtggcaagggtgaggaggtggaggcaggcgccgccaaggacaagaaagagcgtcccacggacgaggagggctttctgcacccaccaggggagaaaagcagtgagaactaccagatcgtcaagggcatcctggaaaggctgaacaagatgtgcggggttggggagcaaatgaggaagaagcagcaacggctgctgaagaacatggatgcccacaaggtcatgctggacctgctgcagatcccctatgacaagggtgatgccaagatgatggagatcctgcgctacacgcaccagttcctgcagaagttctgtgcagggaaccccggcaaccaggccctgctgcacaaacacctgcacctcttcctcacgccagggctcctggaggcagagaccatgcagcacatcttcctgaacaactatcagctctgctccgagatcagcgagcctgtgttgcagcacttcgtgcacctgctggccacgcacgggcgccatgtgcagtacctggacttcctgcacaccgtcattaaggccgagggcaagtacgtcaagaagtgccaggacatgatcatgactgagctgaccaatgcaggtgacgatgtggtcgtgttctacaatgataaggcatcgctggcccacctgctggacatgatgaaggccgcccgcgacggcgtggaggaccacagccccctcatgtaccacatttccctggtggacctgctggccgcctgtgccgagggcaaaaacgtctacactgagatcaagtgcacctccctgctgccgctggaggacgtggtgtctgtggtgacgcatgaggactgcatcactgaggtgaaaatggcctatgtgaacttcgtgaaccactgctacgtggacacggaggtggagatgaaggagatctacaccagcaaccacatctggacgctctttgagaacttcaccctggacatggctcgggtctgcagcaagcgtgagaagcgcgtggctgaccccaccttggagaagtacgtgctgagcgttgtgctggacaccatcaacgccttcttcagctccccattctctgagaacagcacttccctgcagacacaccagacgattgtggtgcagctgctgcagtctaccacacgcctcctcgagtgtccgtggctacagcagcagcacaagggctccgtggaggcctgcatccggaccctcgccatggtggccaagggccgggccatcttgctgcccatggacctggatgcccacatcagctcgatgctcagcagtggagccagctgtgcagctgccgcccagcggaacgcctccagctacaaggcaaccacgcgggccttcccccgcgtcacccccaccgccaaccagtgggactacaagaacatcattgagaagctgcaggacatcatcacagccctggaggagcggctgaagcccctggtacaggctgagctgtccgtgctggtggatgtcctgcactggcctgagctgctcttcctggagggcagtgaggcctaccagcgctgcgagagtgggggcttcctgtccaagctgatccagcacaccaaggacctcatggagtcggaggagaagctgtgcatcaaggtgctgcggaccctgcagcagatgctgctcaagaagaccaagtacggggaccggggcaaccagctgcgcaagatgctgctgcaaaactacctccagaaccggaagtccacctcgcggggggaccttcccgaccccataggcactggcctggacccagactggtcggcaatcgcagccacccagtgccggctggacaaggagggggccaccaagttggtatgcgacctcatcaccagcaccaagaacgagaagatcttccaggagagcatcggcctggccatccacctgctggatggtggcaacacagagatccagaaatccttccacaacctgatgatgagtgacaagaagtcagagcgcttcttcaaggtgctgcacgaccgcatgaagcgggcccagcaggagaccaagtccacggtggcagtcaacatgaatgacctgggcagccagccacatgaggaccgcgagccagtcgaccccaccaccaaaggccgcgtggcctccttctcgatacctggctcctcatcccgctactcgctgggccccagcctgcgccgggggcacgaggtgagcgaacgtgtgcagagcagtgagatgggcacatccgtgctcatcatgcagcccatcctgcgctttctgcagctgctgtgtgagaaccacaaccgggacctgcagaacttcctgcgctgtcagaacaacaaaaccaactacaacttggtatgcgagacgctgcagttcctggacatcatgtgcggcagcaccacgggcggcctggggctgctggggctctacatcaatgaggacaacgtgggcctcgtcatccagaccttggagaccctcactgagtactgccagggcccctgccatgagaaccagacttgcattgtgactcacgagtccaatggcatagacatcatcaccgcactgatcctcaatgacatcagccccctgtgcaagtaccgcatggatctggtgctgcagctcaaggacaatgcctccaagctgctcctggctctgatggagagccggcatgacagtgaaaatgctgagcgaatcctcatcagcctgcggccccaggagctggtggacgtcatcaagaaggcctacctgcaggaggaagagcgtgagaactcggaggtgagcccacgtgaagtgggccataacatctatatcctggcgctgcagctctccaggcacaataaacagctgcagcacctgctgaagccggtgaagcgcattcaagaggaggaggccgagggtatctcttccatgctcagcctcaacaacaagcagctgtcacagatgctcaagtcctcagcgccagcacaggaggaggaggaagaccccctggcctactatgagaaccacacgtcccagatcgagattgtgcggcaggaccgcagcatggagcagatcgtgttcccagtgcccggcatctgccagttcctgacggaggaaaccaagcaccggctcttcaccactactgagcaggacgagcagggcagcaaagtgagcgacttcttcgaccagtcctccttcctgcacaacgagatggagtggcagcgcaagctccgcagcatgccgctgatctactggttctcccgccgcatgaccctgtggggcagcatctccttcaacctggccgtgtttatcaacatcatcattgccttcttctacccttacatggagggcgcgtccacaggcgtgctggactcccctctcatctcattgctcttctggatcctcatctgcttctccatcgcggccctgttcaccaagcgctacagcatccgccccctcatcgtggcgctcatcctgcgctccatctactatctgggcatcgggcccacactcaacatcctgggtgccctcaatctgaccaacaagatcgtgtttgtggtgagcttcgtgggcaaccgtggcaccttcatccggggctataaggccatggtcatggacatggaattcctctaccacgtgggctacatcctgaccagtgtcctgggcctctttgctcatgagctgttctacagcatcctgctctttgacctcatctaccgcgaggagacgctgttcaacgtcatcaagagtgtgacccgcaatggccgctccatcctgctgacagccctgctggccctcatcctggtctacctcttctccatcgtcggcttcctcttcctcaaggatgacttcattctcgaggtcgaccggctgcccaacaaccactccacagccagccccctggggatgccacatggagctgctgcatttgtggacacctgcagtggggacaagatggactgtgtctcagggctctcggtgcctgaggtcctggaagaggacagggagctggacagcacagagcgggcctgtgacactctgttgatgtgcatcgtcactgtcatgaaccatgggctacgcaacggtggtggcgtgggcgacattctccgcaagccctccaaagatgagtctctcttcccagcccgagtggtctatgacctcctgttcttcttcatcgtcatcatcattgtgctgaacctcatctttggggtaatcatcgacaccttcgctgacctgcgtagtgagaagcagaagaaggaggagattcttaagacgacatgcttcatctgtggtctggagagggacaagtttgataacaagacagtgtcatttgaggaacacatcaagctggagcacaacatgtggaactacttgtacttcattgtgctggtccgcgtgaagaacaagaccgactacacgggccctgagagctacgtggcccagatgatcaagaacaagaacctggactggttcccccggatgcgggccatgtcccttgtcagcaatgagggcgagggggagcagaatgagattcggattctccaggacaagctcaactccaccatgaagctggtgtcccacctcactgcccagctcaacgagctcaaggagcagatgacggagcagcggaaacgcaggcaacgcctaggctttgtggatgtccagaactgcattagccgctgaggagagccaccgaaggccccaacaggggatgctcatcactggagactgcgactgggaagaacactgccccctccctcgggttgggtggcccagccagctggccagcctccactcccactctgccagacaccctgacacccacccaggctttgaagagcatggagggggagcctcagagctgacagtcctgcttagagcccttaaaaagacttgaaagttcactgggactcagtttaccttaatgccttagcagaagataaatcctacctagagacctttgttccttaaagcaataactgacaactctttgtagtcctccttgtgggtagttaagagtggggtcacccctttaactccaagcactacattttggcggctgccggcctctgggggaggtggcagttatgctgttactagtgattttagggctttgttatttaacttatttcaagggtgctgtgctcagccctgcccatggctgtgcagctccctccgtgcctcagatctgctgtagccagtgcagacctcactgtcgtgtccatgccacccccggcatggctccaggtggcctggtgactccatgatggacgatcttgctcccaggacctgcctcttcccaggcttcctggggaagagttgtacgcccaggcaacaagggctgagctgcgcttgcgtggctgtttcatgaccgcttgtttttctccttttggtgtaatgttttacaaatcctttggcctgagaactaatatgttaattgccttaaataaattaatagaaatctagtccgttaaaaaaaaaa

SEQ ID NO: 313430 - DNA, 3320 bp, Homo sapiens
cccagtccgttcgactgagccatcccgctactcgctgggccccagcctgcgccgggggcacgaggtgagcgaacgtgtgcagagcagtgagatgggcacatccgtgctcatcatgcagcccatcctgcgctttctgcagctgctgtgtgagaaccacaaccgggacctgcagaacttcctgcgctgtcagaacaacaaaaccaactacaacttggtatgcgagacgctgcagttcctggacatcatgtgcggcagcaccacgggcggcctggggctgctggggctctacatcaatgaggacaacgtgggcctcgtcatccagaccttggagaccctcactgagtactgccagggcccctgccatgagaaccagacttgcattgtgactcacgagtccaatggcatagacatcatcaccgcactgatcctcaatgacatcagccccctgtgcaagtaccgcatggatctggtgctgcagctcaaggacaatgcctccaagctgctcctggctctgatggagagccggcatgacagtgaaaatgctgagcgaatcctcatcagcctgcggccccaggagctggtggacgtcatcaagaaggcctacctgcaggaggaagagcgtgagaactcggaggtgagcccacgtgaagtgggccataacatctatatcctggcgctgcagctctccaggcacaataaacagctgcagcacctgctgaagccggtgaagcgcattcaagaggaggaggccgagggtatctcttccatgctcagcctcaacaacaagcagctgtcacagatgctcaagtcctcagcgccagcacaggaggaggaggaagaccccctggcctactatgagaaccacacgtcccagatcgagattgtgcggcaggaccgcagcatggagcagatcgtgttcccagtgcccggcatctgccagttcctgacggaggaaaccaagcaccggctcttcaccactactgagcaggacgagcagggcagcaaagtgagcgacttcttcgaccagtcctccttcctgcacaacgagatggagtggcagcgcaagctccgcagcatgccgctgatctactggttctcccgccgcatgaccctgtggggcagcatctccttcaacctggccgtgtttatcaacatcatcattgccttcttctacccttacatggagggcgcgtccacaggcgtgctggactcccctctcatctcattgctcttctggatcctcatctgcttctccatcgcggccctgttcaccaagcgctacagcatccgccccctcatcgtggcgctcatcctgcgctccatctactatctgggcatcgggcccacactcaacatcctgggtgccctcaatctgaccaacaagatcgtgtttgtggtgagcttcgtgggcaaccgtggcaccttcatccggggctataaggccatggtcatggacatggaattcctctaccacgtgggctacatcctgaccagtgtcctgggcctctttgctcatgagctgttctacagcatcctgctctttgacctcatctaccgcgaggagacgctgttcaacgtcatcaagagtgtgacccgcaatggccgctccatcctgctgacagccctgctggccctcatcctggtctacctcttctccatcgtcggcttcctcttcctcaaggatgacttcattctcgaggtcgaccggctgcccaacaaccactccacagccagccccctggggatgccacatggagctgctgcatttgtggacacctgcagtggggacaagatggactgtgtctcagggctctcggtgcctgaggtcctggaagaggacagggagctggacagcacagagcgggcctgtgacactctgttgatgtgcatcgtcactgtcatgaaccatgggctacgcaacggtggtggcgtgggcgacattctccgcaagccctccaaagatgagtctctcttcccagcccgagtggtctatgacctcctgttcttcttcatcgtcatcatcattgtgctgaacctcatctttggggtaatcatcgacaccttcgctgacctgcgtagtgagaagcagaagaaggaggagattcttaagacgacatgcttcatctgtggtctggagagggacaagtttgataacaagacagtgtcatttgaggaacacatcaagctggagcacaacatgtggaactacttgtacttcattgtgctggtccgcgtgaagaacaagaccgactacacgggccctgagagctacgtggcccagatgatcaagaacaagaacctggactggttcccccggatgcgggccatgtcccttgtcagcaatgagggcgagggggagcagaatgagattcggattctccaggacaagctcaactccaccatgaagctggtgtcccacctcactgcccagctcaacgagctcaaggagcagatgacggagcagcggaaacgcaggcaacgcctaggctttgtggatgtccagaactgcattagccgctgaggagagccaccgaaggccccaacaggggatgctcatcactggagactgcgactgggaagaacactgccccctccctcgggttgggtggcccagccagctggccagcctccactcccactctgccagacaccctgacacccacccaggctttgaagagcatggagggggagcctcagagctgacagtcctgcttagagcccttaaaaagacttgaaagttcactgggactcagtttaccttaatgccttagcagaagataaatcctacctagagacctttgttccttaaagcaataactgacaactctttgtagtcctccttgtgggtagttaagagtggggtcacccctttaactccaagcactacattttggcggctgccggcctctgggggaggtggcagttatgctgttactagtgattttagggctttgttatttaacttatttcaagggtgctgtgctcagccctgcccatggctgtgcagctccctccgtgcctcagatctgctgtagccagtgcagacctcactgtcgtgtccatgccacccccggcatggctccaggtggcctggtgactccatgatggacgatcttgctcccaggacctgcctcttcccaggcttcctggggaagagttgtacgcccaggcaacaagggctgagctgcgcttgcgtggctgtttcatgaccgcttgtttttctccttttggtgtaatgttttacaaatcctttggcctgagaactaatatgttaattgccttaaataaattaatagaaatctagtccgttaaaaaaaaaa

SEQ ID NO: 313431 - DNA, 1548 bp, Homo sapiens
tcgaggcgggtggtaatcggccgaggctgtgtctcaggctctcggtgcctgaggtcctggaagaggacagggagctggacagcacagagcgggcctgtgacactctgttgatgtgcatcgtcactgtcatgaaccatgggctacgcaacggtggtggcgtgggcgacattctccgcaagccctccaaagatgagtctctcttcccagcccgagtggtctatgacctcctgttcttcttcatcgtcatcatcattgtgctgaacctcatctttggggtaatcatcgacaccttcgctgacctgcgtagtgagaagcagaagaaggaggagattcttaagacgacatgcttcatctgtggtctggagagggacaagtttgataacaagacagtgtcatttgaggaacacatcaagctggagcacaacatgtggaactacttgtacttcattgtgctggtccgcgtgaagaacaagaccgactacacgggccctgagagctacgtggcccagatgatcaagaacaagaacctggactggttcccccggatgcgggccatgtcccttgtcagcaatgagggcgagggggagcagaatgagattcggattctccaggacaagctcaactccaccatgaagctggtgtcccacctcactgcccagctcaacgagctcaaggagcagatgacggagcagcggaaacgcaggcaacgcctaggctttgtggatgtccagaactgcattagccgctgaggagagccaccgaaggccccaacaggggatgctcatcactggagactgcgactgggaagaacactgccccctccctcgggttgggtggcccagccagctggccagcctccactcccactctgccagacaccctgacacccacccaggctttgaagagcatggagggggagcctcagagctgacagtcctgcttagagcccttaaaaagacttgaaagttcactgggactcagtttaccttaatgccttagcagaagataaatcctacctagagacctttgttccttaaagcaataactgacaactctttgtagtcctccttgtgggtagttaagagtggggtcacccctttaactccaagcactacattttggcggctgccggcctctgggggaggtggcagttatgctgttactagtgattttagggctttgttatttaacttatttcaagggtgctgtgctcagccctgcccatggctgtgcagctccctccgtgcctcagatctgctgtagccagtgcagacctcactgtcgtgtccatgccacccccggcatggctccaggtggcctggtgactccatgatggacgatcttgctcccaggacctgcctcttcccaggcttcctggggaagagttgtacgcccaggcaacaagggctgagctgcgcttgcgtggctgtttcatgaccgcttgtttttctccttttggtgtaatgttttacaaatcctttggcctgagaactaatatgttaattgccttaaataaattaatagaaatctagtccgttaaaaaaaaaa

SEQ ID NO: 313432 - DNA, 9665 bp, Homo sapiens
  misc_feature (4486)..(4486): n is a, c, g, or t
ttatttatttatttatttatttttttgtctatttgttgtgtaggggctatttcttgggctaatgcaagggcagggaccgaacccgcaacctcatggttcctagtcggattcgttaaccactgcgccacgacaggaactcccctgtgtctgacagttttaaagaaagcttttaagtggtgactcgacatcccgaggtgttgcggtcctattatcgcaatgggcactctatcttaggcgttcaaataaaggactaggaagcaaacacccaagcaccggggaacagaacagaaagaaagacggaaggagccaagagttttggagccaactcctggagagggagcggctgaactgattcggaagttggatctctttgtacacaggaatgcggagagaaaaaaaacaaaacccaccccattgcttcatttcccctccaagcctgagcactttctattgtgcaatgaaaaggcttttcacgttgagaaaaatgaatcccgaatttgctctgcaaagggatgagcgcgcctctgggcgccagcctgctctcagctgggcgcggagaccgcgcggtggccgcagggcggccgcggccagggcgctccagggcgcgccctccgcgagcggctccggggtgacgcccgccggagagctggactcccccttccgcgggcgcctgcactggctcttagccagccgagggcccgggtgcagatagtccgggaaccccgagggcggagagctccccactacgcctgggcctcccagggatggcagctccgagagccccctagacccggtgccttgcaggacgcctctggagatcaggagggctggcggcgcattcggcgtccgggaggccgggccccggacgcgcgaggagcgcggggcgcgggaaggcaggcgggtgcacatgggtgccggcgggcgagctgcggggggagggggggcggggtgtggcctccccgcctcccgggcgggatttgcatgtgtgtggtggccccagacttcctgctccttctacgctgcaggtacgcgcgggccgggcggggcgggcgggcggcgggcgcgccaagacgtgggcacctcctcacccggaccccgggccccgccgagccgcctcctggctcccgtggccgccagcccgccccggccgcaccgagcgtcgggatccgaggtgggagcgtacccctccccgctccccggacgcctcagtcctccgcactgagcttggccacgcgcccctaggcgccccccacgccctgggccccggagggccgcagccatgagtgaaatgtccagctttcttcacatcggggacatcgtctccctgtacgccgagggctccgtcaatggcttcatcagcactttggggctggtggatgaccgctgtgtggtggagcccgcggccggggacctggacaacccccctaagaagttccgtgactgcctcttcaaggtgtgccccatgaaccgctactcggcccagaagcagtactggaaggccaagcagactaagcaggacaaggagaagatcgctgatgtggtgttgctgcagaagctgcagcatgcggcgcagatggagcagaagcaaaatgacacggagaacaagaaggtgcatggggatgtcgtgaagtatggcagtgtgatccagctcctgcacatgaagagcaacaagtacctgacagtgaacaagcggcttccggccttgctggagaagaacgccatgcgggtgactctggatgccacaggcaacgagggttcctggctcttcatccagcccttctggaagctgcggagcaacggggacaacgtggtcgtgggggacaaggtgatcctgaatcctgtcaatgccgggcagcctctgcatgccagcaattacgagctcagcgacaacgccggctgcaaggaggtcaattctgtgaactgcaacaccagctggaagatcaacctgtttatgcagtttcgggaccacctggaggaggtgttgaaagggggagacgtggtgcggctgttccatgcggagcaggagaagttcctgacgtgtgacgagtacaagggcaagctgcaggtgttcctgcgaactacactgcgccagtctgccacctcggccaccagctccaatgctctctgggaggtggaggtggtccaccacgacccctgccgtggaggagctgggcactggaatggcttgtaccgcttcaagcacctggctacaggcaactacctggctgctgaggagaaccccagttacaaaggtgatgcctcagatcccaaggcagcaggaatgggggcacagggccgcacaggccgcaggaatgctggggagaagatcaagtactgcctggtggctgtgcctcatggcaatgacatcgcctctctctttgagctggaccccaccaccttgcagaaaaccgactctttcgtgccccggaactcgtacgtccggctgcggcacctctgcaccaacacgtggattcagagcaccaatgtgcccattgacatcgaggaggagcggcccatccggctcatgctgggcacctgccccaccaaggaggacaaggaggcctttgccatcgtgtcagtgcccgtgtctgagatccgagacctggactttgccaatgacgccagctccatgctggccagtgccgtggagaaactcaacgagggcttcatcagccagaatgaccgcaggtttgtcatccagctgctggaagacctggtgttctttgtcagcgatgtccccaacaatgggcagaatgtcctggacatcatggtcactaagcccaaccgggaacggcagaagctgatgagggagcagaacatcctcaaacaggtctttggcattctgaaggccccgttccgtgagaaggggggtgaaggtcccctggtgcggctggaggagctgtcagaccagaagaacgccccctaccagcacatgttccgcctgtgctaccgcgtgttgcggcattcccaggaggactaccgcaagaaccaggagcacattgccaagcagtttgggatgatgcagtcccagattggctacgacatcctggccgaggacaccatcactgccctgctgcacaacaaccgcaagctcctggaaaagcacatcaccaagaccgaggtggagaccttcgtcagccttgtgcgcaagaaccgggagcccaggttcctggactacctctctgacctgtgtgtgtccaaccacatcgccatccccgtcacccaagagctcatctgcaagtgtgtgctggaccccaagaacagtgacattctcatccggaccgagcttcggcccgtgaaggagatggcccaatcccacgagtacctgagcatcgagtactcagaagaggaagtgtggctcacgtggactgacaagaataacgagcatcatgagaagagtgtgaggcagctggcccaggaggcgcgggccggcaacgcccacgacgagaatgtgctcagctactacaggtaccagctgaagctctttgcccgcatgtgcttggaccgccagtacttggccatcgacgagatctcccagcagctgggcgtggacctgattttcctgtgcatggcagacgagatgctgccctttgacctgcgcgcctccttctgccacctgatgctgcacgtgcacgtggaccgtgacccccaggagctggtcacgccggtcaagtttgcccgtctctggactgagatccccacagccatcaccatcaaggactatgattccaacctcaacgcgtcccgagatgacaagaagaacaagtttgccaacaccatggagttcgtggaggactacctcaacaatgtagtcagcgaggccgtgccctttgccaacgaggagaagaacaagctcacttttgaggtggtcagcctggcgcacaatctcatctacttcggcttctacagcttcagcgagctgctgcggctcactcgcacactgctgggcatcatcgactgtgtgcaggggcccccggccatgctgcaggcctatgaggaccccggtggcaagaatgtgcggcggtccatccagggcgtggggcacatgatgtccaccatggtgctgagccgcaagcagtccgtcttcagtgcccccagcctgtctgctggggccagtgctgctgagccgctggacagaagcaagtttgaggagaatgaggacattgtggtgatggagaccaagctgaagatcctggaaatccttcagttcatcctcaacgtccgcctggattaccgcatatcctacctgctgtctgtcttcaagaaggagtttgtggaggtgtttcccatgcaggacagtggggctgatggcacagcccctgccttcgactctaccactgccaacatgaacctggatcgcatcggggagcaggcggaggccatgtttggagtggggaagacaagcagcatgctggaggtggatgacgagggcggccgcatgttcctgcgcgtgctcatccacctcaccatgcacgactatgcgccnctggtctcgggtgccctgcagctgctcttcaagcacttcagccagcgccaggaggccatgcacaccttcaagcaggttcagctgctgatctcagcgcaggacgtggagaactacaaggtgatcaagtcggagctggaccggctgcggaccatggtggagaagtcagagctgtgggtggacaagaagggcagtggcaagggtgaggaggtggaggcaggcgccgccaaggacaagaaagagcgtcccacggacgaggagggctttctgcacccaccaggggagaaaagcagtgagaactaccagatcgtcaagggcatcctggaaaggctgaacaagatgtgcggggttggggagcaaatgaggaagaagcagcaacggctgctgaagaacatggatgcccacaaggtcatgctggacctgctgcagatcccctatgacaagggtgatgccaagatgatggagatcctgcgctacacgcaccagttcctgcagaagttctgtgcagggaaccccggcaaccaggccctgctgcacaaacacctgcacctcttcctcacgccagggctcctggaggcagagaccatgcagcacatcttcctgaacaactatcagctctgctccgagatcagcgagcctgtgttgcagcacttcgtgcacctgctggccacgcacgggcgccatgtgcagtacctggacttcctgcacaccgtcattaaggccgagggcaagtacgtcaagaagtgccaggacatgatcatgactgagctgaccaatgcaggtgacgatgtggtcgtgttctacaatgataaggcatcgctggcccacctgctggacatgatgaaggccgcccgcgacggcgtggaggaccacagccccctcatgtaccacatttccctggtggacctgctggccgcctgtgccgagggcaaaaacgtctacactgagatcaagtgcacctccctgctgccgctggaggacgtggtgtctgtggtgacgcatgaggactgcatcactgaggtgaaaatggcctatgtgaacttcgtgaaccactgctacgtggacacggaggtggagatgaaggagatctacaccagcaaccacatctggacgctctttgagaacttcaccctggacatggctcgggtctgcagcaagcgtgagaagcgcgtggctgaccccaccttggagaagtacgtgctgagcgttgtgctggacaccatcaacgccttcttcagctccccattctctgagaacagcacttccctgcagacacaccagacgattgtggtgcagctgctgcagtctaccacacgcctcctcgagtgtccgtggctacagcagcagcacaagggctccgtggaggcctgcatccggaccctcgccatggtggccaagggccgggccatcttgctgcccatggacctggatgcccacatcagctcgatgctcagcagtggagccagctgtgcagctgccgcccagcggaacgcctccagctacaaggcaaccacgcgggccttcccccgcgtcacccccaccgccaaccagtgggactacaagaacatcattgagaagctgcaggacatcatcacagccctggaggagcggctgaagcccctggtacaggctgagctgtccgtgctggtggatgtcctgcactggcctgagctgctcttcctggagggcagtgaggcctaccagcgctgcgagagtgggggcttcctgtccaagctgatccagcacaccaaggacctcatggagtcggaggagaagctgtgcatcaaggtgctgcggaccctgcagcagatgctgctcaagaagaccaagtacggggaccggggcaaccagctgcgcaagatgctgctgcaaaactacctccagaaccggaagtccacctcgcggggggaccttcccgaccccataggcactggcctggacccagactggtcggcaatcgcagccacccagtgccggctggacaaggagggggccaccaagttggtatgcgacctcatcaccagcaccaagaacgagaagatcttccaggagagcatcggcctggccatccacctgctggatggtggcaacacagagatccagaaatccttccacaacctgatgatgagtgacaagaagtcagagcgcttcttcaaggtgctgcacgaccgcatgaagcgggcccagcaggagaccaagtccacggtggcagtcaacatgaatgacctgggcagccagccacatgaggaccgcgagccagtcgaccccaccaccaaaggccgcgtggcctccttctcgatacctggctcctcatcccgctactcgctgggccccagcctgcgccgggggcacgaggtgagcgaacgtgtgcagagcagtgagatgggcacatccgtgctcatcatgcagcccatcctgcgctttctgcagctgctgtgtgagaaccacaaccgggacctgcagaacttcctgcgctgtcagaacaacaaaaccaactacaacttggtatgcgagacgctgcagttcctggacatcatgtgcggcagcaccacgggcggcctggggctgctggggctctacatcaatgaggacaacgtgggcctcgtcatccagaccttggagaccctcactgagtactgccagggcccctgccatgagaaccagacttgcattgtgactcacgagtccaatggcatagacatcatcaccgcactgatcctcaatgacatcagccccctgtgcaagtaccgcatggatctggtgctgcagctcaaggacaatgcctccaagctgctcctggctctgatggagagccggcatgacagtgaaaatgctgagcgaatcctcatcagcctgcggccccaggagctggtggacgtcatcaagaaggcctacctgcaggaggaagagcgtgagaactcggaggtgagcccacgtgaagtgggccataacatctatatcctggcgctgcagctctccaggcacaataaacagctgcagcacctgctgaagccggtgaagcgcattcaagaggaggaggccgagggtatctcttccatgctcagcctcaacaacaagcagctgtcacagatgctcaagtcctcagcgccagcacaggaggaggaggaagaccccctggcctactatgagaaccacacgtcccagatcgagattgtgcggcaggaccgcagcatggagcagatcgtgttcccagtgcccggcatctgccagttcctgacggaggaaaccaagcaccggctcttcaccactactgagcaggacgagcagggcagcaaagtgagcgacttcttcgaccagtcctccttcctgcacaacgagatggagtggcagcgcaagctccgcagcatgccgctgatctactggttctcccgccgcatgaccctgtggggcagcatctccttcaacctggccgtgtttatcaacatcatcattgccttcttctacccttacatggagggcgcgtccacaggcgtgctggactcccctctcatctcattgctcttctggatcctcatctgcttctccatcgcggccctgttcaccaagcgctacagcatccgccccctcatcgtggcgctcatcctgcgctccatctactatctgggcatcgggcccacactcaacatcctgggtgccctcaatctgaccaacaagatcgtgtttgtggtgagcttcgtgggcaaccgtggcaccttcatccggggctataaggccatggtcatggacatggaattcctctaccacgtgggctacatcctgaccagtgtcctgggcctctttgctcatgagctgttctacagcatcctgctctttgacctcatctaccgcgaggagacgctgttcaacgtcatcaagagtgtgacccgcaatggccgctccatcctgctgacagccctgctggccctcatcctggtctacctcttctccatcgtcggcttcctcttcctcaaggatgacttcattctcgaggtcgaccggctgcccaacaaccactccacagccagccccctggggatgccacatggagctgctgcatttgtggacacctgcagtggggacaagatggactgtgtctcagggctctcggtgcctgaggtcctggaagaggacagggagctggacagcacagagcgggcctgtgacactctgttgatgtgcatcgtcactgtcatgaaccatgggctacgcaacggtggtggcgtgggcgacattctccgcaagccctccaaagatgagtctctcttcccagcccgagtggtctatgacctcctgttcttcttcatcgtcatcatcattgtgctgaacctcatctttggggtaatcatcgacaccttcgctgacctgcgtagtgagaagcagaagaaggaggagattcttaagacgacatgcttcatctgtggtctggagagggacaagtttgataacaagacagtgtcatttgaggaacacatcaagctggagcacaacatgtggaactacttgtacttcattgtgctggtccgcgtgaagaacaagaccgactacacgggccctgagagctacgtggcccagatgatcaaggtgtgagcaggggctgtgccaggcctgtgggcccaaaccagccattctagagtcatcactgtgcaccagaggcctcatggttttagcttctgagtaccctgggccctggagaggagtggccctatctgactgttggccctaggaggccaggcagaggggctcggacagctgcagacacttgttgaaaggtcagcagggcgaggagcagcagctggaagcagctctgggctgcacggaagccgctgctgcagaggggcctcctcacacttctgggtgtcaggaaaaatcccacagcaaacccatgcgccccgaagaacacgtgtggtatccctgggcctgtcgtgcagtgatgctgaggaggggtggagttggggagaccctgcccgtggccagtgatctgtgggccgctctcagggagtgttttctagctcggtgggaaggcaggctgcttcctaaaaagtctgaattagatgatcctgggctgaaggggagcctggaaaaactttaaaaatcacttacagaaatcaaatgtcatctgtccaatttctgtaataatggagtgaaggcaatgaatcataaagaaggaattatttatcgttta

SEQ ID NO: 313433 - DNA, 8757 bp, Homo sapiens
  misc_feature (4486)..(4486): n is a, c, g, or t
ttatttatttatttatttatttttttgtctatttgttgtgtaggggctatttcttgggctaatgcaagggcagggaccgaacccgcaacctcatggttcctagtcggattcgttaaccactgcgccacgacaggaactcccctgtgtctgacagttttaaagaaagcttttaagtggtgactcgacatcccgaggtgttgcggtcctattatcgcaatgggcactctatcttaggcgttcaaataaaggactaggaagcaaacacccaagcaccggggaacagaacagaaagaaagacggaaggagccaagagttttggagccaactcctggagagggagcggctgaactgattcggaagttggatctctttgtacacaggaatgcggagagaaaaaaaacaaaacccaccccattgcttcatttcccctccaagcctgagcactttctattgtgcaatgaaaaggcttttcacgttgagaaaaatgaatcccgaatttgctctgcaaagggatgagcgcgcctctgggcgccagcctgctctcagctgggcgcggagaccgcgcggtggccgcagggcggccgcggccagggcgctccagggcgcgccctccgcgagcggctccggggtgacgcccgccggagagctggactcccccttccgcgggcgcctgcactggctcttagccagccgagggcccgggtgcagatagtccgggaaccccgagggcggagagctccccactacgcctgggcctcccagggatggcagctccgagagccccctagacccggtgccttgcaggacgcctctggagatcaggagggctggcggcgcattcggcgtccgggaggccgggccccggacgcgcgaggagcgcggggcgcgggaaggcaggcgggtgcacatgggtgccggcgggcgagctgcggggggagggggggcggggtgtggcctccccgcctcccgggcgggatttgcatgtgtgtggtggccccagacttcctgctccttctacgctgcaggtacgcgcgggccgggcggggcgggcgggcggcgggcgcgccaagacgtgggcacctcctcacccggaccccgggccccgccgagccgcctcctggctcccgtggccgccagcccgccccggccgcaccgagcgtcgggatccgaggtgggagcgtacccctccccgctccccggacgcctcagtcctccgcactgagcttggccacgcgcccctaggcgccccccacgccctgggccccggagggccgcagccatgagtgaaatgtccagctttcttcacatcggggacatcgtctccctgtacgccgagggctccgtcaatggcttcatcagcactttggggctggtggatgaccgctgtgtggtggagcccgcggccggggacctggacaacccccctaagaagttccgtgactgcctcttcaaggtgtgccccatgaaccgctactcggcccagaagcagtactggaaggccaagcagactaagcaggacaaggagaagatcgctgatgtggtgttgctgcagaagctgcagcatgcggcgcagatggagcagaagcaaaatgacacggagaacaagaaggtgcatggggatgtcgtgaagtatggcagtgtgatccagctcctgcacatgaagagcaacaagtacctgacagtgaacaagcggcttccggccttgctggagaagaacgccatgcgggtgactctggatgccacaggcaacgagggttcctggctcttcatccagcccttctggaagctgcggagcaacggggacaacgtggtcgtgggggacaaggtgatcctgaatcctgtcaatgccgggcagcctctgcatgccagcaattacgagctcagcgacaacgccggctgcaaggaggtcaattctgtgaactgcaacaccagctggaagatcaacctgtttatgcagtttcgggaccacctggaggaggtgttgaaagggggagacgtggtgcggctgttccatgcggagcaggagaagttcctgacgtgtgacgagtacaagggcaagctgcaggtgttcctgcgaactacactgcgccagtctgccacctcggccaccagctccaatgctctctgggaggtggaggtggtccaccacgacccctgccgtggaggagctgggcactggaatggcttgtaccgcttcaagcacctggctacaggcaactacctggctgctgaggagaaccccagttacaaaggtgatgcctcagatcccaaggcagcaggaatgggggcacagggccgcacaggccgcaggaatgctggggagaagatcaagtactgcctggtggctgtgcctcatggcaatgacatcgcctctctctttgagctggaccccaccaccttgcagaaaaccgactctttcgtgccccggaactcgtacgtccggctgcggcacctctgcaccaacacgtggattcagagcaccaatgtgcccattgacatcgaggaggagcggcccatccggctcatgctgggcacctgccccaccaaggaggacaaggaggcctttgccatcgtgtcagtgcccgtgtctgagatccgagacctggactttgccaatgacgccagctccatgctggccagtgccgtggagaaactcaacgagggcttcatcagccagaatgaccgcaggtttgtcatccagctgctggaagacctggtgttctttgtcagcgatgtccccaacaatgggcagaatgtcctggacatcatggtcactaagcccaaccgggaacggcagaagctgatgagggagcagaacatcctcaaacaggtctttggcattctgaaggccccgttccgtgagaaggggggtgaaggtcccctggtgcggctggaggagctgtcagaccagaagaacgccccctaccagcacatgttccgcctgtgctaccgcgtgttgcggcattcccaggaggactaccgcaagaaccaggagcacattgccaagcagtttgggatgatgcagtcccagattggctacgacatcctggccgaggacaccatcactgccctgctgcacaacaaccgcaagctcctggaaaagcacatcaccaagaccgaggtggagaccttcgtcagccttgtgcgcaagaaccgggagcccaggttcctggactacctctctgacctgtgtgtgtccaaccacatcgccatccccgtcacccaagagctcatctgcaagtgtgtgctggaccccaagaacagtgacattctcatccggaccgagcttcggcccgtgaaggagatggcccaatcccacgagtacctgagcatcgagtactcagaagaggaagtgtggctcacgtggactgacaagaataacgagcatcatgagaagagtgtgaggcagctggcccaggaggcgcgggccggcaacgcccacgacgagaatgtgctcagctactacaggtaccagctgaagctctttgcccgcatgtgcttggaccgccagtacttggccatcgacgagatctcccagcagctgggcgtggacctgattttcctgtgcatggcagacgagatgctgccctttgacctgcgcgcctccttctgccacctgatgctgcacgtgcacgtggaccgtgacccccaggagctggtcacgccggtcaagtttgcccgtctctggactgagatccccacagccatcaccatcaaggactatgattccaacctcaacgcgtcccgagatgacaagaagaacaagtttgccaacaccatggagttcgtggaggactacctcaacaatgtagtcagcgaggccgtgccctttgccaacgaggagaagaacaagctcacttttgaggtggtcagcctggcgcacaatctcatctacttcggcttctacagcttcagcgagctgctgcggctcactcgcacactgctgggcatcatcgactgtgtgcaggggcccccggccatgctgcaggcctatgaggaccccggtggcaagaatgtgcggcggtccatccagggcgtggggcacatgatgtccaccatggtgctgagccgcaagcagtccgtcttcagtgcccccagcctgtctgctggggccagtgctgctgagccgctggacagaagcaagtttgaggagaatgaggacattgtggtgatggagaccaagctgaagatcctggaaatccttcagttcatcctcaacgtccgcctggattaccgcatatcctacctgctgtctgtcttcaagaaggagtttgtggaggtgtttcccatgcaggacagtggggctgatggcacagcccctgccttcgactctaccactgccaacatgaacctggatcgcatcggggagcaggcggaggccatgtttggagtggggaagacaagcagcatgctggaggtggatgacgagggcggccgcatgttcctgcgcgtgctcatccacctcaccatgcacgactatgcgccnctggtctcgggtgccctgcagctgctcttcaagcacttcagccagcgccaggaggccatgcacaccttcaagcaggttcagctgctgatctcagcgcaggacgtggagaactacaaggtgatcaagtcggagctggaccggctgcggaccatggtggagaagtcagagctgtgggtggacaagaagggcagtggcaagggtgaggaggtggaggcaggcgccgccaaggacaagaaagagcgtcccacggacgaggagggctttctgcacccaccaggggagaaaagcagtgagaactaccagatcgtcaagggcatcctggaaaggctgaacaagatgtgcggggttggggagcaaatgaggaagaagcagcaacggctgctgaagaacatggatgcccacaaggtcatgctggacctgctgcagatcccctatgacaagggtgatgccaagatgatggagatcctgcgctacacgcaccagttcctgcagaagttctgtgcagggaaccccggcaaccaggccctgctgcacaaacacctgcacctcttcctcacgccagggctcctggaggcagagaccatgcagcacatcttcctgaacaactatcagctctgctccgagatcagcgagcctgtgttgcagcacttcgtgcacctgctggccacgcacgggcgccatgtgcagtacctggacttcctgcacaccgtcattaaggccgagggcaagtacgtcaagaagtgccaggacatgatcatgactgagctgaccaatgcaggtgacgatgtggtcgtgttctacaatgataaggcatcgctggcccacctgctggacatgatgaaggccgcccgcgacggcgtggaggaccacagccccctcatgtaccacatttccctggtggacctgctggccgcctgtgccgagggcaaaaacgtctacactgagatcaagtgcacctccctgctgccgctggaggacgtggtgtctgtggtgacgcatgaggactgcatcactgaggtgaaaatggcctatgtgaacttcgtgaaccactgctacgtggacacggaggtggagatgaaggagatctacaccagcaaccacatctggacgctctttgagaacttcaccctggacatggctcgggtctgcagcaagcgtgagaagcgcgtggctgaccccaccttggagaagtacgtgctgagcgttgtgctggacaccatcaacgccttcttcagctccccattctctgagaacagcacttccctgcagacacaccagacgattgtggtgcagctgctgcagtctaccacacgcctcctcgagtgtccgtggctacagcagcagcacaagggctccgtggaggcctgcatccggaccctcgccatggtggccaagggccgggccatcttgctgcccatggacctggatgcccacatcagctcgatgctcagcagtggagccagctgtgcagctgccgcccagcggaacgcctccagctacaaggcaaccacgcgggccttcccccgcgtcacccccaccgccaaccagtgggactacaagaacatcattgagaagctgcaggacatcatcacagccctggaggagcggctgaagcccctggtacaggctgagctgtccgtgctggtggatgtcctgcactggcctgagctgctcttcctggagggcagtgaggcctaccagcgctgcgagagtgggggcttcctgtccaagctgatccagcacaccaaggacctcatggagtcggaggagaagctgtgcatcaaggtgctgcggaccctgcagcagatgctgctcaagaagaccaagtacggggaccggggcaaccagctgcgcaagatgctgctgcaaaactacctccagaaccggaagtccacctcgcggggggaccttcccgaccccataggcactggcctggacccagactggtcggcaatcgcagccacccagtgccggctggacaaggagggggccaccaagttggtatgcgacctcatcaccagcaccaagaacgagaagatcttccaggagagcatcggcctggccatccacctgctggatggtggcaacacagagatccagaaatccttccacaacctgatgatgagtgacaagaagtcagagcgcttcttcaaggtgctgcacgaccgcatgaagcgggcccagcaggagaccaagtccacggtggcagtcaacatgaatgacctgggcagccagccacatgaggaccgcgagccagtcgaccccaccaccaaaggccgcgtggcctccttctcgatacctggctcctcatcccgctactcgctgggccccagcctgcgccgggggcacgaggtgagcgaacgtgtgcagagcagtgagatgggcacatccgtgctcatcatgcagcccatcctgcgctttctgcagctgctgtgtgagaaccacaaccgggacctgcagaacttcctgcgctgtcagaacaacaaaaccaactacaacttggtatgcgagacgctgcagttcctggacatcatgtgcggcagcaccacgggcggcctggggctgctggggctctacatcaatgaggacaacgtgggcctcgtcatccagaccttggagaccctcactgagtactgccagggcccctgccatgagaaccagacttgcattgtgactcacgagtccaatggcatagacatcatcaccgcactgatcctcaatgacatcagccccctgtgcaagtaccgcatggatctggtgctgcagctcaaggacaatgcctccaagctgctcctggctctgatggagagccggcatgacagtgaaaatgctgagcgaatcctcatcagcctgcggccccaggagctggtggacgtcatcaagaaggcctacctgcaggaggaagagcgtgagaactcggaggtgagcccacgtgaagtgggccataacatctatatcctggcgctgcagctctccaggcacaataaacagctgcagcacctgctgaagccggtgaagcgcattcaagaggaggaggccgagggtatctcttccatgctcagcctcaacaacaagcagctgtcacagatgctcaagtcctcagcgccagcacaggaggaggaggaagaccccctggcctactatgagaaccacacgtcccagatcgagattgtgcggcaggaccgcagcatggagcagatcgtgttcccagtgcccggcatctgccagttcctgacggaggaaaccaagcaccggctcttcaccactactgagcaggacgagcagggcagcaaagtgagcgacttcttcgaccagtcctccttcctgcacaacgagatggagtggcagcgcaagctccgcagcatgccgctgatctactggttctcccgccgcatgaccctgtggggcagcatctccttcaacctggccgtgtttatcaacatcatcattgccttcttctacccttacatggagggcgcgtccacaggcgtgctggactcccctctcatctcattgctcttctggatcctcatctgcttctccatcgcggccctgttcaccaagcgctacagcatccgccccctcatcgtggcgctcatcctgcgctccatctactatctgggcatcgggcccacactcaacatcctgggtgccctcaatctgaccaacaagatcgtgtttgtggtgagcttcgtgggcaaccgtggcaccttcatccggggctataaggccatggtcatggacatggaattcctctaccacgtgggctacatcctgaccagtgtcctgggcctctttgctcatgagctgttctacagcatcctgctctttgacctcatctaccgcgaggagacgctgttcaacgtcatcaagagtgtgacccgcaatggccgctccatcctgctgacagccctgctggccctcatcctggtctacctcttctccatcgtcggcttcctcttcctcaaggatgacttcattctcgaggtcgaccggctgcccaacaaccactccacagccagccccctggggatgccacatggagctgctgcatttgtggacacctgcagtggggacaagatggactgtgtctcagggctctcggtgcctgaggtcctggaagaggacagggagctggacagcacagagcgggcctgtgacactctgttgatgtgcatcgtcactgtcatgaaccatgggctacgcaacggtggtggcgtgggcgacattctccgcaagccctccaaagatgtgagcactcctgcccactc

SEQ ID NO: 313434 - DNA, 8758 bp, Homo sapiens
  misc_feature (4486)..(4486): n is a, c, g, or t
ttatttatttatttatttatttttttgtctatttgttgtgtaggggctatttcttgggctaatgcaagggcagggaccgaacccgcaacctcatggttcctagtcggattcgttaaccactgcgccacgacaggaactcccctgtgtctgacagttttaaagaaagcttttaagtggtgactcgacatcccgaggtgttgcggtcctattatcgcaatgggcactctatcttaggcgttcaaataaaggactaggaagcaaacacccaagcaccggggaacagaacagaaagaaagacggaaggagccaagagttttggagccaactcctggagagggagcggctgaactgattcggaagttggatctctttgtacacaggaatgcggagagaaaaaaaacaaaacccaccccattgcttcatttcccctccaagcctgagcactttctattgtgcaatgaaaaggcttttcacgttgagaaaaatgaatcccgaatttgctctgcaaagggatgagcgcgcctctgggcgccagcctgctctcagctgggcgcggagaccgcgcggtggccgcagggcggccgcggccagggcgctccagggcgcgccctccgcgagcggctccggggtgacgcccgccggagagctggactcccccttccgcgggcgcctgcactggctcttagccagccgagggcccgggtgcagatagtccgggaaccccgagggcggagagctccccactacgcctgggcctcccagggatggcagctccgagagccccctagacccggtgccttgcaggacgcctctggagatcaggagggctggcggcgcattcggcgtccgggaggccgggccccggacgcgcgaggagcgcggggcgcgggaaggcaggcgggtgcacatgggtgccggcgggcgagctgcggggggagggggggcggggtgtggcctccccgcctcccgggcgggatttgcatgtgtgtggtggccccagacttcctgctccttctacgctgcaggtacgcgcgggccgggcggggcgggcgggcggcgggcgcgccaagacgtgggcacctcctcacccggaccccgggccccgccgagccgcctcctggctcccgtggccgccagcccgccccggccgcaccgagcgtcgggatccgaggtgggagcgtacccctccccgctccccggacgcctcagtcctccgcactgagcttggccacgcgcccctaggcgccccccacgccctgggccccggagggccgcagccatgagtgaaatgtccagctttcttcacatcggggacatcgtctccctgtacgccgagggctccgtcaatggcttcatcagcactttggggctggtggatgaccgctgtgtggtggagcccgcggccggggacctggacaacccccctaagaagttccgtgactgcctcttcaaggtgtgccccatgaaccgctactcggcccagaagcagtactggaaggccaagcagactaagcaggacaaggagaagatcgctgatgtggtgttgctgcagaagctgcagcatgcggcgcagatggagcagaagcaaaatgacacggagaacaagaaggtgcatggggatgtcgtgaagtatggcagtgtgatccagctcctgcacatgaagagcaacaagtacctgacagtgaacaagcggcttccggccttgctggagaagaacgccatgcgggtgactctggatgccacaggcaacgagggttcctggctcttcatccagcccttctggaagctgcggagcaacggggacaacgtggtcgtgggggacaaggtgatcctgaatcctgtcaatgccgggcagcctctgcatgccagcaattacgagctcagcgacaacgccggctgcaaggaggtcaattctgtgaactgcaacaccagctggaagatcaacctgtttatgcagtttcgggaccacctggaggaggtgttgaaagggggagacgtggtgcggctgttccatgcggagcaggagaagttcctgacgtgtgacgagtacaagggcaagctgcaggtgttcctgcgaactacactgcgccagtctgccacctcggccaccagctccaatgctctctgggaggtggaggtggtccaccacgacccctgccgtggaggagctgggcactggaatggcttgtaccgcttcaagcacctggctacaggcaactacctggctgctgaggagaaccccagttacaaaggtgatgcctcagatcccaaggcagcaggaatgggggcacagggccgcacaggccgcaggaatgctggggagaagatcaagtactgcctggtggctgtgcctcatggcaatgacatcgcctctctctttgagctggaccccaccaccttgcagaaaaccgactctttcgtgccccggaactcgtacgtccggctgcggcacctctgcaccaacacgtggattcagagcaccaatgtgcccattgacatcgaggaggagcggcccatccggctcatgctgggcacctgccccaccaaggaggacaaggaggcctttgccatcgtgtcagtgcccgtgtctgagatccgagacctggactttgccaatgacgccagctccatgctggccagtgccgtggagaaactcaacgagggcttcatcagccagaatgaccgcaggtttgtcatccagctgctggaagacctggtgttctttgtcagcgatgtccccaacaatgggcagaatgtcctggacatcatggtcactaagcccaaccgggaacggcagaagctgatgagggagcagaacatcctcaaacaggtctttggcattctgaaggccccgttccgtgagaaggggggtgaaggtcccctggtgcggctggaggagctgtcagaccagaagaacgccccctaccagcacatgttccgcctgtgctaccgcgtgttgcggcattcccaggaggactaccgcaagaaccaggagcacattgccaagcagtttgggatgatgcagtcccagattggctacgacatcctggccgaggacaccatcactgccctgctgcacaacaaccgcaagctcctggaaaagcacatcaccaagaccgaggtggagaccttcgtcagccttgtgcgcaagaaccgggagcccaggttcctggactacctctctgacctgtgtgtgtccaaccacatcgccatccccgtcacccaagagctcatctgcaagtgtgtgctggaccccaagaacagtgacattctcatccggaccgagcttcggcccgtgaaggagatggcccaatcccacgagtacctgagcatcgagtactcagaagaggaagtgtggctcacgtggactgacaagaataacgagcatcatgagaagagtgtgaggcagctggcccaggaggcgcgggccggcaacgcccacgacgagaatgtgctcagctactacaggtaccagctgaagctctttgcccgcatgtgcttggaccgccagtacttggccatcgacgagatctcccagcagctgggcgtggacctgattttcctgtgcatggcagacgagatgctgccctttgacctgcgcgcctccttctgccacctgatgctgcacgtgcacgtggaccgtgacccccaggagctggtcacgccggtcaagtttgcccgtctctggactgagatccccacagccatcaccatcaaggactatgattccaacctcaacgcgtcccgagatgacaagaagaacaagtttgccaacaccatggagttcgtggaggactacctcaacaatgtagtcagcgaggccgtgccctttgccaacgaggagaagaacaagctcacttttgaggtggtcagcctggcgcacaatctcatctacttcggcttctacagcttcagcgagctgctgcggctcactcgcacactgctgggcatcatcgactgtgtgcaggggcccccggccatgctgcaggcctatgaggaccccggtggcaagaatgtgcggcggtccatccagggcgtggggcacatgatgtccaccatggtgctgagccgcaagcagtccgtcttcagtgcccccagcctgtctgctggggccagtgctgctgagccgctggacagaagcaagtttgaggagaatgaggacattgtggtgatggagaccaagctgaagatcctggaaatccttcagttcatcctcaacgtccgcctggattaccgcatatcctacctgctgtctgtcttcaagaaggagtttgtggaggtgtttcccatgcaggacagtggggctgatggcacagcccctgccttcgactctaccactgccaacatgaacctggatcgcatcggggagcaggcggaggccatgtttggagtggggaagacaagcagcatgctggaggtggatgacgagggcggccgcatgttcctgcgcgtgctcatccacctcaccatgcacgactatgcgccnctggtctcgggtgccctgcagctgctcttcaagcacttcagccagcgccaggaggccatgcacaccttcaagcaggttcagctgctgatctcagcgcaggacgtggagaactacaaggtgatcaagtcggagctggaccggctgcggaccatggtggagaagtcagagctgtgggtggacaagaagggcagtggcaagggtgaggaggtggaggcaggcgccgccaaggacaagaaagagcgtcccacggacgaggagggctttctgcacccaccaggggagaaaagcagtgagaactaccagatcgtcaagggcatcctggaaaggctgaacaagatgtgcggggttggggagcaaatgaggaagaagcagcaacggctgctgaagaacatggatgcccacaaggtcatgctggacctgctgcagatcccctatgacaagggtgatgccaagatgatggagatcctgcgctacacgcaccagttcctgcagaagttctgtgcagggaaccccggcaaccaggccctgctgcacaaacacctgcacctcttcctcacgccagggctcctggaggcagagaccatgcagcacatcttcctgaacaactatcagctctgctccgagatcagcgagcctgtgttgcagcacttcgtgcacctgctggccacgcacgggcgccatgtgcagtacctggacttcctgcacaccgtcattaaggccgagggcaagtacgtcaagaagtgccaggacatgatcatgactgagctgaccaatgcaggtgacgatgtggtcgtgttctacaatgataaggcatcgctggcccacctgctggacatgatgaaggccgcccgcgacggcgtggaggaccacagccccctcatgtaccacatttccctggtggacctgctggccgcctgtgccgagggcaaaaacgtctacactgagatcaagtgcacctccctgctgccgctggaggacgtggtgtctgtggtgacgcatgaggactgcatcactgaggtgaaaatggcctatgtgaacttcgtgaaccactgctacgtggacacggaggtggagatgaaggagatctacaccagcaaccacatctggacgctctttgagaacttcaccctggacatggctcgggtctgcagcaagcgtgagaagcgcgtggctgaccccaccttggagaagtacgtgctgagcgttgtgctggacaccatcaacgccttcttcagctccccattctctgagaacagcacttccctgcagacacaccagacgattgtggtgcagctgctgcagtctaccacacgcctcctcgagtgtccgtggctacagcagcagcacaagggctccgtggaggcctgcatccggaccctcgccatggtggccaagggccgggccatcttgctgcccatggacctggatgcccacatcagctcgatgctcagcagtggagccagctgtgcagctgccgcccagcggaacgcctccagctacaaggcaaccacgcgggccttcccccgcgtcacccccaccgccaaccagtgggactacaagaacatcattgagaagctgcaggacatcatcacagccctggaggagcggctgaagcccctggtacaggctgagctgtccgtgctggtggatgtcctgcactggcctgagctgctcttcctggagggcagtgaggcctaccagcgctgcgagagtgggggcttcctgtccaagctgatccagcacaccaaggacctcatggagtcggaggagaagctgtgcatcaaggtgctgcggaccctgcagcagatgctgctcaagaagaccaagtacggggaccggggcaaccagctgcgcaagatgctgctgcaaaactacctccagaaccggaagtccacctcgcggggggaccttcccgaccccataggcactggcctggacccagactggtcggcaatcgcagccacccagtgccggctggacaaggagggggccaccaagttggtatgcgacctcatcaccagcaccaagaacgagaagatcttccaggagagcatcggcctggccatccacctgctggatggtggcaacacagagatccagaaatccttccacaacctgatgatgagtgacaagaagtcagagcgcttcttcaaggtgctgcacgaccgcatgaagcgggcccagcaggagaccaagtccacggtggcagtcaacatgaatgacctgggcagccagccacatgaggaccgcgagccagtcgaccccaccaccaaaggccgcgtggcctccttctcgatacctggctcctcatcccgctactcgctgggccccagcctgcgccgggggcacgaggtgagcgaacgtgtgcagagcagtgagatgggcacatccgtgctcatcatgcagcccatcctgcgctttctgcagctgctgtgtgagaaccacaaccgggacctgcagaacttcctgcgctgtcagaacaacaaaaccaactacaacttggtatgcgagacgctgcagttcctggacatcatgtgcggcagcaccacgggcggcctggggctgctggggctctacatcaatgaggacaacgtgggcctcgtcatccagaccttggagaccctcactgagtactgccagggcccctgccatgagaaccagacttgcattgtgactcacgagtccaatggcatagacatcatcaccgcactgatcctcaatgacatcagccccctgtgcaagtaccgcatggatctggtgctgcagctcaaggacaatgcctccaagctgctcctggctctgatggagagccggcatgacagtgaaaatgctgagcgaatcctcatcagcctgcggccccaggagctggtggacgtcatcaagaaggcctacctgcaggaggaagagcgtgagaactcggaggtgagcccacgtgaagtgggccataacatctatatcctggcgctgcagctctccaggcacaataaacagctgcagcacctgctgaagccggtgaagcgcattcaagaggaggaggccgagggtatctcttccatgctcagcctcaacaacaagcagctgtcacagatgctcaagtcctcagcgccagcacaggaggaggaggaagaccccctggcctactatgagaaccacacgtcccagatcgagattgtgcggcaggaccgcagcatggagcagatcgtgttcccagtgcccggcatctgccagttcctgacggaggaaaccaagcaccggctcttcaccactactgagcaggacgagcagggcagcaaagtgagcgacttcttcgaccagtcctccttcctgcacaacgagatggagtggcagcgcaagctccgcagcatgccgctgatctactggttctcccgccgcatgaccctgtggggcagcatctccttcaacctggccgtgtttatcaacatcatcattgccttcttctacccttacatggagggcgcgtccacaggcgtgctggactcccctctcatctcattgctcttctggatcctcatctgcttctccatcgcggccctgttcaccaagcgctacagcatccgccccctcatcgtggcgctcatcctgcgctccatctactatctgggcatcgggcccacactcaacatcctgggtgccctcaatctgaccaacaagatcgtgtttgtggtgagcttcgtgggcaaccgtggcaccttcatccggggctataaggccatggtcatggacatggaattcctctaccacgtgggctacatcctgaccagtgtcctgggcctctttgctcatgagctgttctacagcatcctgctctttgacctcatctaccgcgaggagacgctgttcaacgtcatcaagagtgtgacccgcaatggccgctccatcctgctgacagccctgctggccctcatcctggtctacctcttctccatcgtcggcttcctcttcctcaaggatgacttcattctcgaggtcgaccggctgcccaacaaccactccacagccagccccctggggatgccacatggagctgctgcatttgtggacacctgcagtggggacaagatggactgtgtctcagggctctcggtgcctgaggtcctggaagaggacagggagctggacagcacagagcgggcctgtgacactctgttgatgtgcatcgtcactgtcatgaaccatgggctacgcaacggtggtggcgtgggcaggagtgctcacatctttggagggctttagagggagcctctagagtcg

SEQ ID NO: 313435 - DNA, 1426 bp, Homo sapiens
ccttcctgacccaccctcttccccactggcctctggccctgggcctggatgagaaggcaggtgccaaacccactctcccctgcatggcaagtcagactggggttgacaacccctgccttgggccgctaaagacaaggccaagtggaaactttagtacagggtggtggggccctctgtctctcatccccttcctctgacagctgccaggtaggtcctttgaggggatccccatcactggagatgggggagtttaaggccctcttgcctagacatcctcttctgcatctggcagtgcctgcatgaagatgaggcagcctctgttagtgggctggtttcccagctgcatcaaatccagggtttgtgacacgctaattgagaacaagggtttggtgctgacatcgacatccttaaagcaccccgaggggccctggcccgccgccagtgccgaatagcagctgggcccacaggggaagacgggtgccaagctcttccacagcacccatggagggaaggtgccaggcggcctgaccaggcctgttggcatctgcttaaccctagatgacggagcagcggaaacgcaggcaacgcctaggctttgtggatgtccagaactgcattagccgctgaggagagccaccgaaggccccaacaggggatgctcatcactggagactgcgactgggaagaacactgccccctccctcgggttgggtggcccagccagctggccagcctccactcccactctgccagacaccctgacacccacccaggctttgaagagcatggagggggagcctcagagctgacagtcctgcttagagcccttaaaaagacttgaaagttcactgggactcagtttaccttaatgccttagcagaagataaatcctacctagagacctttgttccttaaagcaataactgacaactctttgtagtcctccttgtgggtagttaagagtggggtcacccctttaactccaagcactacattttggcggctgccggcctctgggggaggtggcagttatgctgttactagtgattttagggctttgttatttaacttatttcaagggtgctgtgctcagccctgcccatggctgtgcagctccctccgtgcctcagatctgctgtagccagtgcagacctcactgtcgtgtccatgccacccccggcatggctccaggtggcctggtgactccatgatggacgatcttgctcccaggacctgcctcttcccaggcttcctggggaagagttgtacgcccaggcaacaagggctgagctgcgcttgcgtggctgtttcatgaccgcttgtttttctccttttggtgtaatgttttacaaatcctttggcctgagaactaatatgttaattgccttaaataaattaatagaaatctagtccgttaaaaaaaaaa

SEQ ID NO: 313436 - DNA, 7937 bp, Homo sapiens
  misc_feature (4486)..(4486): n is a, c, g, or t
ttatttatttatttatttatttttttgtctatttgttgtgtaggggctatttcttgggctaatgcaagggcagggaccgaacccgcaacctcatggttcctagtcggattcgttaaccactgcgccacgacaggaactcccctgtgtctgacagttttaaagaaagcttttaagtggtgactcgacatcccgaggtgttgcggtcctattatcgcaatgggcactctatcttaggcgttcaaataaaggactaggaagcaaacacccaagcaccggggaacagaacagaaagaaagacggaaggagccaagagttttggagccaactcctggagagggagcggctgaactgattcggaagttggatctctttgtacacaggaatgcggagagaaaaaaaacaaaacccaccccattgcttcatttcccctccaagcctgagcactttctattgtgcaatgaaaaggcttttcacgttgagaaaaatgaatcccgaatttgctctgcaaagggatgagcgcgcctctgggcgccagcctgctctcagctgggcgcggagaccgcgcggtggccgcagggcggccgcggccagggcgctccagggcgcgccctccgcgagcggctccggggtgacgcccgccggagagctggactcccccttccgcgggcgcctgcactggctcttagccagccgagggcccgggtgcagatagtccgggaaccccgagggcggagagctccccactacgcctgggcctcccagggatggcagctccgagagccccctagacccggtgccttgcaggacgcctctggagatcaggagggctggcggcgcattcggcgtccgggaggccgggccccggacgcgcgaggagcgcggggcgcgggaaggcaggcgggtgcacatgggtgccggcgggcgagctgcggggggagggggggcggggtgtggcctccccgcctcccgggcgggatttgcatgtgtgtggtggccccagacttcctgctccttctacgctgcaggtacgcgcgggccgggcggggcgggcgggcggcgggcgcgccaagacgtgggcacctcctcacccggaccccgggccccgccgagccgcctcctggctcccgtggccgccagcccgccccggccgcaccgagcgtcgggatccgaggtgggagcgtacccctccccgctccccggacgcctcagtcctccgcactgagcttggccacgcgcccctaggcgccccccacgccctgggccccggagggccgcagccatgagtgaaatgtccagctttcttcacatcggggacatcgtctccctgtacgccgagggctccgtcaatggcttcatcagcactttggggctggtggatgaccgctgtgtggtggagcccgcggccggggacctggacaacccccctaagaagttccgtgactgcctcttcaaggtgtgccccatgaaccgctactcggcccagaagcagtactggaaggccaagcagactaagcaggacaaggagaagatcgctgatgtggtgttgctgcagaagctgcagcatgcggcgcagatggagcagaagcaaaatgacacggagaacaagaaggtgcatggggatgtcgtgaagtatggcagtgtgatccagctcctgcacatgaagagcaacaagtacctgacagtgaacaagcggcttccggccttgctggagaagaacgccatgcgggtgactctggatgccacaggcaacgagggttcctggctcttcatccagcccttctggaagctgcggagcaacggggacaacgtggtcgtgggggacaaggtgatcctgaatcctgtcaatgccgggcagcctctgcatgccagcaattacgagctcagcgacaacgccggctgcaaggaggtcaattctgtgaactgcaacaccagctggaagatcaacctgtttatgcagtttcgggaccacctggaggaggtgttgaaagggggagacgtggtgcggctgttccatgcggagcaggagaagttcctgacgtgtgacgagtacaagggcaagctgcaggtgttcctgcgaactacactgcgccagtctgccacctcggccaccagctccaatgctctctgggaggtggaggtggtccaccacgacccctgccgtggaggagctgggcactggaatggcttgtaccgcttcaagcacctggctacaggcaactacctggctgctgaggagaaccccagttacaaaggtgatgcctcagatcccaaggcagcaggaatgggggcacagggccgcacaggccgcaggaatgctggggagaagatcaagtactgcctggtggctgtgcctcatggcaatgacatcgcctctctctttgagctggaccccaccaccttgcagaaaaccgactctttcgtgccccggaactcgtacgtccggctgcggcacctctgcaccaacacgtggattcagagcaccaatgtgcccattgacatcgaggaggagcggcccatccggctcatgctgggcacctgccccaccaaggaggacaaggaggcctttgccatcgtgtcagtgcccgtgtctgagatccgagacctggactttgccaatgacgccagctccatgctggccagtgccgtggagaaactcaacgagggcttcatcagccagaatgaccgcaggtttgtcatccagctgctggaagacctggtgttctttgtcagcgatgtccccaacaatgggcagaatgtcctggacatcatggtcactaagcccaaccgggaacggcagaagctgatgagggagcagaacatcctcaaacaggtctttggcattctgaaggccccgttccgtgagaaggggggtgaaggtcccctggtgcggctggaggagctgtcagaccagaagaacgccccctaccagcacatgttccgcctgtgctaccgcgtgttgcggcattcccaggaggactaccgcaagaaccaggagcacattgccaagcagtttgggatgatgcagtcccagattggctacgacatcctggccgaggacaccatcactgccctgctgcacaacaaccgcaagctcctggaaaagcacatcaccaagaccgaggtggagaccttcgtcagccttgtgcgcaagaaccgggagcccaggttcctggactacctctctgacctgtgtgtgtccaaccacatcgccatccccgtcacccaagagctcatctgcaagtgtgtgctggaccccaagaacagtgacattctcatccggaccgagcttcggcccgtgaaggagatggcccaatcccacgagtacctgagcatcgagtactcagaagaggaagtgtggctcacgtggactgacaagaataacgagcatcatgagaagagtgtgaggcagctggcccaggaggcgcgggccggcaacgcccacgacgagaatgtgctcagctactacaggtaccagctgaagctctttgcccgcatgtgcttggaccgccagtacttggccatcgacgagatctcccagcagctgggcgtggacctgattttcctgtgcatggcagacgagatgctgccctttgacctgcgcgcctccttctgccacctgatgctgcacgtgcacgtggaccgtgacccccaggagctggtcacgccggtcaagtttgcccgtctctggactgagatccccacagccatcaccatcaaggactatgattccaacctcaacgcgtcccgagatgacaagaagaacaagtttgccaacaccatggagttcgtggaggactacctcaacaatgtagtcagcgaggccgtgccctttgccaacgaggagaagaacaagctcacttttgaggtggtcagcctggcgcacaatctcatctacttcggcttctacagcttcagcgagctgctgcggctcactcgcacactgctgggcatcatcgactgtgtgcaggggcccccggccatgctgcaggcctatgaggaccccggtggcaagaatgtgcggcggtccatccagggcgtggggcacatgatgtccaccatggtgctgagccgcaagcagtccgtcttcagtgcccccagcctgtctgctggggccagtgctgctgagccgctggacagaagcaagtttgaggagaatgaggacattgtggtgatggagaccaagctgaagatcctggaaatccttcagttcatcctcaacgtccgcctggattaccgcatatcctacctgctgtctgtcttcaagaaggagtttgtggaggtgtttcccatgcaggacagtggggctgatggcacagcccctgccttcgactctaccactgccaacatgaacctggatcgcatcggggagcaggcggaggccatgtttggagtggggaagacaagcagcatgctggaggtggatgacgagggcggccgcatgttcctgcgcgtgctcatccacctcaccatgcacgactatgcgccnctggtctcgggtgccctgcagctgctcttcaagcacttcagccagcgccaggaggccatgcacaccttcaagcaggttcagctgctgatctcagcgcaggacgtggagaactacaaggtgatcaagtcggagctggaccggctgcggaccatggtggagaagtcagagctgtgggtggacaagaagggcagtggcaagggtgaggaggtggaggcaggcgccgccaaggacaagaaagagcgtcccacggacgaggagggctttctgcacccaccaggggagaaaagcagtgagaactaccagatcgtcaagggcatcctggaaaggctgaacaagatgtgcggggttggggagcaaatgaggaagaagcagcaacggctgctgaagaacatggatgcccacaaggtcatgctggacctgctgcagatcccctatgacaagggtgatgccaagatgatggagatcctgcgctacacgcaccagttcctgcagaagttctgtgcagggaaccccggcaaccaggccctgctgcacaaacacctgcacctcttcctcacgccagggctcctggaggcagagaccatgcagcacatcttcctgaacaactatcagctctgctccgagatcagcgagcctgtgttgcagcacttcgtgcacctgctggccacgcacgggcgccatgtgcagtacctggacttcctgcacaccgtcattaaggccgagggcaagtacgtcaagaagtgccaggacatgatcatgactgagctgaccaatgcaggtgacgatgtggtcgtgttctacaatgataaggcatcgctggcccacctgctggacatgatgaaggccgcccgcgacggcgtggaggaccacagccccctcatgtaccacatttccctggtggacctgctggccgcctgtgccgagggcaaaaacgtctacactgagatcaagtgcacctccctgctgccgctggaggacgtggtgtctgtggtgacgcatgaggactgcatcactgaggtgaaaatggcctatgtgaacttcgtgaaccactgctacgtggacacggaggtggagatgaaggagatctacaccagcaaccacatctggacgctctttgagaacttcaccctggacatggctcgggtctgcagcaagcgtgagaagcgcgtggctgaccccaccttggagaagtacgtgctgagcgttgtgctggacaccatcaacgccttcttcagctccccattctctgagaacagcacttccctgcagacacaccagacgattgtggtgcagctgctgcagtctaccacacgcctcctcgagtgtccgtggctacagcagcagcacaagggctccgtggaggcctgcatccggaccctcgccatggtggccaagggccgggccatcttgctgcccatggacctggatgcccacatcagctcgatgctcagcagtggagccagctgtgcagctgccgcccagcggaacgcctccagctacaaggcaaccacgcgggccttcccccgcgtcacccccaccgccaaccagtgggactacaagaacatcattgagaagctgcaggacatcatcacagccctggaggagcggctgaagcccctggtacaggctgagctgtccgtgctggtggatgtcctgcactggcctgagctgctcttcctggagggcagtgaggcctaccagcgctgcgagagtgggggcttcctgtccaagctgatccagcacaccaaggacctcatggagtcggaggagaagctgtgcatcaaggtgctgcggaccctgcagcagatgctgctcaagaagaccaagtacggggaccggggcaaccagctgcgcaagatgctgctgcaaaactacctccagaaccggaagtccacctcgcggggggaccttcccgaccccataggcactggcctggacccagactggtcggcaatcgcagccacccagtgccggctggacaaggagggggccaccaagttggtatgcgacctcatcaccagcaccaagaacgagaagatcttccaggagagcatcggcctggccatccacctgctggatggtggcaacacagagatccagaaatccttccacaacctgatgatgagtgacaagaagtcagagcgcttcttcaaggtgctgcacgaccgcatgaagcgggcccagcaggagaccaagtccacggtggcagtcaacatgaatgacctgggcagccagccacatgaggaccgcgagccagtcgaccccaccaccaaaggccgcgtggcctccttctcgatacctggctcctcatcccgctactcgctgggccccagcctgcgccgggggcacgaggtgagcgaacgtgtgcagagcagtgagatgggcacatccgtgctcatcatgcagcccatcctgcgctttctgcagctgctgtgtgagaaccacaaccgggacctgcagaacttcctgcgctgtcagaacaacaaaaccaactacaacttggtatgcgagacgctgcagttcctggacatcatgtgcggcagcaccacgggcggcctggggctgctggggctctacatcaatgaggacaacgtgggcctcgtcatccagaccttggagaccctcactgagtactgccagggcccctgccatgagaaccagacttgcattgtgactcacgagtccaatggcatagacatcatcaccgcactgatcctcaatgacatcagccccctgtgcaagtaccgcatggatctggtgctgcagctcaaggacaatgcctccaagctgctcctggctctgatggagagccggcatgacagtgaaaatgctgagcgaatcctcatcagcctgcggccccaggagctggtggacgtcatcaagaaggcctacctgcaggaggaagagcgtgagaactcggaggtgagcccacgtgaagtgggccataacatctatatcctggcgctgcagctctccaggcacaataaacagctgcagcacctgctgaagccggtgaagcgcattcaagaggaggaggccgagggtatctcttccatgctcagcctcaacaacaagcagctgtcacagatgctcaagtcctcagcgccagcacaggaggaggaggaagaccccctggcctactatgagaaccacacgtcccagatcgagattgtgcggcaggaccgcagcatggagcagatcgtgttcccagtgcccggcatctgccagttccatgatggacgatcttgctcccaggacctgcctcttcccaggcttcctggggaagagttgtacgcccaggcaacaagggctgagctgcgcttgcgtggctgtttcatgaccgcttgtttttctccttttggtgtaatgttttacaaatcctttggcctgagaactaatatgttaattgccttaaataaattaatagaaatctagtccgttaaaaaaaaaa

SEQ ID NO: 313437 - DNA, 5622 bp, Homo sapiens
  misc_feature (4486)..(4486): n is a, c, g, or t
ttatttatttatttatttatttttttgtctatttgttgtgtaggggctatttcttgggctaatgcaagggcagggaccgaacccgcaacctcatggttcctagtcggattcgttaaccactgcgccacgacaggaactcccctgtgtctgacagttttaaagaaagcttttaagtggtgactcgacatcccgaggtgttgcggtcctattatcgcaatgggcactctatcttaggcgttcaaataaaggactaggaagcaaacacccaagcaccggggaacagaacagaaagaaagacggaaggagccaagagttttggagccaactcctggagagggagcggctgaactgattcggaagttggatctctttgtacacaggaatgcggagagaaaaaaaacaaaacccaccccattgcttcatttcccctccaagcctgagcactttctattgtgcaatgaaaaggcttttcacgttgagaaaaatgaatcccgaatttgctctgcaaagggatgagcgcgcctctgggcgccagcctgctctcagctgggcgcggagaccgcgcggtggccgcagggcggccgcggccagggcgctccagggcgcgccctccgcgagcggctccggggtgacgcccgccggagagctggactcccccttccgcgggcgcctgcactggctcttagccagccgagggcccgggtgcagatagtccgggaaccccgagggcggagagctccccactacgcctgggcctcccagggatggcagctccgagagccccctagacccggtgccttgcaggacgcctctggagatcaggagggctggcggcgcattcggcgtccgggaggccgggccccggacgcgcgaggagcgcggggcgcgggaaggcaggcgggtgcacatgggtgccggcgggcgagctgcggggggagggggggcggggtgtggcctccccgcctcccgggcgggatttgcatgtgtgtggtggccccagacttcctgctccttctacgctgcaggtacgcgcgggccgggcggggcgggcgggcggcgggcgcgccaagacgtgggcacctcctcacccggaccccgggccccgccgagccgcctcctggctcccgtggccgccagcccgccccggccgcaccgagcgtcgggatccgaggtgggagcgtacccctccccgctccccggacgcctcagtcctccgcactgagcttggccacgcgcccctaggcgccccccacgccctgggccccggagggccgcagccatgagtgaaatgtccagctttcttcacatcggggacatcgtctccctgtacgccgagggctccgtcaatggcttcatcagcactttggggctggtggatgaccgctgtgtggtggagcccgcggccggggacctggacaacccccctaagaagttccgtgactgcctcttcaaggtgtgccccatgaaccgctactcggcccagaagcagtactggaaggccaagcagactaagcaggacaaggagaagatcgctgatgtggtgttgctgcagaagctgcagcatgcggcgcagatggagcagaagcaaaatgacacggagaacaagaaggtgcatggggatgtcgtgaagtatggcagtgtgatccagctcctgcacatgaagagcaacaagtacctgacagtgaacaagcggcttccggccttgctggagaagaacgccatgcgggtgactctggatgccacaggcaacgagggttcctggctcttcatccagcccttctggaagctgcggagcaacggggacaacgtggtcgtgggggacaaggtgatcctgaatcctgtcaatgccgggcagcctctgcatgccagcaattacgagctcagcgacaacgccggctgcaaggaggtcaattctgtgaactgcaacaccagctggaagatcaacctgtttatgcagtttcgggaccacctggaggaggtgttgaaagggggagacgtggtgcggctgttccatgcggagcaggagaagttcctgacgtgtgacgagtacaagggcaagctgcaggtgttcctgcgaactacactgcgccagtctgccacctcggccaccagctccaatgctctctgggaggtggaggtggtccaccacgacccctgccgtggaggagctgggcactggaatggcttgtaccgcttcaagcacctggctacaggcaactacctggctgctgaggagaaccccagttacaaaggtgatgcctcagatcccaaggcagcaggaatgggggcacagggccgcacaggccgcaggaatgctggggagaagatcaagtactgcctggtggctgtgcctcatggcaatgacatcgcctctctctttgagctggaccccaccaccttgcagaaaaccgactctttcgtgccccggaactcgtacgtccggctgcggcacctctgcaccaacacgtggattcagagcaccaatgtgcccattgacatcgaggaggagcggcccatccggctcatgctgggcacctgccccaccaaggaggacaaggaggcctttgccatcgtgtcagtgcccgtgtctgagatccgagacctggactttgccaatgacgccagctccatgctggccagtgccgtggagaaactcaacgagggcttcatcagccagaatgaccgcaggtttgtcatccagctgctggaagacctggtgttctttgtcagcgatgtccccaacaatgggcagaatgtcctggacatcatggtcactaagcccaaccgggaacggcagaagctgatgagggagcagaacatcctcaaacaggtctttggcattctgaaggccccgttccgtgagaaggggggtgaaggtcccctggtgcggctggaggagctgtcagaccagaagaacgccccctaccagcacatgttccgcctgtgctaccgcgtgttgcggcattcccaggaggactaccgcaagaaccaggagcacattgccaagcagtttgggatgatgcagtcccagattggctacgacatcctggccgaggacaccatcactgccctgctgcacaacaaccgcaagctcctggaaaagcacatcaccaagaccgaggtggagaccttcgtcagccttgtgcgcaagaaccgggagcccaggttcctggactacctctctgacctgtgtgtgtccaaccacatcgccatccccgtcacccaagagctcatctgcaagtgtgtgctggaccccaagaacagtgacattctcatccggaccgagcttcggcccgtgaaggagatggcccaatcccacgagtacctgagcatcgagtactcagaagaggaagtgtggctcacgtggactgacaagaataacgagcatcatgagaagagtgtgaggcagctggcccaggaggcgcgggccggcaacgcccacgacgagaatgtgctcagctactacaggtaccagctgaagctctttgcccgcatgtgcttggaccgccagtacttggccatcgacgagatctcccagcagctgggcgtggacctgattttcctgtgcatggcagacgagatgctgccctttgacctgcgcgcctccttctgccacctgatgctgcacgtgcacgtggaccgtgacccccaggagctggtcacgccggtcaagtttgcccgtctctggactgagatccccacagccatcaccatcaaggactatgattccaacctcaacgcgtcccgagatgacaagaagaacaagtttgccaacaccatggagttcgtggaggactacctcaacaatgtagtcagcgaggccgtgccctttgccaacgaggagaagaacaagctcacttttgaggtggtcagcctggcgcacaatctcatctacttcggcttctacagcttcagcgagctgctgcggctcactcgcacactgctgggcatcatcgactgtgtgcaggggcccccggccatgctgcaggcctatgaggaccccggtggcaagaatgtgcggcggtccatccagggcgtggggcacatgatgtccaccatggtgctgagccgcaagcagtccgtcttcagtgcccccagcctgtctgctggggccagtgctgctgagccgctggacagaagcaagtttgaggagaatgaggacattgtggtgatggagaccaagctgaagatcctggaaatccttcagttcatcctcaacgtccgcctggattaccgcatatcctacctgctgtctgtcttcaagaaggagtttgtggaggtgtttcccatgcaggacagtggggctgatggcacagcccctgccttcgactctaccactgccaacatgaacctggatcgcatcggggagcaggcggaggccatgtttggagtggggaagacaagcagcatgctggaggtggatgacgagggcggccgcatgttcctgcgcgtgctcatccacctcaccatgcacgactatgcgccnctggtctcgggtgccctgcagctgctcttcaagcacttcagccagcgccaggaggccatgcacaccttcaagcaggttcagctgctgatctcagcgcaggacgtggagaactacaaggtgatcaagtcggagctggaccggctgcggaccatggtggagaagtcagagctgtgggtggacaagaagggcagtggcaagggtgaggaggtggaggcaggcgccgccaaggacaagaaagagcgtcccacggacgaggagggctttctgcacccaccaggggagaaaagcagtgagaactaccagatcgtcaagggcatcctggaaaggctgaacaagatgtgcggggttggggagcaaatgaggaagaagcagcaacggctgctgaagaacatggatgcccacaaggtcatgctggacctgctgcagatcccctatgacaaggtggctctgacttctgacctctgactccccagggtggcttccccctgaaccccggcctgacctgtatgctaggccctaatgcaggcaacctctcccagcctcgcctggcctcttacactgccctgtttgtttgcaggcacaccttgaccctgaacctgtcttagtatcggttcaacctttgaccctctacccctcatcctaattccctttgaccttgatttgaccccagccttatgctgattcttgaccttgactcccttttcttccccctctccagcctaaccctgataatctcagcttcatctcaacctttgaccctcagcttccttaccttgacccatgttgaccctaactgaacccaacctctccttgacccatgacatcaatgctggccttgtcctgacccctggttttgattcctcatcctgacatcttatgctgacctgtccccaggcccaccctggctcctgactccaatcttagtctcatctccccttttgaccctcagccccttgccatgactgatcttgatctcagtatgtcccaggcctcaccttgacgctgaccgtgacacttcaccttgccccaactccagcctcatcttggccattgagctcccgcccctcacacatttccatcctgacctgggggccccactttccctttacgctggcctcttcacggtcccagtccca

SEQ ID NO: 313438 - DNA, 4389 bp, Homo sapiens
ttatttatttatttatttatttttttgtctatttgttgtgtaggggctatttcttgggctaatgcaagggcagggaccgaacccgcaacctcatggttcctagtcggattcgttaaccactgcgccacgacaggaactcccctgtgtctgacagttttaaagaaagcttttaagtggtgactcgacatcccgaggtgttgcggtcctattatcgcaatgggcactctatcttaggcgttcaaataaaggactaggaagcaaacacccaagcaccggggaacagaacagaaagaaagacggaaggagccaagagttttggagccaactcctggagagggagcggctgaactgattcggaagttggatctctttgtacacaggaatgcggagagaaaaaaaacaaaacccaccccattgcttcatttcccctccaagcctgagcactttctattgtgcaatgaaaaggcttttcacgttgagaaaaatgaatcccgaatttgctctgcaaagggatgagcgcgcctctgggcgccagcctgctctcagctgggcgcggagaccgcgcggtggccgcagggcggccgcggccagggcgctccagggcgcgccctccgcgagcggctccggggtgacgcccgccggagagctggactcccccttccgcgggcgcctgcactggctcttagccagccgagggcccgggtgcagatagtccgggaaccccgagggcggagagctccccactacgcctgggcctcccagggatggcagctccgagagccccctagacccggtgccttgcaggacgcctctggagatcaggagggctggcggcgcattcggcgtccgggaggccgggccccggacgcgcgaggagcgcggggcgcgggaaggcaggcgggtgcacatgggtgccggcgggcgagctgcggggggagggggggcggggtgtggcctccccgcctcccgggcgggatttgcatgtgtgtggtggccccagacttcctgctccttctacgctgcaggtacgcgcgggccgggcggggcgggcgggcggcgggcgcgccaagacgtgggcacctcctcacccggaccccgggccccgccgagccgcctcctggctcccgtggccgccagcccgccccggccgcaccgagcgtcgggatccgaggtgggagcgtacccctccccgctccccggacgcctcagtcctccgcactgagcttggccacgcgcccctaggcgccccccacgccctgggccccggagggccgcagccatgagtgaaatgtccagctttcttcacatcggggacatcgtctccctgtacgccgagggctccgtcaatggcttcatcagcactttggggctggtggatgaccgctgtgtggtggagcccgcggccggggacctggacaacccccctaagaagttccgtgactgcctcttcaaggtgtgccccatgaaccgctactcggcccagaagcagtactggaaggccaagcagactaagcaggacaaggagaagatcgctgatgtggtgttgctgcagaagctgcagcatgcggcgcagatggagcagaagcaaaatgacacggagaacaagaaggtgcatggggatgtcgtgaagtatggcagtgtgatccagctcctgcacatgaagagcaacaagtacctgacagtgaacaagcggcttccggccttgctggagaagaacgccatgcgggtgactctggatgccacaggcaacgagggttcctggctcttcatccagcccttctggaagctgcggagcaacggggacaacgtggtcgtgggggacaaggtgatcctgaatcctgtcaatgccgggcagcctctgcatgccagcaattacgagctcagcgacaacgccggctgcaaggaggtcaattctgtgaactgcaacaccagctggaagatcaacctgtttatgcagtttcgggaccacctggaggaggtgttgaaagggggagacgtggtgcggctgttccatgcggagcaggagaagttcctgacgtgtgacgagtacaagggcaagctgcaggtgttcctgcgaactacactgcgccagtctgccacctcggccaccagctccaatgctctctgggaggtggaggtggtccaccacgacccctgccgtggaggagctgggcactggaatggcttgtaccgcttcaagcacctggctacaggcaactacctggctgctgaggagaaccccagttacaaaggtgatgcctcagatcccaaggcagcaggaatgggggcacagggccgcacaggccgcaggaatgctggggagaagatcaagtactgcctggtggctgtgcctcatggcaatgacatcgcctctctctttgagctggaccccaccaccttgcagaaaaccgactctttcgtgccccggaactcgtacgtccggctgcggcacctctgcaccaacacgtggattcagagcaccaatgtgcccattgacatcgaggaggagcggcccatccggctcatgctgggcacctgccccaccaaggaggacaaggaggcctttgccatcgtgtcagtgcccgtgtctgagatccgagacctggactttgccaatgacgccagctccatgctggccagtgccgtggagaaactcaacgagggcttcatcagccagaatgaccgcaggtttgtcatccagctgctggaagacctggtgttctttgtcagcgatgtccccaacaatgggcagaatgtcctggacatcatggtcactaagcccaaccgggaacggcagaagctgatgagggagcagaacatcctcaaacaggtctttggcattctgaaggccccgttccgtgagaaggggggtgaaggtcccctggtgcggctggaggagctgtcagaccagaagaacgccccctaccagcacatgttccgcctgtgctaccgcgtgttgcggcattcccaggaggactaccgcaagaaccaggagcacattgccaagcagtttgggatgatgcagtcccagattggctacgacatcctggccgaggacaccatcactgccctgctgcacaacaaccgcaagctcctggaaaagcacatcaccaagaccgaggtggagaccttcgtcagccttgtgcgcaagaaccgggagcccaggttcctggactacctctctgacctgtgtgtgtccaaccacatcgccatccccgtcacccaagagctcatctgcaagtgtgtgctggaccccaagaacagtgacattctcatccggaccgagcttcggcccgtgaaggagatggcccaatcccacgagtacctgagcatcgagtactcagaagaggaagtgtggctcacgtggactgacaagaataacgagcatcatgagaagagtgtgaggcagctggcccaggaggcgcgggccggcaacgcccacgacgagaatgtgctcagctactacaggtaccagctgaagctctttgcccgcatgtgcttggaccgccagtacttggccatcgacgagatctcccagcagctgggcgtggacctgattttcctgtgcatggcagacgagatgctgccctttgacctgcgcgcctccttctgccacctgatgctgcacgtgcacgtggaccgtgacccccaggagctggtcacgccggtcaagtttgcccgtctctggactgagatccccacagccatcaccatcaaggactatgattccaacctcaacgcgtcccgagatgacaagaagaacaagtttgccaacaccatggagttcgtggaggactacctcaacaatgtagtcagcgaggccgtgccctttgccaacgaggagaagaacaagctcacttttgaggtggtcagcctggcgcacaatctcatctacttcggcttctacagcttcagcgagctgctgcggctcactcgcacactgctgggcatcatcgactgtgtgcaggggcccccggccatgctgcaggcctatgaggaccccggtggcaagaatgtgcggcggtccatccagggcgtggggcacatgatgtccaccatggtgctgagccgcaagcagtccgtcttcagtgcccccagcctgtctgctggggccagtgctgctgagccgctggacagaagcaagtttgaggagaatgaggacattgtggtgatggagaccaagctgaagatcctggaaatccttcagttcatcctcaacgtccgcctggattaccgcatatcctacctgctgtctgtcttcaagaaggagtttgtggaggtgtttcccatgcaggacagtggggctgatggcacagcccctgccttcgactctaccactgccaacatgactgatcaatcgggatgcacaaaccgaagggatcctctaga

SEQ ID NO: 313439 - DNA, 3769 bp, Homo sapiens
ttatttatttatttatttatttttttgtctatttgttgtgtaggggctatttcttgggctaatgcaagggcagggaccgaacccgcaacctcatggttcctagtcggattcgttaaccactgcgccacgacaggaactcccctgtgtctgacagttttaaagaaagcttttaagtggtgactcgacatcccgaggtgttgcggtcctattatcgcaatgggcactctatcttaggcgttcaaataaaggactaggaagcaaacacccaagcaccggggaacagaacagaaagaaagacggaaggagccaagagttttggagccaactcctggagagggagcggctgaactgattcggaagttggatctctttgtacacaggaatgcggagagaaaaaaaacaaaacccaccccattgcttcatttcccctccaagcctgagcactttctattgtgcaatgaaaaggcttttcacgttgagaaaaatgaatcccgaatttgctctgcaaagggatgagcgcgcctctgggcgccagcctgctctcagctgggcgcggagaccgcgcggtggccgcagggcggccgcggccagggcgctccagggcgcgccctccgcgagcggctccggggtgacgcccgccggagagctggactcccccttccgcgggcgcctgcactggctcttagccagccgagggcccgggtgcagatagtccgggaaccccgagggcggagagctccccactacgcctgggcctcccagggatggcagctccgagagccccctagacccggtgccttgcaggacgcctctggagatcaggagggctggcggcgcattcggcgtccgggaggccgggccccggacgcgcgaggagcgcggggcgcgggaaggcaggcgggtgcacatgggtgccggcgggcgagctgcggggggagggggggcggggtgtggcctccccgcctcccgggcgggatttgcatgtgtgtggtggccccagacttcctgctccttctacgctgcaggtacgcgcgggccgggcggggcgggcgggcggcgggcgcgccaagacgtgggcacctcctcacccggaccccgggccccgccgagccgcctcctggctcccgtggccgccagcccgccccggccgcaccgagcgtcgggatccgaggtgggagcgtacccctccccgctccccggacgcctcagtcctccgcactgagcttggccacgcgcccctaggcgccccccacgccctgggccccggagggccgcagccatgagtgaaatgtccagctttcttcacatcggggacatcgtctccctgtacgccgagggctccgtcaatggcttcatcagcactttggggctggtggatgaccgctgtgtggtggagcccgcggccggggacctggacaacccccctaagaagttccgtgactgcctcttcaaggtgtgccccatgaaccgctactcggcccagaagcagtactggaaggccaagcagactaagcaggacaaggagaagatcgctgatgtggtgttgctgcagaagctgcagcatgcggcgcagatggagcagaagcaaaatgacacggagaacaagaaggtgcatggggatgtcgtgaagtatggcagtgtgatccagctcctgcacatgaagagcaacaagtacctgacagtgaacaagcggcttccggccttgctggagaagaacgccatgcgggtgactctggatgccacaggcaacgagggttcctggctcttcatccagcccttctggaagctgcggagcaacggggacaacgtggtcgtgggggacaaggtgatcctgaatcctgtcaatgccgggcagcctctgcatgccagcaattacgagctcagcgacaacgccggctgcaaggaggtcaattctgtgaactgcaacaccagctggaagatcaacctgtttatgcagtttcgggaccacctggaggaggtgttgaaagggggagacgtggtgcggctgttccatgcggagcaggagaagttcctgacgtgtgacgagtacaagggcaagctgcaggtgttcctgcgaactacactgcgccagtctgccacctcggccaccagctccaatgctctctgggaggtggaggtggtccaccacgacccctgccgtggaggagctgggcactggaatggcttgtaccgcttcaagcacctggctacaggcaactacctggctgctgaggagaaccccagttacaaaggtgatgcctcagatcccaaggcagcaggaatgggggcacagggccgcacaggccgcaggaatgctggggagaagatcaagtactgcctggtggctgtgcctcatggcaatgacatcgcctctctctttgagctggaccccaccaccttgcagaaaaccgactctttcgtgccccggaactcgtacgtccggctgcggcacctctgcaccaacacgtggattcagagcaccaatgtgcccattgacatcgaggaggagcggcccatccggctcatgctgggcacctgccccaccaaggaggacaaggaggcctttgccatcgtgtcagtgcccgtgtctgagatccgagacctggactttgccaatgacgccagctccatgctggccagtgccgtggagaaactcaacgagggcttcatcagccagaatgaccgcaggtttgtcatccagctgctggaagacctggtgttctttgtcagcgatgtccccaacaatgggcagaatgtcctggacatcatggtcactaagcccaaccgggaacggcagaagctgatgagggagcagaacatcctcaaacaggtctttggcattctgaaggccccgttccgtgagaaggggggtgaaggtcccctggtgcggctggaggagctgtcagaccagaagaacgccccctaccagcacatgttccgcctgtgctaccgcgtgttgcggcattcccaggaggactaccgcaagaaccaggagcacattgccaagcagtttgggatgatgcagtcccagattggctacgacatcctggccgaggacaccatcactgccctgctgcacaacaaccgcaagctcctggaaaagcacatcaccaagaccgaggtggagaccttcgtcagccttgtgcgcaagaaccgggagcccaggttcctggactacctctctgacctgtgtgtgtccaaccacatcgccatccccgtcacccaagagctcatctgcaagtgtgtgctggaccccaagaacagtgacattctcatccggaccgagcttcggcccgtgaaggagatggcccaatcccacgagtacctgagcatcgagtactcagaagaggaagtgtggctcacgtggactgacaagaataacgagcatcatgagaagagtgtgaggcagctggcccaggaggcgcgggccggcaacgcccacgacgagaatgtgctcagctactacaggtaccagctgaagctctttgcccgcatgtgcttggaccgccagtacttggccatcgacgagatctcccagcagctgggcgtggacctgattttcctgtgcatggcagacgagatgctgccctttgacctgcgcgcctccttctgccacctgatgctgcacgtgcacgtggaccgtgacccccaggagctggtcacgccggtcaagtttgcccgtctctggactgagatccccatatctaacaacgtgaaaatcaaatgacagtttgaacatacttaacccaccccataactccccagacta

SEQ ID NO: 313440 - DNA, 645 bp, Homo sapiens
ttatttatttatttatttatttttttgtctatttgttgtgtaggggctatttcttgggctaatgcaagggcagggaccgaacccgcaacctcatggttcctagtcggattcgttaaccactgcgccacgacaggaactcccctgtgtctgacagttttaaagaaagcttttaagtggtgactcgacatcccgaggtgttgcggtcctattatcgcaatgggcactctatcttaggcgttcaaataaaggactaggaagcaaacacccaagcaccggggaacagaacagaaagaataacataagaaagaagcaggaaagttaggaaattgccatcgggatctccactttatttctatacttggcctctgcactgtccccaacccagtcatgtcaactacctctgactcagatggaagaatgtgcttcctggcgtgggatttcccttgggctttaatcttgtgtgtgattatgcattgatgtgaatgtgtcttagactgtaaactcactgagagtagtgacttatcaccccagcaagcagattctaaataaagcctctgttcttgatgactgaggataagaagggaagaggacatgagcctagaggaagcttctgatgagccgaatctgggggccgagtatcgcggt

SEQ ID NO: 313441 - DNA, 419 bp, Homo sapiens
tcggggtagggatctgcagccccagtggtcctgggggctcccgctggcccggccccctgtgcctctccctgtgctggccactggccctcacaagagacatctttcagcctttgctgcacattaaaaacagccctgccaaggtccagatggaattattttaaagccgaaggaattccatgaaattccatttcacagtcatattgttctatttacttttatgggtggaattggtttttttagtgcttccctagcctgttgcaagggtctgattcagcgcctgtgacctccttcccccttcctgtcccgggtgccagctggaacttggctgtggtgggctgggcagagggcagcctgagaagtagggaaggggctctggctcacccgcctcccctgcagatcctggaaaggctgaacaagat

SEQ ID NO: 313442 - DNA, 559 bp, Homo sapiens
aatgacctgggcagccagccacatgaggaccgcgagccagtcgaccccaccaccaaaggtcaggggtctgaggcagaggcacggcgtgacggggatcccaggataagatgtgcaggggggtggccaagggggtgggcagctccagcctcaccaggtctcgcccacaggccgcgtggcctccttctcgatacctggctcctcatcccgctactcgctgggccccagcctgcgccgggggcacgaggtgagcgaacgtgtgcagagcagtgagatgggcacatccgtgctcatcatgcagcccatcctgcgctttctgcagctgctgtgtgagaaccacaaccgggacctgcaggtgagtgcctcgccacacacctgccccttcccccgctggccagccggcatgcagactaggcagtgtggctggtgtccctctatggcaggtgtgccctgccctgggcactgctgctttgtggctggtggttcccctacccctgcagcacacaagatcgtgcttcccaggccagcctccctctccgtgctgtagctgtgctgtgcccaa

SEQ ID NO: 313443 - DNA, 546 bp, Homo sapiens
attctgtgaggttcttccaaccgcttcctctctacctgcagcggggaacgggggtggggaagggttgggagagaagagctgcaggctggggttttctccagggagggccctgagccccaagatgaatcattcccctcacccccaacctgccccaccacagactgcctcttcaaggtgtgccccatgaaccgctactcggcccagaagcagtactggaaggccaagcagactaagcaggacaaggagaagatcgctgatgtggtgttgctgcagaagctgcaggtatgtgtgtgtgtgcaggcgtgcatctgtgcacatgtaccaggaacctgggtacacaagcagcggtgctgcttgtcggagccagtaggggctctgtggctgagctgagtggtttctaaaactcgtatgggcgtgacagttcacacctgtaattccagcactttgggaggccaaggcaggaggattgcttgaggccaggagtttgagagcagcttgggcaacatagcaagaccctatctctacaaaaaattaataaaaaataaa

SEQ ID NO: 313444 - DNA, 10040 bp, Homo sapiens
  misc_feature (4486)..(4486): n is a, c, g, or t
ttatttatttatttatttatttttttgtctatttgttgtgtaggggctatttcttgggctaatgcaagggcagggaccgaacccgcaacctcatggttcctagtcggattcgttaaccactgcgccacgacaggaactcccctgtgtctgacagttttaaagaaagcttttaagtggtgactcgacatcccgaggtgttgcggtcctattatcgcaatgggcactctatcttaggcgttcaaataaaggactaggaagcaaacacccaagcaccggggaacagaacagaaagaaagacggaaggagccaagagttttggagccaactcctggagagggagcggctgaactgattcggaagttggatctctttgtacacaggaatgcggagagaaaaaaaacaaaacccaccccattgcttcatttcccctccaagcctgagcactttctattgtgcaatgaaaaggcttttcacgttgagaaaaatgaatcccgaatttgctctgcaaagggatgagcgcgcctctgggcgccagcctgctctcagctgggcgcggagaccgcgcggtggccgcagggcggccgcggccagggcgctccagggcgcgccctccgcgagcggctccggggtgacgcccgccggagagctggactcccccttccgcgggcgcctgcactggctcttagccagccgagggcccgggtgcagatagtccgggaaccccgagggcggagagctccccactacgcctgggcctcccagggatggcagctccgagagccccctagacccggtgccttgcaggacgcctctggagatcaggagggctggcggcgcattcggcgtccgggaggccgggccccggacgcgcgaggagcgcggggcgcgggaaggcaggcgggtgcacatgggtgccggcgggcgagctgcggggggagggggggcggggtgtggcctccccgcctcccgggcgggatttgcatgtgtgtggtggccccagacttcctgctccttctacgctgcaggtacgcgcgggccgggcggggcgggcgggcggcgggcgcgccaagacgtgggcacctcctcacccggaccccgggccccgccgagccgcctcctggctcccgtggccgccagcccgccccggccgcaccgagcgtcgggatccgaggtgggagcgtacccctccccgctccccggacgcctcagtcctccgcactgagcttggccacgcgcccctaggcgccccccacgccctgggccccggagggccgcagccatgagtgaaatgtccagctttcttcacatcggggacatcgtctccctgtacgccgagggctccgtcaatggcttcatcagcactttggggctggtggatgaccgctgtgtggtggagcccgcggccggggacctggacaacccccctaagaagttccgtgactgcctcttcaaggtgtgccccatgaaccgctactcggcccagaagcagtactggaaggccaagcagactaagcaggacaaggagaagatcgctgatgtggtgttgctgcagaagctgcagcatgcggcgcagatggagcagaagcaaaatgacacggagaacaagaaggtgcatggggatgtcgtgaagtatggcagtgtgatccagctcctgcacatgaagagcaacaagtacctgacagtgaacaagcggcttccggccttgctggagaagaacgccatgcgggtgactctggatgccacaggcaacgagggttcctggctcttcatccagcccttctggaagctgcggagcaacggggacaacgtggtcgtgggggacaaggtgatcctgaatcctgtcaatgccgggcagcctctgcatgccagcaattacgagctcagcgacaacgccggctgcaaggaggtcaattctgtgaactgcaacaccagctggaagatcaacctgtttatgcagtttcgggaccacctggaggaggtgttgaaagggggagacgtggtgcggctgttccatgcggagcaggagaagttcctgacgtgtgacgagtacaagggcaagctgcaggtgttcctgcgaactacactgcgccagtctgccacctcggccaccagctccaatgctctctgggaggtggaggtggtccaccacgacccctgccgtggaggagctgggcactggaatggcttgtaccgcttcaagcacctggctacaggcaactacctggctgctgaggagaaccccagttacaaaggtgatgcctcagatcccaaggcagcaggaatgggggcacagggccgcacaggccgcaggaatgctggggagaagatcaagtactgcctggtggctgtgcctcatggcaatgacatcgcctctctctttgagctggaccccaccaccttgcagaaaaccgactctttcgtgccccggaactcgtacgtccggctgcggcacctctgcaccaacacgtggattcagagcaccaatgtgcccattgacatcgaggaggagcggcccatccggctcatgctgggcacctgccccaccaaggaggacaaggaggcctttgccatcgtgtcagtgcccgtgtctgagatccgagacctggactttgccaatgacgccagctccatgctggccagtgccgtggagaaactcaacgagggcttcatcagccagaatgaccgcaggtttgtcatccagctgctggaagacctggtgttctttgtcagcgatgtccccaacaatgggcagaatgtcctggacatcatggtcactaagcccaaccgggaacggcagaagctgatgagggagcagaacatcctcaaacaggtctttggcattctgaaggccccgttccgtgagaaggggggtgaaggtcccctggtgcggctggaggagctgtcagaccagaagaacgccccctaccagcacatgttccgcctgtgctaccgcgtgttgcggcattcccaggaggactaccgcaagaaccaggagcacattgccaagcagtttgggatgatgcagtcccagattggctacgacatcctggccgaggacaccatcactgccctgctgcacaacaaccgcaagctcctggaaaagcacatcaccaagaccgaggtggagaccttcgtcagccttgtgcgcaagaaccgggagcccaggttcctggactacctctctgacctgtgtgtgtccaaccacatcgccatccccgtcacccaagagctcatctgcaagtgtgtgctggaccccaagaacagtgacattctcatccggaccgagcttcggcccgtgaaggagatggcccaatcccacgagtacctgagcatcgagtactcagaagaggaagtgtggctcacgtggactgacaagaataacgagcatcatgagaagagtgtgaggcagctggcccaggaggcgcgggccggcaacgcccacgacgagaatgtgctcagctactacaggtaccagctgaagctctttgcccgcatgtgcttggaccgccagtacttggccatcgacgagatctcccagcagctgggcgtggacctgattttcctgtgcatggcagacgagatgctgccctttgacctgcgcgcctccttctgccacctgatgctgcacgtgcacgtggaccgtgacccccaggagctggtcacgccggtcaagtttgcccgtctctggactgagatccccacagccatcaccatcaaggactatgattccaacctcaacgcgtcccgagatgacaagaagaacaagtttgccaacaccatggagttcgtggaggactacctcaacaatgtagtcagcgaggccgtgccctttgccaacgaggagaagaacaagctcacttttgaggtggtcagcctggcgcacaatctcatctacttcggcttctacagcttcagcgagctgctgcggctcactcgcacactgctgggcatcatcgactgtgtgcaggggcccccggccatgctgcaggcctatgaggaccccggtggcaagaatgtgcggcggtccatccagggcgtggggcacatgatgtccaccatggtgctgagccgcaagcagtccgtcttcagtgcccccagcctgtctgctggggccagtgctgctgagccgctggacagaagcaagtttgaggagaatgaggacattgtggtgatggagaccaagctgaagatcctggaaatccttcagttcatcctcaacgtccgcctggattaccgcatatcctacctgctgtctgtcttcaagaaggagtttgtggaggtgtttcccatgcaggacagtggggctgatggcacagcccctgccttcgactctaccactgccaacatgaacctggatcgcatcggggagcaggcggaggccatgtttggagtggggaagacaagcagcatgctggaggtggatgacgagggcggccgcatgttcctgcgcgtgctcatccacctcaccatgcacgactatgcgccnctggtctcgggtgccctgcagctgctcttcaagcacttcagccagcgccaggaggccatgcacaccttcaagcaggttcagctgctgatctcagcgcaggacgtggagaactacaaggtgatcaagtcggagctggaccggctgcggaccatggtggagaagtcagagctgtgggtggacaagaagggcagtggcaagggtgaggaggtggaggcaggcgccgccaaggacaagaaagagcgtcccacggacgaggagggctttctgcacccaccaggggagaaaagcagtgagaactaccagatcgtcaagggcatcctggaaaggctgaacaagatgtgcggggttggggagcaaatgaggaagaagcagcaacggctgctgaagaacatggatgcccacaaggtcatgctggacctgctgcagatcccctatgacaagggtgatgccaagatgatggagatcctgcgctacacgcaccagttcctgcagaagttctgtgcagggaaccccggcaaccaggccctgctgcacaaacacctgcacctcttcctcacgccagggctcctggaggcagagaccatgcagcacatcttcctgaacaactatcagctctgctccgagatcagcgagcctgtgttgcagcacttcgtgcacctgctggccacgcacgggcgccatgtgcagtacctggacttcctgcacaccgtcattaaggccgagggcaagtacgtcaagaagtgccaggacatgatcatgactgagctgaccaatgcaggtgacgatgtggtcgtgttctacaatgataaggcatcgctggcccacctgctggacatgatgaaggccgcccgcgacggcgtggaggaccacagccccctcatgtaccacatttccctggtggacctgctggccgcctgtgccgagggcaaaaacgtctacactgagatcaagtgcacctccctgctgccgctggaggacgtggtgtctgtggtgacgcatgaggactgcatcactgaggtgaaaatggcctatgtgaacttcgtgaaccactgctacgtggacacggaggtggagatgaaggagatctacaccagcaaccacatctggacgctctttgagaacttcaccctggacatggctcgggtctgcagcaagcgtgagaagcgcgtggctgaccccaccttggagaagtacgtgctgagcgttgtgctggacaccatcaacgccttcttcagctccccattctctgagaacagcacttccctgcagacacaccagacgattgtggtgcagctgctgcagtctaccacacgcctcctcgagtgtccgtggctacagcagcagcacaagggctccgtggaggcctgcatccggaccctcgccatggtggccaagggccgggccatcttgctgcccatggacctggatgcccacatcagctcgatgctcagcagtggagccagctgtgcagctgccgcccagcggaacgcctccagctacaaggcaaccacgcgggccttcccccgcgtcacccccaccgccaaccagtgggactacaagaacatcattgagaagctgcaggacatcatcacagccctggaggagcggctgaagcccctggtacaggctgagctgtccgtgctggtggatgtcctgcactggcctgagctgctcttcctggagggcagtgaggcctaccagcgctgcgagagtgggggcttcctgtccaagctgatccagcacaccaaggacctcatggagtcggaggagaagctgtgcatcaaggtgctgcggaccctgcagcagatgctgctcaagaagaccaagtacggggaccggggcaaccagctgcgcaagatgctgctgcaaaactacctccagaaccggaagtccacctcgcggggggaccttcccgaccccataggcactggcctggacccagactggtcggcaatcgcagccacccagtgccggctggacaaggagggggccaccaagttggtatgcgacctcatcaccagcaccaagaacgagaagatcttccaggagagcatcggcctggccatccacctgctggatggtggcaacacagagatccagaaatccttccacaacctgatgatgagtgacaagaagtcagagcgcttcttcaaggtgctgcacgaccgcatgaagcgggcccagcaggagaccaagtccacggtggcagtcaacatgaatgacctgggcagccagccacatgaggaccgcgagccagtcgaccccaccaccaaaggccgcgtggcctccttctcgatacctggctcctcatcccgctactcgctgggccccagcctgcgccgggggcacgaggtgagcgaacgtgtgcagagcagtgagatgggcacatccgtgctcatcatgcagcccatcctgcgctttctgcagctgctgtgtgagaaccacaaccgggacctgcagaacttcctgcgctgtcagaacaacaaaaccaactacaacttggtatgcgagacgctgcagttcctggacatcatgtgcggcagcaccacgggcggcctggggctgctggggctctacatcaatgaggacaacgtgggcctcgtcatccagaccttggagaccctcactgagtactgccagggcccctgccatgagaaccagacttgcattgtgactcacgagtccaatggcatagacatcatcaccgcactgatcctcaatgacatcagccccctgtgcaagtaccgcatggatctggtgctgcagctcaaggacaatgcctccaagctgctcctggctctgatggagagccggcatgacagtgaaaatgctgagcgaatcctcatcagcctgcggccccaggagctggtggacgtcatcaagaaggcctacctgcaggaggaagagcgtgagaactcggaggtgagcccacgtgaagtgggccataacatctatatcctggcgctgcagctctccaggcacaataaacagctgcagcacctgctgaagccggtgaagcgcattcaagaggaggaggccgagggtatctcttccatgctcagcctcaacaacaagcagctgtcacagatgctcaagtcctcagcgccagcacaggaggaggaggaagaccccctggcctactatgagaaccacacgtcccagatcgagattgtgcggcaggaccgcagcatggagcagatcgtgttcccagtgcccggcatctgccagttcctgacggaggaaaccaagcaccggctcttcaccactactgagcaggacgagcagggcagcaaagtgagcgacttcttcgaccagtcctccttcctgcacaacgagatggagtggcagcgcaagctccgcagcatgccgctgatctactggttctcccgccgcatgaccctgtggggcagcatctccttcaacctggccgtgtttatcaacatcatcattgccttcttctacccttacatggagggcgcgtccacaggcgtgctggactcccctctcatctcattgctcttctggatcctcatctgcttctccatcgcggccctgttcaccaagcgctacagcatccgccccctcatcgtggcgctcatcctgcgctccatctactatctgggcatcgggcccacactcaacatcctgggtgccctcaatctgaccaacaagatcgtgtttgtggtgagcttcgtgggcaaccgtggcaccttcatccggggctataaggccatggtcatggacatggaattcctctaccacgtgggctacatcctgaccagtgtcctgggcctctttgctcatgagctgttctacagcatcctgctctttgacctcatctaccgcgaggagacgctgttcaacgtcatcaagagtgtgacccgcaatggccgctccatcctgctgacagccctgctggccctcatcctggtctacctcttctccatcgtcggcttcctcttcctcaaggatgacttcattctcgaggtcgaccggctgcccaacaaccactccacagccagccccctggggatgccacatggagctgctgcatttgtggacacctgcagtggggacaagatggactgtgtctcagggctctcggtgcctgaggtcctggaagaggacagggagctggacagcacagagcgggcctgtgacactctgttgatgtgcatcgtcactgtcatgaaccatgggctacgcaacggtggtggcgtgggcgacattctccgcaagccctccaaagatgagtctctcttcccagcccgagtggtctatgacctcctgttcttcttcatcgtcatcatcattgtgctgaacctcatctttggggtaatcatcgacaccttcgctgacctgcgtagtgagaagcagaagaaggaggagattcttaagacgacatgcttcatctgtggtctggagagggacaagtttgataacaagacagtgtcatttgaggaacacatcaagctggagcacaacatgtggaactacttgtacttcattgtgctggtccgcgtgaagaacaagaccgactacacgggccctgagagctacgtggcccagatgatcaagaacaagaacctggactggttcccccggatgcgggccatgtcccttgtcagcaatgagggcgagggggagcagaatgagattcggattctccaggacaagctcaactccaccatgaagctggtgtcccacctcactgcccagctcaacgagctcaaggagcagatgacggagcagcggaaacgcaggcaacgcctaggctttgtggatgtccagaactgcattagccgctgaggagagccaccgaaggccccaacaggggatgctcatcactggagactgcgactgggaagaacactgccccctccctcgggttgggtggcccagccagctggccagcctccactcccactctgccagacaccctgacacccacccaggctttgaagagcatggagggggagcctcagagctgacagtcctgcttagagcccttataaatcctacctagagacctttgttccttaaagcaataactgacaactctttgtagtcctccttgtgggtagttaagagtggggtcacccctttaactccaagcactacattttggcggctgccggcctctgggggaggtggcagttatgctgttactagtgattttagggctttgttatttaacttatttcaagggtgctgtgctcagccctgcccatggctgtgcagctccctccgtgcctcagatctgctgtagccagtgcagacctcactgtcgtgtccatgccacccccggcatggctccaggtggcctggtgactccatgatggacgatcttgctcccaggacctgcctcttcccaggcttcctggggaagagttgtacgcccaggcaacaagggctgagctgcgcttgcgtggctgtttcatgaccgcttgtttttctccttttggtgtaatgttttacaaatcctttggcctgagaactaatatgttaattgccttaaataaattaatagaaatctagtccgttaaaaaaaaaa

SEQ ID NO: 313445 - DNA, 10224 bp, Homo sapiens
  misc_feature (4486)..(4486): n is a, c, g, or t
ttatttatttatttatttatttttttgtctatttgttgtgtaggggctatttcttgggctaatgcaagggcagggaccgaacccgcaacctcatggttcctagtcggattcgttaaccactgcgccacgacaggaactcccctgtgtctgacagttttaaagaaagcttttaagtggtgactcgacatcccgaggtgttgcggtcctattatcgcaatgggcactctatcttaggcgttcaaataaaggactaggaagcaaacacccaagcaccggggaacagaacagaaagaaagacggaaggagccaagagttttggagccaactcctggagagggagcggctgaactgattcggaagttggatctctttgtacacaggaatgcggagagaaaaaaaacaaaacccaccccattgcttcatttcccctccaagcctgagcactttctattgtgcaatgaaaaggcttttcacgttgagaaaaatgaatcccgaatttgctctgcaaagggatgagcgcgcctctgggcgccagcctgctctcagctgggcgcggagaccgcgcggtggccgcagggcggccgcggccagggcgctccagggcgcgccctccgcgagcggctccggggtgacgcccgccggagagctggactcccccttccgcgggcgcctgcactggctcttagccagccgagggcccgggtgcagatagtccgggaaccccgagggcggagagctccccactacgcctgggcctcccagggatggcagctccgagagccccctagacccggtgccttgcaggacgcctctggagatcaggagggctggcggcgcattcggcgtccgggaggccgggccccggacgcgcgaggagcgcggggcgcgggaaggcaggcgggtgcacatgggtgccggcgggcgagctgcggggggagggggggcggggtgtggcctccccgcctcccgggcgggatttgcatgtgtgtggtggccccagacttcctgctccttctacgctgcaggtacgcgcgggccgggcggggcgggcgggcggcgggcgcgccaagacgtgggcacctcctcacccggaccccgggccccgccgagccgcctcctggctcccgtggccgccagcccgccccggccgcaccgagcgtcgggatccgaggtgggagcgtacccctccccgctccccggacgcctcagtcctccgcactgagcttggccacgcgcccctaggcgccccccacgccctgggccccggagggccgcagccatgagtgaaatgtccagctttcttcacatcggggacatcgtctccctgtacgccgagggctccgtcaatggcttcatcagcactttggggctggtggatgaccgctgtgtggtggagcccgcggccggggacctggacaacccccctaagaagttccgtgactgcctcttcaaggtgtgccccatgaaccgctactcggcccagaagcagtactggaaggccaagcagactaagcaggacaaggagaagatcgctgatgtggtgttgctgcagaagctgcagcatgcggcgcagatggagcagaagcaaaatgacacggagaacaagaaggtgcatggggatgtcgtgaagtatggcagtgtgatccagctcctgcacatgaagagcaacaagtacctgacagtgaacaagcggcttccggccttgctggagaagaacgccatgcgggtgactctggatgccacaggcaacgagggttcctggctcttcatccagcccttctggaagctgcggagcaacggggacaacgtggtcgtgggggacaaggtgatcctgaatcctgtcaatgccgggcagcctctgcatgccagcaattacgagctcagcgacaacgccggctgcaaggaggtcaattctgtgaactgcaacaccagctggaagatcaacctgtttatgcagtttcgggaccacctggaggaggtgttgaaagggggagacgtggtgcggctgttccatgcggagcaggagaagttcctgacgtgtgacgagtacaagggcaagctgcaggtgttcctgcgaactacactgcgccagtctgccacctcggccaccagctccaatgctctctgggaggtggaggtggtccaccacgacccctgccgtggaggagctgggcactggaatggcttgtaccgcttcaagcacctggctacaggcaactacctggctgctgaggagaaccccagttacaaaggtgatgcctcagatcccaaggcagcaggaatgggggcacagggccgcacaggccgcaggaatgctggggagaagatcaagtactgcctggtggctgtgcctcatggcaatgacatcgcctctctctttgagctggaccccaccaccttgcagaaaaccgactctttcgtgccccggaactcgtacgtccggctgcggcacctctgcaccaacacgtggattcagagcaccaatgtgcccattgacatcgaggaggagcggcccatccggctcatgctgggcacctgccccaccaaggaggacaaggaggcctttgccatcgtgtcagtgcccgtgtctgagatccgagacctggactttgccaatgacgccagctccatgctggccagtgccgtggagaaactcaacgagggcttcatcagccagaatgaccgcaggtttgtcatccagctgctggaagacctggtgttctttgtcagcgatgtccccaacaatgggcagaatgtcctggacatcatggtcactaagcccaaccgggaacggcagaagctgatgagggagcagaacatcctcaaacaggtctttggcattctgaaggccccgttccgtgagaaggggggtgaaggtcccctggtgcggctggaggagctgtcagaccagaagaacgccccctaccagcacatgttccgcctgtgctaccgcgtgttgcggcattcccaggaggactaccgcaagaaccaggagcacattgccaagcagtttgggatgatgcagtcccagattggctacgacatcctggccgaggacaccatcactgccctgctgcacaacaaccgcaagctcctggaaaagcacatcaccaagaccgaggtggagaccttcgtcagccttgtgcgcaagaaccgggagcccaggttcctggactacctctctgacctgtgtgtgtccaaccacatcgccatccccgtcacccaagagctcatctgcaagtgtgtgctggaccccaagaacagtgacattctcatccggaccgagcttcggcccgtgaaggagatggcccaatcccacgagtacctgagcatcgagtactcagaagaggaagtgtggctcacgtggactgacaagaataacgagcatcatgagaagagtgtgaggcagctggcccaggaggcgcgggccggcaacgcccacgacgagaatgtgctcagctactacaggtaccagctgaagctctttgcccgcatgtgcttggaccgccagtacttggccatcgacgagatctcccagcagctgggcgtggacctgattttcctgtgcatggcagacgagatgctgccctttgacctgcgcgcctccttctgccacctgatgctgcacgtgcacgtggaccgtgacccccaggagctggtcacgccggtcaagtttgcccgtctctggactgagatccccacagccatcaccatcaaggactatgattccaacctcaacgcgtcccgagatgacaagaagaacaagtttgccaacaccatggagttcgtggaggactacctcaacaatgtagtcagcgaggccgtgccctttgccaacgaggagaagaacaagctcacttttgaggtggtcagcctggcgcacaatctcatctacttcggcttctacagcttcagcgagctgctgcggctcactcgcacactgctgggcatcatcgactgtgtgcaggggcccccggccatgctgcaggcctatgaggaccccggtggcaagaatgtgcggcggtccatccagggcgtggggcacatgatgtccaccatggtgctgagccgcaagcagtccgtcttcagtgcccccagcctgtctgctggggccagtgctgctgagccgctggacagaagcaagtttgaggagaatgaggacattgtggtgatggagaccaagctgaagatcctggaaatccttcagttcatcctcaacgtccgcctggattaccgcatatcctacctgctgtctgtcttcaagaaggagtttgtggaggtgtttcccatgcaggacagtggggctgatggcacagcccctgccttcgactctaccactgccaacatgaacctggatcgcatcggggagcaggcggaggccatgtttggagtggggaagacaagcagcatgctggaggtggatgacgagggcggccgcatgttcctgcgcgtgctcatccacctcaccatgcacgactatgcgccnctggtctcgggtgccctgcagctgctcttcaagcacttcagccagcgccaggaggccatgcacaccttcaagcaggttcagctgctgatctcagcgcaggacgtggagaactacaaggtgatcaagtcggagctggaccggctgcggaccatggtggagaagtcagagctgtgggtggacaagaagggcagtggcaagggtgaggaggtggaggcaggcgccgccaaggacaagaaagagcgtcccacggacgaggagggctttctgcacccaccaggggagaaaagcagtgagaactaccagatcgtcaagggcatcctggaaaggctgaacaagatgtgcggggttggggagcaaatgaggaagaagcagcaacggctgctgaagaacatggatgcccacaaggtcatgctggacctgctgcagatcccctatgacaagggtgatgccaagatgatggagatcctgcgctacacgcaccagttcctgcagaagttctgtgcagggaaccccggcaaccaggccctgctgcacaaacacctgcacctcttcctcacgccagggctcctggaggcagagaccatgcagcacatcttcctgaacaactatcagctctgctccgagatcagcgagcctgtgttgcagcacttcgtgcacctgctggccacgcacgggcgccatgtgcagtacctggacttcctgcacaccgtcattaaggccgagggcaagtacgtcaagaagtgccaggacatgatcatgactgagctgaccaatgcaggtgacgatgtggtcgtgttctacaatgataaggcatcgctggcccacctgctggacatgatgaaggccgcccgcgacggcgtggaggaccacagccccctcatgtaccacatttccctggtggacctgctggccgcctgtgccgagggcaaaaacgtctacactgagatcaagtgcacctccctgctgccgctggaggacgtggtgtctgtggtgacgcatgaggactgcatcactgaggtgaaaatggcctatgtgaacttcgtgaaccactgctacgtggacacggaggtggagatgaaggagatctacaccagcaaccacatctggacgctctttgagaacttcaccctggacatggctcgggtctgcagcaagcgtgagaagcgcgtggctgaccccaccttggagaagtacgtgctgagcgttgtgctggacaccatcaacgccttcttcagctccccattctctgagaacagcacttccctgcagacacaccagacgattgtggtgcagctgctgcagtctaccacacgcctcctcgagtgtccgtggctacagcagcagcacaagggctccgtggaggcctgcatccggaccctcgccatggtggccaagggccgggccatcttgctgcccatggacctggatgcccacatcagctcgatgctcagcagtggagccagctgtgcagctgccgcccagcggaacgcctccagctacaaggcaaccacgcgggccttcccccgcgtcacccccaccgccaaccagtgggactacaagaacatcattgagaagctgcaggacatcatcacagccctggaggagcggctgaagcccctggtacaggctgagctgtccgtgctggtggatgtcctgcactggcctgagctgctcttcctggagggcagtgaggcctaccagcgctgcgagagtgggggcttcctgtccaagctgatccagcacaccaaggacctcatggagtcggaggagaagctgtgcatcaaggtgctgcggaccctgcagcagatgctgctcaagaagaccaagtacggggaccggggcaaccagctgcgcaagatgctgctgcaaaactacctccagaaccggaagtccacctcgcggggggaccttcccgaccccataggcactggcctggacccagactggtcggcaatcgcagccacccagtgccggctggacaaggagggggccaccaagttggtatgcgacctcatcaccagcaccaagaacgagaagatcttccaggagagcatcggcctggccatccacctgctggatggtggcaacacagagatccaggtgtggggggcctggggcctggacatgccctcctttgcctccctccctttttggaggaggtgggccttgagttgggcactgaaggccgaggagggtgtgaaagaggagaggcctgagcagtggctgagagaaatccttccacaacctgatgatgagtgacaagaagtcagagcgcttcttcaaggtgctgcacgaccgcatgaagcgggcccagcaggagaccaagtccacggtggcagtcaacatgaatgacctgggcagccagccacatgaggaccgcgagccagtcgaccccaccaccaaaggccgcgtggcctccttctcgatacctggctcctcatcccgctactcgctgggccccagcctgcgccgggggcacgaggtgagcgaacgtgtgcagagcagtgagatgggcacatccgtgctcatcatgcagcccatcctgcgctttctgcagctgctgtgtgagaaccacaaccgggacctgcagaacttcctgcgctgtcagaacaacaaaaccaactacaacttggtatgcgagacgctgcagttcctggacatcatgtgcggcagcaccacgggcggcctggggctgctggggctctacatcaatgaggacaacgtgggcctcgtcatccagaccttggagaccctcactgagtactgccagggcccctgccatgagaaccagacttgcattgtgactcacgagtccaatggcatagacatcatcaccgcactgatcctcaatgacatcagccccctgtgcaagtaccgcatggatctggtgctgcagctcaaggacaatgcctccaagctgctcctggctctgatggagagccggcatgacagtgaaaatgctgagcgaatcctcatcagcctgcggccccaggagctggtggacgtcatcaagaaggcctacctgcaggaggaagagcgtgagaactcggaggtgagcccacgtgaagtgggccataacatctatatcctggcgctgcagctctccaggcacaataaacagctgcagcacctgctgaagccggtgaagcgcattcaagaggaggaggccgagggtatctcttccatgctcagcctcaacaacaagcagctgtcacagatgctcaagtcctcagcgccagcacaggaggaggaggaagaccccctggcctactatgagaaccacacgtcccagatcgagattgtgcggcaggaccgcagcatggagcagatcgtgttcccagtgcccggcatctgccagttcctgacggaggaaaccaagcaccggctcttcaccactactgagcaggacgagcagggcagcaaagtgagcgacttcttcgaccagtcctccttcctgcacaacgagatggagtggcagcgcaagctccgcagcatgccgctgatctactggttctcccgccgcatgaccctgtggggcagcatctccttcaacctggccgtgtttatcaacatcatcattgccttcttctacccttacatggagggcgcgtccacaggcgtgctggactcccctctcatctcattgctcttctggatcctcatctgcttctccatcgcggccctgttcaccaagcgctacagcatccgccccctcatcgtggcgctcatcctgcgctccatctactatctgggcatcgggcccacactcaacatcctgggtgccctcaatctgaccaacaagatcgtgtttgtggtgagcttcgtgggcaaccgtggcaccttcatccggggctataaggccatggtcatggacatggaattcctctaccacgtgggctacatcctgaccagtgtcctgggcctctttgctcatgagctgttctacagcatcctgctctttgacctcatctaccgcgaggagacgctgttcaacgtcatcaagagtgtgacccgcaatggccgctccatcctgctgacagccctgctggccctcatcctggtctacctcttctccatcgtcggcttcctcttcctcaaggatgacttcattctcgaggtcgaccggctgcccaacaaccactccacagccagccccctggggatgccacatggagctgctgcatttgtggacacctgcagtggggacaagatggactgtgtctcagggctctcggtgcctgaggtcctggaagaggacagggagctggacagcacagagcgggcctgtgacactctgttgatgtgcatcgtcactgtcatgaaccatgggctacgcaacggtggtggcgtgggcgacattctccgcaagccctccaaagatgagtctctcttcccagcccgagtggtctatgacctcctgttcttcttcatcgtcatcatcattgtgctgaacctcatctttggggtaatcatcgacaccttcgctgacctgcgtagtgagaagcagaagaaggaggagattcttaagacgacatgcttcatctgtggtctggagagggacaagtttgataacaagacagtgtcatttgaggaacacatcaagctggagcacaacatgtggaactacttgtacttcattgtgctggtccgcgtgaagaacaagaccgactacacgggccctgagagctacgtggcccagatgatcaagaacaagaacctggactggttcccccggatgcgggccatgtcccttgtcagcaatgagggcgagggggagcagaatgagattcggattctccaggacaagctcaactccaccatgaagctggtgtcccacctcactgcccagctcaacgagctcaaggagcagatgacggagcagcggaaacgcaggcaacgcctaggctttgtggatgtccagaactgcattagccgctgaggagagccaccgaaggccccaacaggggatgctcatcactggagactgcgactgggaagaacactgccccctccctcgggttgggtggcccagccagctggccagcctccactcccactctgccagacaccctgacacccacccaggctttgaagagcatggagggggagcctcagagctgacagtcctgcttagagcccttaaaaagacttgaaagttcactgggactcagtttaccttaatgccttagcagaagataaatcctacctagagacctttgttccttaaagcaataactgacaactctttgtagtcctccttgtgggtagttaagagtggggtcacccctttaactccaagcactacattttggcggctgccggcctctgggggaggtggcagttatgctgttactagtgattttagggctttgttatttaacttatttcaagggtgctgtgctcagccctgcccatggctgtgcagctccctccgtgcctcagatctgctgtagccagtgcagacctcactgtcgtgtccatgccacccccggcatggctccaggtggcctggtgactccatgatggacgatcttgctcccaggacctgcctcttcccaggcttcctggggaagagttgtacgcccaggcaacaagggctgagctgcgcttgcgtggctgtttcatgaccgcttgtttttctccttttggtgtaatgttttacaaatcctttggcctgagaactaatatgttaattgccttaaataaattaatagaaatctagtccgttaaaaaaaaaa

SEQ ID NO: 313446 - DNA, 9893 bp, Homo sapiens
  misc_feature (4285)..(4285): n is a, c, g, or t
ttatttatttatttatttatttttttgtctatttgttgtgtaggggctatttcttgggctaatgcaagggcagggaccgaacccgcaacctcatggttcctagtcggattcgttaaccactgcgccacgacaggaactcccctgtgtctgacagttttaaagaaagcttttaagtggtgactcgacatcccgaggtgttgcggtcctattatcgcaatgggcactctatcttaggcgttcaaataaaggactaggaagcaaacacccaagcaccggggaacagaacagaaagaaagacggaaggagccaagagttttggagccaactcctggagagggagcggctgaactgattcggaagttggatctctttgtacacaggaatgcggagagaaaaaaaacaaaacccaccccattgcttcatttcccctccaagcctgagcactttctattgtgcaatgaaaaggcttttcacgttgagaaaaatgaatcccgaatttgctctgcaaagggatgagcgcgcctctgggcgccagcctgctctcagctgggcgcggagaccgcgcggtggccgcagggcggccgcggccagggcgctccagggcgcgccctccgcgagcggctccggggtgacgcccgccggagagctggactcccccttccgcgggcgcctgcactggctcttagccagccgagggcccgggtgcagatagtccgggaaccccgagggcggagagctccccactacgcctgggcctcccagggatggcagctccgagagccccctagacccggtgccttgcaggacgcctctggagatcaggagggctggcggcgcattcggcgtccgggaggccgggccccggacgcgcgaggagcgcggggcgcgggaaggcaggcgggtgcacatgggtgccggcgggcgagctgcggggggagggggggcggggtgtggcctccccgcctcccgggcgggatttgcatgtgtgtggtggccccagacttcctgctccttctacgctgcaggtacgcgcgggccgggcggggcgggcgggcggcgggcgcgccaagacgtgggcacctcctcacccggaccccgggccccgccgagccgcctcctggctcccgtggccgccagcccgccccggccgcaccgagcgtcgggatccgaggtgggagcgtacccctccccgctccccggacgcctcagtcctccgcactgagcttggccacgcgcccctaggcgccccccacgccctgggccccggagggccgcagccatgagtgaaatgtccagctttcttcacatcggggacatcgtctccctgtacgccgagggctccgtcaatggcttcatcagcactttggggctggtggatgaccgctgtgtggtggagcccgcggccggggacctggacaacccccctaagaagttccgtgactgcctcttcaaggtgtgccccatgaaccgctactcggcccagaagcagtactggaaggccaagcagactaagcaggacaaggagaagatcgctgatgtggtgttgctgcagaagctgcagcatgcggcgcagatggagcagaagcaaaatgacacggagaacaagaaggtgcatggggatgtcgtgaagtatggcagtgtgatccagctcctgcacatgaagagcaacaagtacctgacagtgaacaagcggcttccggccttgctggagaagaacgccatgcgggtgactctggatgccacaggcaacgagggttcctggctcttcatccagcccttctggaagctgcggagcaacggggacaacgtggtcgtgggggacaaggtgatcctgaatcctgtcaatgccgggcagcctctgcatgccagcaattacgagctcagcgacaacgccggctgcaaggaggtcaattctgtgaactgcaacaccagctggaagatcaacctgtttatgcagtttcgggaccacctggaggaggtgttgaaagggggagacgtggtgcggctgttccatgcggagcaggagaagttcctgacgtgtgacgagtacaagggcaagctgcaggtgttcctgcgaactacactgcgccagtctgccacctcggccaccagctccaatgctctctgggaggtggaggtggtccaccacgacccctgccgtggaggagctgggcactggaatggcttgtaccgcttcaagcacctggctacaggcaactacctggctgctgaggagaaccccagttacaaaggtgatgcctcagatcccaaggcagcaggaatgggggcacagggccgcacaggccgcaggaatgctggggagaagatcaagtactgcctggtggctgtgcctcatggcaatgacatcgcctctctctttgagctggaccccaccaccttgcagaaaaccgactctttcgtgccccggaactcgtacgtccggctgcggcacctctgcaccaacacgtggattcagagcaccaatgtgcccattgacatcgaggaggagcggcccatccggctcatgctgggcacctgccccaccaaggaggacaaggaggcctttgccatcgtgtcagtgcccgtgtctgagatccgagacctggactttgccaatgacgccagctccatgctggccagtgccgtggagaaactcaacgagggcttcatcagccagaatgaccgcaggtttgtcatccagctgctggaagacctggtgttctttgtcagcgatgtccccaacaatgggcagaatgtcctggacatcatggtcactaagcccaaccgggaacggcagaagctgatgagggagcagaacatcctcaaacaggtctttggcattctgaaggccccgttccgtgagaaggggggtgaaggtcccctggtgcggctggaggagctgtcagaccagaagaacgccccctaccagcacatgttccgcctgtgctaccgcgtgttgcggcattcccaggaggactaccgcaagaaccaggagcacattgccaagcagtttgggatgatgcagtcccagattggctacgacatcctggccgaggacaccatcactgccctgctgcacaacaaccgcaagctcctggaaaagcacatcaccaagaccgaggtggagaccttcgtcagccttgtgcgcaagaaccgggagcccaggttcctggactacctctctgacctgtgtgtgtccaaccacatcgccatccccgtcacccaagagctcatctgcaagtgtgtgctggaccccaagaacagtgacattctcatccggaccgagcttcggcccgtgaaggagatggcccaatcccacgagtacctgagcatcgagtactcagaagaggaagtgtggctcacgtggactgacaagaataacgagcatcatgagaagagtgtgaggcagctggcccaggaggcgcgggccggcaacgcccacgacgagaatgtgctcagctactacaggtaccagctgaagctctttgcccgcatgtgcttggaccgccagtacttggccatcgacgagatctcccagcagctgggcgtggacctgattttcctgtgcatggcagacgagatgctgccctttgacctgcgcgcctccttctgccacctgatgctgcacgtgcacgtggaccgtgacccccaggagctggtcacgccggtcaagtttgcccgtctctggactgagatccccacagccatcaccatcaaggactatgattccaacctcaacgcgtcccgagatgacaagaagaacaagtttgccaacaccatggagttcgtggaggactacctcaacaatgtagtcagcgaggccgtgccctttgccaacgaggagaagaacaagctcacttttgaggtggtcagcctggcgcacaatctcatctacttcggcttctacagcttcagcgagctgctgcggctcactcgcacactgctgggcatcatcgactgtgtgcaggggcccccggccatgctgcaggcctatgaggaccccggtggcaagaatgtgcggcggtccatccagggcgtggggcacatgatgtccaccatggtgctgagccgcaagcagtccgtcttcagtgcccccagcctgtctgctggggccagtgctgctgagccgctggacagaagcaagtttgaggagaatgaggacattgtggtgatggagaccaagctgaagatcctggaaatccttcagttcatcctcaacgtccgcctggattaccgcatgttcctgcgcgtgctcatccacctcaccatgcacgactatgcgccnctggtctcgggtgccctgcagctgctcttcaagcacttcagccagcgccaggaggccatgcacaccttcaagcaggttcagctgctgatctcagcgcaggacgtggagaactacaaggtgatcaagtcggagctggaccggctgcggaccatggtggagaagtcagagctgtgggtggacaagaagggcagtggcaagggtgaggaggtggaggcaggcgccgccaaggacaagaaagagcgtcccacggacgaggagggctttctgcacccaccaggggagaaaagcagtgagaactaccagatcgtcaagggcatcctggaaaggctgaacaagatgtgcggggttggggagcaaatgaggaagaagcagcaacggctgctgaagaacatggatgcccacaaggtcatgctggacctgctgcagatcccctatgacaagggtgatgccaagatgatggagatcctgcgctacacgcaccagttcctgcagaagttctgtgcagggaaccccggcaaccaggccctgctgcacaaacacctgcacctcttcctcacgccagggctcctggaggcagagaccatgcagcacatcttcctgaacaactatcagctctgctccgagatcagcgagcctgtgttgcagcacttcgtgcacctgctggccacgcacgggcgccatgtgcagtacctggacttcctgcacaccgtcattaaggccgagggcaagtacgtcaagaagtgccaggacatgatcatgactgagctgaccaatgcaggtgacgatgtggtcgtgttctacaatgataaggcatcgctggcccacctgctggacatgatgaaggccgcccgcgacggcgtggaggaccacagccccctcatgtaccacatttccctggtggacctgctggccgcctgtgccgagggcaaaaacgtctacactgagatcaagtgcacctccctgctgccgctggaggacgtggtgtctgtggtgacgcatgaggactgcatcactgaggtgaaaatggcctatgtgaacttcgtgaaccactgctacgtggacacggaggtggagatgaaggagatctacaccagcaaccacatctggacgctctttgagaacttcaccctggacatggctcgggtctgcagcaagcgtgagaagcgcgtggctgaccccaccttggagaagtacgtgctgagcgttgtgctggacaccatcaacgccttcttcagctccccattctctgagaacagcacttccctgcagacacaccagacgattgtggtgcagctgctgcagtctaccacacgcctcctcgagtgtccgtggctacagcagcagcacaagggctccgtggaggcctgcatccggaccctcgccatggtggccaagggccgggccatcttgctgcccatggacctggatgcccacatcagctcgatgctcagcagtggagccagctgtgcagctgccgcccagcggaacgcctccagctacaaggcaaccacgcgggccttcccccgcgtcacccccaccgccaaccagtgggactacaagaacatcattgagaagctgcaggacatcatcacagccctggaggagcggctgaagcccctggtacaggctgagctgtccgtgctggtggatgtcctgcactggcctgagctgctcttcctggagggcagtgaggcctaccagcgctgcgagagtgggggcttcctgtccaagctgatccagcacaccaaggacctcatggagtcggaggagaagctgtgcatcaaggtgctgcggaccctgcagcagatgctgctcaagaagaccaagtacggggaccggggcaaccagctgcgcaagatgctgctgcaaaactacctccagaaccggaagtccacctcgcggggggaccttcccgaccccataggcactggcctggacccagactggtcggcaatcgcagccacccagtgccggctggacaaggagggggccaccaagttggtatgcgacctcatcaccagcaccaagaacgagaagatcttccaggagagcatcggcctggccatccacctgctggatggtggcaacacagagatccagaaatccttccacaacctgatgatgagtgacaagaagtcagagcgcttcttcaaggtgctgcacgaccgcatgaagcgggcccagcaggagaccaagtccacggtggcagtcaacatgaatgacctgggcagccagccacatgaggaccgcgagccagtcgaccccaccaccaaaggccgcgtggcctccttctcgatacctggctcctcatcccgctactcgctgggccccagcctgcgccgggggcacgaggtgagcgaacgtgtgcagagcagtgagatgggcacatccgtgctcatcatgcagcccatcctgcgctttctgcagctgctgtgtgagaaccacaaccgggacctgcagaacttcctgcgctgtcagaacaacaaaaccaactacaacttggtatgcgagacgctgcagttcctggacatcatgtgcggcagcaccacgggcggcctggggctgctggggctctacatcaatgaggacaacgtgggcctcgtcatccagaccttggagaccctcactgagtactgccagggcccctgccatgagaaccagacttgcattgtgactcacgagtccaatggcatagacatcatcaccgcactgatcctcaatgacatcagccccctgtgcaagtaccgcatggatctggtgctgcagctcaaggacaatgcctccaagctgctcctggctctgatggagagccggcatgacagtgaaaatgctgagcgaatcctcatcagcctgcggccccaggagctggtggacgtcatcaagaaggcctacctgcaggaggaagagcgtgagaactcggaggtgagcccacgtgaagtgggccataacatctatatcctggcgctgcagctctccaggcacaataaacagctgcagcacctgctgaagccggtgaagcgcattcaagaggaggaggccgagggtatctcttccatgctcagcctcaacaacaagcagctgtcacagatgctcaagtcctcagcgccagcacaggaggaggaggaagaccccctggcctactatgagaaccacacgtcccagatcgagattgtgcggcaggaccgcagcatggagcagatcgtgttcccagtgcccggcatctgccagttcctgacggaggaaaccaagcaccggctcttcaccactactgagcaggacgagcagggcagcaaagtgagcgacttcttcgaccagtcctccttcctgcacaacgagatggagtggcagcgcaagctccgcagcatgccgctgatctactggttctcccgccgcatgaccctgtggggcagcatctccttcaacctggccgtgtttatcaacatcatcattgccttcttctacccttacatggagggcgcgtccacaggcgtgctggactcccctctcatctcattgctcttctggatcctcatctgcttctccatcgcggccctgttcaccaagcgctacagcatccgccccctcatcgtggcgctcatcctgcgctccatctactatctgggcatcgggcccacactcaacatcctgggtgccctcaatctgaccaacaagatcgtgtttgtggtgagcttcgtgggcaaccgtggcaccttcatccggggctataaggccatggtcatggacatggaattcctctaccacgtgggctacatcctgaccagtgtcctgggcctctttgctcatgagctgttctacagcatcctgctctttgacctcatctaccgcgaggagacgctgttcaacgtcatcaagagtgtgacccgcaatggccgctccatcctgctgacagccctgctggccctcatcctggtctacctcttctccatcgtcggcttcctcttcctcaaggatgacttcattctcgaggtcgaccggctgcccaacaaccactccacagccagccccctggggatgccacatggagctgctgcatttgtggacacctgcagtggggacaagatggactgtgtctcagggctctcggtgcctgaggtcctggaagaggacagggagctggacagcacagagcgggcctgtgacactctgttgatgtgcatcgtcactgtcatgaaccatgggctacgcaacggtggtggcgtgggcgacattctccgcaagccctccaaagatgagtctctcttcccagcccgagtggtctatgacctcctgttcttcttcatcgtcatcatcattgtgctgaacctcatctttggggtaatcatcgacaccttcgctgacctgcgtagtgagaagcagaagaaggaggagattcttaagacgacatgcttcatctgtggtctggagagggacaagtttgataacaagacagtgtcatttgaggaacacatcaagctggagcacaacatgtggaactacttgtacttcattgtgctggtccgcgtgaagaacaagaccgactacacgggccctgagagctacgtggcccagatgatcaagaacaagaacctggactggttcccccggatgcgggccatgtcccttgtcagcaatgagggcgagggggagcagaatgagattcggattctccaggacaagctcaactccaccatgaagctggtgtcccacctcactgcccagctcaacgagctcaaggagcagatgacggagcagcggaaacgcaggcaacgcctaggctttgtggatgtccagaactgcattagccgctgaggagagccaccgaaggccccaacaggggatgctcatcactggagactgcgactgggaagaacactgccccctccctcgggttgggtggcccagccagctggccagcctccactcccactctgccagacaccctgacacccacccaggctttgaagagcatggagggggagcctcagagctgacagtcctgcttagagcccttaaaaagacttgaaagttcactgggactcagtttaccttaatgccttagcagaagataaatcctacctagagacctttgttccttaaagcaataactgacaactctttgtagtcctccttgtgggtagttaagagtggggtcacccctttaactccaagcactacattttggcggctgccggcctctgggggaggtggcagttatgctgttactagtgattttagggctttgttatttaacttatttcaagggtgctgtgctcagccctgcccatggctgtgcagctccctccgtgcctcagatctgctgtagccagtgcagacctcactgtcgtgtccatgccacccccggcatggctccaggtggcctggtgactccatgatggacgatcttgctcccaggacctgcctcttcccaggcttcctggggaagagttgtacgcccaggcaacaagggctgagctgcgcttgcgtggctgtttcatgaccgcttgtttttctccttttggtgtaatgttttacaaatcctttggcctgagaactaatatgttaattgccttaaataaattaatagaaatctagtccgttaaaaaaaaaa

SEQ ID NO: 313447 - DNA, 11312 bp, Homo sapiens
  misc_feature (4486)..(4486): n is a, c, g, or t
ttatttatttatttatttatttttttgtctatttgttgtgtaggggctatttcttgggctaatgcaagggcagggaccgaacccgcaacctcatggttcctagtcggattcgttaaccactgcgccacgacaggaactcccctgtgtctgacagttttaaagaaagcttttaagtggtgactcgacatcccgaggtgttgcggtcctattatcgcaatgggcactctatcttaggcgttcaaataaaggactaggaagcaaacacccaagcaccggggaacagaacagaaagaaagacggaaggagccaagagttttggagccaactcctggagagggagcggctgaactgattcggaagttggatctctttgtacacaggaatgcggagagaaaaaaaacaaaacccaccccattgcttcatttcccctccaagcctgagcactttctattgtgcaatgaaaaggcttttcacgttgagaaaaatgaatcccgaatttgctctgcaaagggatgagcgcgcctctgggcgccagcctgctctcagctgggcgcggagaccgcgcggtggccgcagggcggccgcggccagggcgctccagggcgcgccctccgcgagcggctccggggtgacgcccgccggagagctggactcccccttccgcgggcgcctgcactggctcttagccagccgagggcccgggtgcagatagtccgggaaccccgagggcggagagctccccactacgcctgggcctcccagggatggcagctccgagagccccctagacccggtgccttgcaggacgcctctggagatcaggagggctggcggcgcattcggcgtccgggaggccgggccccggacgcgcgaggagcgcggggcgcgggaaggcaggcgggtgcacatgggtgccggcgggcgagctgcggggggagggggggcggggtgtggcctccccgcctcccgggcgggatttgcatgtgtgtggtggccccagacttcctgctccttctacgctgcaggtacgcgcgggccgggcggggcgggcgggcggcgggcgcgccaagacgtgggcacctcctcacccggaccccgggccccgccgagccgcctcctggctcccgtggccgccagcccgccccggccgcaccgagcgtcgggatccgaggtgggagcgtacccctccccgctccccggacgcctcagtcctccgcactgagcttggccacgcgcccctaggcgccccccacgccctgggccccggagggccgcagccatgagtgaaatgtccagctttcttcacatcggggacatcgtctccctgtacgccgagggctccgtcaatggcttcatcagcactttggggctggtggatgaccgctgtgtggtggagcccgcggccggggacctggacaacccccctaagaagttccgtgactgcctcttcaaggtgtgccccatgaaccgctactcggcccagaagcagtactggaaggccaagcagactaagcaggacaaggagaagatcgctgatgtggtgttgctgcagaagctgcagcatgcggcgcagatggagcagaagcaaaatgacacggagaacaagaaggtgcatggggatgtcgtgaagtatggcagtgtgatccagctcctgcacatgaagagcaacaagtacctgacagtgaacaagcggcttccggccttgctggagaagaacgccatgcgggtgactctggatgccacaggcaacgagggttcctggctcttcatccagcccttctggaagctgcggagcaacggggacaacgtggtcgtgggggacaaggtgatcctgaatcctgtcaatgccgggcagcctctgcatgccagcaattacgagctcagcgacaacgccggctgcaaggaggtcaattctgtgaactgcaacaccagctggaagatcaacctgtttatgcagtttcgggaccacctggaggaggtgttgaaagggggagacgtggtgcggctgttccatgcggagcaggagaagttcctgacgtgtgacgagtacaagggcaagctgcaggtgttcctgcgaactacactgcgccagtctgccacctcggccaccagctccaatgctctctgggaggtggaggtggtccaccacgacccctgccgtggaggagctgggcactggaatggcttgtaccgcttcaagcacctggctacaggcaactacctggctgctgaggagaaccccagttacaaaggtgatgcctcagatcccaaggcagcaggaatgggggcacagggccgcacaggccgcaggaatgctggggagaagatcaagtactgcctggtggctgtgcctcatggcaatgacatcgcctctctctttgagctggaccccaccaccttgcagaaaaccgactctttcgtgccccggaactcgtacgtccggctgcggcacctctgcaccaacacgtggattcagagcaccaatgtgcccattgacatcgaggaggagcggcccatccggctcatgctgggcacctgccccaccaaggaggacaaggaggcctttgccatcgtgtcagtgcccgtgtctgagatccgagacctggactttgccaatgacgccagctccatgctggccagtgccgtggagaaactcaacgagggcttcatcagccagaatgaccgcaggtttgtcatccagctgctggaagacctggtgttctttgtcagcgatgtccccaacaatgggcagaatgtcctggacatcatggtcactaagcccaaccgggaacggcagaagctgatgagggagcagaacatcctcaaacaggtctttggcattctgaaggccccgttccgtgagaaggggggtgaaggtcccctggtgcggctggaggagctgtcagaccagaagaacgccccctaccagcacatgttccgcctgtgctaccgcgtgttgcggcattcccaggaggactaccgcaagaaccaggagcacattgccaagcagtttgggatgatgcagtcccagattggctacgacatcctggccgaggacaccatcactgccctgctgcacaacaaccgcaagctcctggaaaagcacatcaccaagaccgaggtggagaccttcgtcagccttgtgcgcaagaaccgggagcccaggttcctggactacctctctgacctgtgtgtgtccaaccacatcgccatccccgtcacccaagagctcatctgcaagtgtgtgctggaccccaagaacagtgacattctcatccggaccgagcttcggcccgtgaaggagatggcccaatcccacgagtacctgagcatcgagtactcagaagaggaagtgtggctcacgtggactgacaagaataacgagcatcatgagaagagtgtgaggcagctggcccaggaggcgcgggccggcaacgcccacgacgagaatgtgctcagctactacaggtaccagctgaagctctttgcccgcatgtgcttggaccgccagtacttggccatcgacgagatctcccagcagctgggcgtggacctgattttcctgtgcatggcagacgagatgctgccctttgacctgcgcgcctccttctgccacctgatgctgcacgtgcacgtggaccgtgacccccaggagctggtcacgccggtcaagtttgcccgtctctggactgagatccccacagccatcaccatcaaggactatgattccaacctcaacgcgtcccgagatgacaagaagaacaagtttgccaacaccatggagttcgtggaggactacctcaacaatgtagtcagcgaggccgtgccctttgccaacgaggagaagaacaagctcacttttgaggtggtcagcctggcgcacaatctcatctacttcggcttctacagcttcagcgagctgctgcggctcactcgcacactgctgggcatcatcgactgtgtgcaggggcccccggccatgctgcaggcctatgaggaccccggtggcaagaatgtgcggcggtccatccagggcgtggggcacatgatgtccaccatggtgctgagccgcaagcagtccgtcttcagtgcccccagcctgtctgctggggccagtgctgctgagccgctggacagaagcaagtttgaggagaatgaggacattgtggtgatggagaccaagctgaagatcctggaaatccttcagttcatcctcaacgtccgcctggattaccgcatatcctacctgctgtctgtcttcaagaaggagtttgtggaggtgtttcccatgcaggacagtggggctgatggcacagcccctgccttcgactctaccactgccaacatgaacctggatcgcatcggggagcaggcggaggccatgtttggagtggggaagacaagcagcatgctggaggtggatgacgagggcggccgcatgttcctgcgcgtgctcatccacctcaccatgcacgactatgcgccnctggtctcgggtgccctgcagctgctcttcaagcacttcagccagcgccaggaggccatgcacaccttcaagcaggttcagctgctgatctcagcgcaggacgtggagaactacaaggtgatcaagtcggagctggaccggctgcggaccatggtggagaagtcagagctgtgggtggacaagaagggcagtggcaagggtgaggaggtggaggcaggcgccgccaaggacaagaaagagcgtcccacggacgaggagggctttctgcacccaccaggggagaaaagcagtgagaactaccagatcgtcaagggcatcctggaaaggctgaacaagatgtgcggggttggggagcaaatgaggaagaagcagcaacggctgctgaagaacatggatgcccacaaggtcatgctggacctgctgcagatcccctatgacaagggtgatgccaagatgatggagatcctgcgctacacgcaccagttcctgcagaagttctgtgcagggaaccccggcaaccaggccctgctgcacaaacacctgcacctcttcctcacgccagggctcctggaggcagagaccatgcagcacatcttcctgaacaactatcagctctgctccgagatcagcgagcctgtgttgcagcacttcgtgcacctgctggccacgcacgggcgccatgtgcagtacctggacttcctgcacaccgtcattaaggccgagggcaagtacgtcaagaagtgccaggacatgatcatgactgagctgaccaatgcaggtgacgatgtggtcgtgttctacaatgataaggcatcgctggcccacctgctggacatgatgaaggccgcccgcgacggcgtggaggaccacagccccctcatgtaccacatttccctggtggacctgctggccgcctgtgccgagggcaaaaacgtctacactgagatcaagtgcacctccctgctgccgctggaggacgtggtgtctgtggtgacgcatgaggactgcatcactgaggtgaaaatggcctatgtgaacttcgtgaaccactgctacgtggacacggaggtggagatgaaggagatctacaccagcaaccacatctggacgctctttgagaacttcaccctggacatggctcgggtctgcagcaagcgtgagaagcgcgtggctgaccccaccttggagaagtacgtgctgagcgttgtgctggacaccatcaacgccttcttcagctccccattctctgagaacagcacttccctgcagacacaccagacgattgtggtgcagctgctgcagtctaccacacgcctcctcgagtgtccgtggctacagcagcagcacaagggctccgtggaggcctgcatccggaccctcgccatggtggccaagggccgggccatcttgctgcccatggacctggatgcccacatcagctcgatgctcagcagtggagccagctgtgcagctgccgcccagcggaacgcctccagctacaaggcaaccacgcgggccttcccccgcgtcacccccaccgccaaccagtgggactacaagaacatcattgagaagctgcaggacatcatcacagccctggaggagcggctgaagcccctggtacaggctgagctgtccgtgctggtggatgtcctgcactggcctgagctgctcttcctggagggcagtgaggcctaccagcgctgcgagagtgggggcttcctgtccaagctgatccagcacaccaaggacctcatggagtcggaggagaagctgtgcatcaaggtgctgcggaccctgcagcagatgctgctcaagaagaccaagtacggggaccggggcaaccagctgcgcaagatgctgctgcaaaactacctccagaaccggaagtccacctcgcggggggaccttcccgaccccataggcactggcctggacccagactggtcggcaatcgcagccacccagtgccggctggacaaggagggggccaccaagttggtatgcgacctcatcaccagcaccaagaacgagaagatcttccaggagagcatcggcctggccatccacctgctggatggtggcaacacagagatccagaaatccttccacaacctgatgatgagtgacaagaagtcagagcgcttcttcaaggtgctgcacgaccgcatgaagcgggcccagcaggagaccaagtccacggtggcagtcaacatgaatgacctgggcagccagccacatgaggaccgcgagccagtcgaccccaccaccaaaggccgcgtggcctccttctcgatacctggctcctcatcccgctactcgctgggccccagcctgcgccgggggcacgaggtgagcgaacgtgtgcagagcagtgagatgggcacatccgtgctcatcatgcagcccatcctgcgctttctgcagctgctgtgtgagaaccacaaccgggacctgcagaacttcctgcgctgtcagaacaacaaaaccaactacaacttggtatgcgagacgctgcagttcctggacatcatgtgcggcagcaccacgggcggcctggggctgctggggctctacatcaatgaggacaacgtgggcctcgtcatccagaccttggagaccctcactgagtactgccagggcccctgccatgagaaccagacttgcattgtgactcacgagtccaatggcatagacatcatcaccgcactgatcctcaatgacatcagccccctgtgcaagtaccgcatggatctggtgctgcagctcaaggacaatgcctccaagctgctcctggctctgatggagagccggcatgacagtgaaaatgctgagcgaatcctcatcagcctgcggccccaggagctggtggacgtcatcaagaaggcctacctgcaggaggaagagcgtgagaactcggaggtgagcccacgtgaagtgggccataacatctatatcctggcgctgcagctctccaggcacaataaacagctgcagcacctgctgaagccggtgaagcgcattcaagaggaggaggccgagggtatctcttccatgctcagcctcaacaacaagcagctgtcacagatgctcaagtcctcagcgccagcacaggaggaggaggaagaccccctggcctactatgagaaccacacgtcccagatcgagattgtgcggcaggaccgcagcatggagcagatcgtgttcccagtgcccggcatctgccagttcctgacggaggaaaccaagcaccggctcttcaccactactgagcaggacgagcagggcagcaaagtgagcgacttcttcgaccagtcctccttcctgcacaacgagatggagtggcagcgcaagctccgcagcatgccgctgatctactggttctcccgccgcatgaccctgtggggcagcatctccttcaacctggccgtgtttatcaacatcatcattgccttcttctacccttacatggagggcgcgtccacaggcgtgctggactcccctctcatctcattgctcttctggatcctcatctgcttctccatcgcggccctgttcaccaagcgctacagcatccgccccctcatcgtggcgctcatcctgcgctccatctactatctgggcatcgggcccacactcaacatcctgggtgccctcaatctgaccaacaagatcgtgtttgtggtgagcttcgtgggcaaccgtggcaccttcatccggggctataaggccatggtcatggacatggaattcctctaccacgtgggctacatcctgaccagtgtcctgggcctctttgctcatgagctgttctacagcatcctgctctttgacctcatctaccgcgaggagacgctgttcaacgtcatcaagagtgtgacccgcaatggccgctccatcctgctgacagccctgctggccctcatcctggtctacctcttctccatcgtcggcttcctcttcctcaaggatgacttcattctcgaggtcgaccggctgcccaacaaccactccacagccagccccctggggatgccacatggagctgctgcatttgtggacacctgcagtggggacaagatggactgtgtctcagggctctcggtgcctgaggtcctggaagaggacagggagctggacagcacagagcgggcctgtgacactctgttgatgtgcatcgtcactgtcatgaaccatgggctacgcaacggtggtggcgtgggcgacattctccgcaagccctccaaagatgagtctctcttcccagcccgagtggtctatgacctcctgttcttcttcatcgtcatcatcattgtgctgaacctcatctttggggtaatcatcgacaccttcgctgacctgcgtagtgagaagcagaagaaggaggagattcttaagacgacatgcttcatctgtggtctggagagggacaagtttgataacaagacagtgtcatttgaggaacacatcaagctggagcacaacatgtggaactacttgtacttcattgtgctggtccgcgtgaagaacaagaccgactacacgggccctgagagctacgtggcccagatgatcaaggtgtgagcaggggctgtgccaggcctgtgggcccaaaccagccattctagagtcatcactgtgcaccagaggcctcatggttttagcttctgagtaccctgggccctggagaggagtggccctatctgactgttggccctaggaggccaggcagaggggctcggacagctgcagacacttgttgaaaggtcagcagggcgaggagcagcagctggaagcagctctgggctgcacggaagccgctgctgcagaggggcctcctcacacttctgggtgtcaggaaaaatcccacagcaaacccatgcgccccgaagaacacgtgtggtatccctgggcctgtcgtgcagtgatgctgaggaggggtggagttggggagaccctgcccgtggccagtgatctgtgggccgctctcagggagtgttttctagctcggtgggaaggcaggctgcttcctaaaaagtctgaattagatgatcctgggctgaaggggagcctggaaaaactttaaaaatcacttacagaaatcaaatgtcatctgtccaatttctgtaataatggagtgaaggcaatgaatcataaagaaggaattatttatcgtttagtctgtatttcaaactgatctttgtgtacaggtttatctgttggtctgagaattcacagcttactacaaggaagctgagaattgcttggtgccccctccccccccgactcctctgtcctgggaaacgtggctttgcctcccagacacgtgtcagatgccagctctcctcagcggagcctcccgatccctcaatttgccatctgtctgactcgcgtcttcccggggcgtggggcgtgcttgtcaggcaggcgggcgggaggaaggaaggaaggagatccagggtctgtctgggtgcagaggccttcctccacctctcagggggtgttatgagagtaaacagatggtgctgataccagcaaaggactcaaactcagctgccgacgctgcctaacggaagtcagcctgtctcggtggcagagggttgacaagagggttgactgccagctcactctggccccggggaggaccaggtcaattcagattttcccatgacacatccctgacgagtagttttgttaagggtgtggcagaagcctccccccacattactgtttttctaaatgaggcctttctaggccgggcccacgcctgcttaacccactggtgatgtttttcagaacaagaacctggactggttcccccggatgcgggccatgtcccttgtcagcaatgagggcgagggggagcagaatgagattcggattctccaggacaagctcaactccaccatgaagctggtgtcccacctcactgcccagctcaacgagctcaaggagcagatgacggagcagcggaaacgcaggcaacgcctaggctttgtggatgtccagaactgcattagccgctgaggagagccaccgaaggccccaacaggggatgctcatcactggagactgcgactgggaagaacactgccccctccctcgggttgggtggcccagccagctggccagcctccactcccactctgccagacaccctgacacccacccaggctttgaagagcatggagggggagcctcagagctgacagtcctgcttagagcccttaaaaagacttgaaagttcactgggactcagtttaccttaatgccttagcagaagataaatcctacctagagacctttgttccttaaagcaataactgacaactctttgtagtcctccttgtgggtagttaagagtggggtcacccctttaactccaagcactacattttggcggctgccggcctctgggggaggtggcagttatgctgttactagtgattttagggctttgttatttaacttatttcaagggtgctgtgctcagccctgcccatggctgtgcagctccctccgtgcctcagatctgctgtagccagtgcagacctcactgtcgtgtccatgccacccccggcatggctccaggtggcctggtgactccatgatggacgatcttgctcccaggacctgcctcttcccaggcttcctggggaagagttgtacgcccaggcaacaagggctgagctgcgcttgcgtggctgtttcatgaccgcttgtttttctccttttggtgtaatgttttacaaatcctttggcctgagaactaatatgttaattgccttaaataaattaatagaaatctagtccgttaaaaaaaaaa

SEQ ID NO: 313448 - DNA, 6339 bp, Homo sapiens
  misc_feature (731)..(731): n is a, c, g, or t
acagaaaattctcagtcatctccccacacagctcacctttgccctgacacctccttcttttcccagatttgcttaaagctcatgtcctccaggaagccttcctgggttagccctgtcccttccttagcaaggctttgccctgcagctgacataaacagattatgcatcctctgcctccctcatcagaccagggacccctgtgtacagcctctacaacctccttggcaacctcctctgcttccccctccacaggcaagaatgtgcggcggtccatccagggcgtggggcacatgatgtccaccatggtgctgagccgcaagcagtccgtcttcagtgcccccagcctgtctgctggggccagtgctgctgagccgctggacagaagcaagtttgaggagaatgaggacattgtggtgatggagaccaagctgaagatcctggaaatccttcagttcatcctcaacgtccgcctggattaccgcatatcctacctgctgtctgtcttcaagaaggagtttgtggaggtgtttcccatgcaggacagtggggctgatggcacagcccctgccttcgactctaccactgccaacatgaacctggatcgcatcggggagcaggcggaggccatgtttggagtggggaagacaagcagcatgctggaggtggatgacgagggcggccgcatgttcctgcgcgtgctcatccacctcaccatgcacgactatgcgccnctggtctcgggtgccctgcagctgctcttcaagcacttcagccagcgccaggaggccatgcacaccttcaagcaggttcagctgctgatctcagcgcaggacgtggagaactacaaggtgatcaagtcggagctggaccggctgcggaccatggtggagaagtcagagctgtgggtggacaagaagggcagtggcaagggtgaggaggtggaggcaggcgccgccaaggacaagaaagagcgtcccacggacgaggagggctttctgcacccaccaggggagaaaagcagtgagaactaccagatcgtcaagggcatcctggaaaggctgaacaagatgtgcggggttggggagcaaatgaggaagaagcagcaacggctgctgaagaacatggatgcccacaaggtcatgctggacctgctgcagatcccctatgacaagggtgatgccaagatgatggagatcctgcgctacacgcaccagttcctgcagaagttctgtgcagggaaccccggcaaccaggccctgctgcacaaacacctgcacctcttcctcacgccagggctcctggaggcagagaccatgcagcacatcttcctgaacaactatcagctctgctccgagatcagcgagcctgtgttgcagcacttcgtgcacctgctggccacgcacgggcgccatgtgcagtacctggacttcctgcacaccgtcattaaggccgagggcaagtacgtcaagaagtgccaggacatgatcatgactgagctgaccaatgcaggtgacgatgtggtcgtgttctacaatgataaggcatcgctggcccacctgctggacatgatgaaggccgcccgcgacggcgtggaggaccacagccccctcatgtaccacatttccctggtggacctgctggccgcctgtgccgagggcaaaaacgtctacactgagatcaagtgcacctccctgctgccgctggaggacgtggtgtctgtggtgacgcatgaggactgcatcactgaggtgaaaatggcctatgtgaacttcgtgaaccactgctacgtggacacggaggtggagatgaaggagatctacaccagcaaccacatctggacgctctttgagaacttcaccctggacatggctcgggtctgcagcaagcgtgagaagcgcgtggctgaccccaccttggagaagtacgtgctgagcgttgtgctggacaccatcaacgccttcttcagctccccattctctgagaacagcacttccctgcagacacaccagacgattgtggtgcagctgctgcagtctaccacacgcctcctcgagtgtccgtggctacagcagcagcacaagggctccgtggaggcctgcatccggaccctcgccatggtggccaagggccgggccatcttgctgcccatggacctggatgcccacatcagctcgatgctcagcagtggagccagctgtgcagctgccgcccagcggaacgcctccagctacaaggcaaccacgcgggccttcccccgcgtcacccccaccgccaaccagtgggactacaagaacatcattgagaagctgcaggacatcatcacagccctggaggagcggctgaagcccctggtacaggctgagctgtccgtgctggtggatgtcctgcactggcctgagctgctcttcctggagggcagtgaggcctaccagcgctgcgagagtgggggcttcctgtccaagctgatccagcacaccaaggacctcatggagtcggaggagaagctgtgcatcaaggtgctgcggaccctgcagcagatgctgctcaagaagaccaagtacggggaccggggcaaccagctgcgcaagatgctgctgcaaaactacctccagaaccggaagtccacctcgcggggggaccttcccgaccccataggcactggcctggacccagactggtcggcaatcgcagccacccagtgccggctggacaaggagggggccaccaagttggtatgcgacctcatcaccagcaccaagaacgagaagatcttccaggagagcatcggcctggccatccacctgctggatggtggcaacacagagatccagaaatccttccacaacctgatgatgagtgacaagaagtcagagcgcttcttcaaggtgctgcacgaccgcatgaagcgggcccagcaggagaccaagtccacggtggcagtcaacatgaatgacctgggcagccagccacatgaggaccgcgagccagtcgaccccaccaccaaaggccgcgtggcctccttctcgatacctggctcctcatcccgctactcgctgggccccagcctgcgccgggggcacgaggtgagcgaacgtgtgcagagcagtgagatgggcacatccgtgctcatcatgcagcccatcctgcgctttctgcagctgctgtgtgagaaccacaaccgggacctgcagaacttcctgcgctgtcagaacaacaaaaccaactacaacttggtatgcgagacgctgcagttcctggacatcatgtgcggcagcaccacgggcggcctggggctgctggggctctacatcaatgaggacaacgtgggcctcgtcatccagaccttggagaccctcactgagtactgccagggcccctgccatgagaaccagacttgcattgtgactcacgagtccaatggcatagacatcatcaccgcactgatcctcaatgacatcagccccctgtgcaagtaccgcatggatctggtgctgcagctcaaggacaatgcctccaagctgctcctggctctgatggagagccggcatgacagtgaaaatgctgagcgaatcctcatcagcctgcggccccaggagctggtggacgtcatcaagaaggcctacctgcaggaggaagagcgtgagaactcggaggtgagcccacgtgaagtgggccataacatctatatcctggcgctgcagctctccaggcacaataaacagctgcagcacctgctgaagccggtgaagcgcattcaagaggaggaggccgagggtatctcttccatgctcagcctcaacaacaagcagctgtcacagatgctcaagtcctcagcgccagcacaggaggaggaggaagaccccctggcctactatgagaaccacacgtcccagatcgagattgtgcggcaggaccgcagcatggagcagatcgtgttcccagtgcccggcatctgccagttcctgacggaggaaaccaagcaccggctcttcaccactactgagcaggacgagcagggcagcaaagtgagcgacttcttcgaccagtcctccttcctgcacaacgagatggagtggcagcgcaagctccgcagcatgccgctgatctactggttctcccgccgcatgaccctgtggggcagcatctccttcaacctggccgtgtttatcaacatcatcattgccttcttctacccttacatggagggcgcgtccacaggcgtgctggactcccctctcatctcattgctcttctggatcctcatctgcttctccatcgcggccctgttcaccaagcgctacagcatccgccccctcatcgtggcgctcatcctgcgctccatctactatctgggcatcgggcccacactcaacatcctgggtgccctcaatctgaccaacaagatcgtgtttgtggtgagcttcgtgggcaaccgtggcaccttcatccggggctataaggccatggtcatggacatggaattcctctaccacgtgggctacatcctgaccagtgtcctgggcctctttgctcatgagctgttctacagcatcctgctctttgacctcatctaccgcgaggagacgctgttcaacgtcatcaagagtgtgacccgcaatggccgctccatcctgctgacagccctgctggccctcatcctggtctacctcttctccatcgtcggcttcctcttcctcaaggatgacttcattctcgaggtcgaccggctgcccaacaaccactccacagccagccccctggggatgccacatggagctgctgcatttgtggacacctgcagtggggacaagatggactgtgtctcagggctctcggtgcctgaggtcctggaagaggacagggagctggacagcacagagcgggcctgtgacactctgttgatgtgcatcgtcactgtcatgaaccatgggctacgcaacggtggtggcgtgggcgacattctccgcaagccctccaaagatgagtctctcttcccagcccgagtggtctatgacctcctgttcttcttcatcgtcatcatcattgtgctgaacctcatctttggggtaatcatcgacaccttcgctgacctgcgtagtgagaagcagaagaaggaggagattcttaagacgacatgcttcatctgtggtctggagagggacaagtttgataacaagacagtgtcatttgaggaacacatcaagctggagcacaacatgtggaactacttgtacttcattgtgctggtccgcgtgaagaacaagaccgactacacgggccctgagagctacgtggcccagatgatcaagaacaagaacctggactggttcccccggatgcgggccatgtcccttgtcagcaatgagggcgagggggagcagaatgagattcggattctccaggacaagctcaactccaccatgaagctggtgtcccacctcactgcccagctcaacgagctcaaggagcagatgacggagcagcggaaacgcaggcaacgcctaggctttgtggatgtccagaactgcattagccgctgaggagagccaccgaaggccccaacaggggatgctcatcactggagactgcgactgggaagaacactgccccctccctcgggttgggtggcccagccagctggccagcctccactcccactctgccagacaccctgacacccacccaggctttgaagagcatggagggggagcctcagagctgacagtcctgcttagagcccttaaaaagacttgaaagttcactgggactcagtttaccttaatgccttagcagaagataaatcctacctagagacctttgttccttaaagcaataactgacaactctttgtagtcctccttgtgggtagttaagagtggggtcacccctttaactccaagcactacattttggcggctgccggcctctgggggaggtggcagttatgctgttactagtgattttagggctttgttatttaacttatttcaagggtgctgtgctcagccctgcccatggctgtgcagctccctccgtgcctcagatctgctgtagccagtgcagacctcactgtcgtgtccatgccacccccggcatggctccaggtggcctggtgactccatgatggacgatcttgctcccaggacctgcctcttcccaggcttcctggggaagagttgtacgcccaggcaacaagggctgagctgcgcttgcgtggctgtttcatgaccgcttgtttttctccttttggtgtaatgttttacaaatcctttggcctgagaactaatatgttaattgccttaaataaattaatagaaatctagtccgttaaaaaaaaaa

SEQ ID NO: 313449 - DNA, 2487 bp, Homo sapiens
agccccgggtgaatcggccgaggatgagaacacacgtccagatcgagattgtgcggcaggaccgcagcatggagcagatcgtgttcccagtgcccggcatctgccagttcctgacggaggaaaccaagcaccggctcttcaccactactgagcaggacgagcagggcagcaaagtgagcgacttcttcgaccagtcctccttcctgcacaacgagatggagtggcagcgcaagctccgcagcatgccgctgatctactggttctcccgccgcatgaccctgtggggcagcatctccttcaacctggccgtgtttatcaacatcatcattgccttcttctacccttacatggagggcgcgtccacaggcgtgctggactcccctctcatctcattgctcttctggatcctcatctgcttctccatcgcggccctgttcaccaagcgctacagcatccgccccctcatcgtggcgctcatcctgcgctccatctactatctgggcatcgggcccacactcaacatcctgggtgccctcaatctgaccaacaagatcgtgtttgtggtgagcttcgtgggcaaccgtggcaccttcatccggggctataaggccatggtcatggacatggaattcctctaccacgtgggctacatcctgaccagtgtcctgggcctctttgctcatgagctgttctacagcatcctgctctttgacctcatctaccgcgaggagacgctgttcaacgtcatcaagagtgtgacccgcaatggccgctccatcctgctgacagccctgctggccctcatcctggtctacctcttctccatcgtcggcttcctcttcctcaaggatgacttcattctcgaggtcgaccggctgcccaacaaccactccacagccagccccctggggatgccacatggagctgctgcatttgtggacacctgcagtggggacaagatggactgtgtctcagggctctcggtgcctgaggtcctggaagaggacagggagctggacagcacagagcgggcctgtgacactctgttgatgtgcatcgtcactgtcatgaaccatgggctacgcaacggtggtggcgtgggcgacattctccgcaagccctccaaagatgagtctctcttcccagcccgagtggtctatgacctcctgttcttcttcatcgtcatcatcattgtgctgaacctcatctttggggtaatcatcgacaccttcgctgacctgcgtagtgagaagcagaagaaggaggagattcttaagacgacatgcttcatctgtggtctggagagggacaagtttgataacaagacagtgtcatttgaggaacacatcaagctggagcacaacatgtggaactacttgtacttcattgtgctggtccgcgtgaagaacaagaccgactacacgggccctgagagctacgtggcccagatgatcaagaacaagaacctggactggttcccccggatgcgggccatgtcccttgtcagcaatgagggcgagggggagcagaatgagattcggattctccaggacaagctcaactccaccatgaagctggtgtcccacctcactgcccagctcaacgagctcaaggagcagatgacggagcagcggaaacgcaggcaacgcctaggctttgtggatgtccagaactgcattagccgctgaggagagccaccgaaggccccaacaggggatgctcatcactggagactgcgactgggaagaacactgccccctccctcgggttgggtggcccagccagctggccagcctccactcccactctgccagacaccctgacacccacccaggctttgaagagcatggagggggagcctcagagctgacagtcctgcttagagcccttaaaaagacttgaaagttcactgggactcagtttaccttaatgccttagcagaagataaatcctacctagagacctttgttccttaaagcaataactgacaactctttgtagtcctccttgtgggtagttaagagtggggtcacccctttaactccaagcactacattttggcggctgccggcctctgggggaggtggcagttatgctgttactagtgattttagggctttgttatttaacttatttcaagggtgctgtgctcagccctgcccatggctgtgcagctccctccgtgcctcagatctgctgtagccagtgcagacctcactgtcgtgtccatgccacccccggcatggctccaggtggcctggtgactccatgatggacgatcttgctcccaggacctgcctcttcccaggcttcctggggaagagttgtacgcccaggcaacaagggctgagctgcgcttgcgtggctgtttcatgaccgcttgtttttctccttttggtgtaatgttttacaaatcctttggcctgagaactaatatgttaattgccttaaataaattaatagaaatctagtccgttaaaaaaaaaa

SEQ ID NO: 313450 - DNA, 9264 bp, Homo sapiens
  misc_feature (4486)..(4486): n is a, c, g, or t
ttatttatttatttatttatttttttgtctatttgttgtgtaggggctatttcttgggctaatgcaagggcagggaccgaacccgcaacctcatggttcctagtcggattcgttaaccactgcgccacgacaggaactcccctgtgtctgacagttttaaagaaagcttttaagtggtgactcgacatcccgaggtgttgcggtcctattatcgcaatgggcactctatcttaggcgttcaaataaaggactaggaagcaaacacccaagcaccggggaacagaacagaaagaaagacggaaggagccaagagttttggagccaactcctggagagggagcggctgaactgattcggaagttggatctctttgtacacaggaatgcggagagaaaaaaaacaaaacccaccccattgcttcatttcccctccaagcctgagcactttctattgtgcaatgaaaaggcttttcacgttgagaaaaatgaatcccgaatttgctctgcaaagggatgagcgcgcctctgggcgccagcctgctctcagctgggcgcggagaccgcgcggtggccgcagggcggccgcggccagggcgctccagggcgcgccctccgcgagcggctccggggtgacgcccgccggagagctggactcccccttccgcgggcgcctgcactggctcttagccagccgagggcccgggtgcagatagtccgggaaccccgagggcggagagctccccactacgcctgggcctcccagggatggcagctccgagagccccctagacccggtgccttgcaggacgcctctggagatcaggagggctggcggcgcattcggcgtccgggaggccgggccccggacgcgcgaggagcgcggggcgcgggaaggcaggcgggtgcacatgggtgccggcgggcgagctgcggggggagggggggcggggtgtggcctccccgcctcccgggcgggatttgcatgtgtgtggtggccccagacttcctgctccttctacgctgcaggtacgcgcgggccgggcggggcgggcgggcggcgggcgcgccaagacgtgggcacctcctcacccggaccccgggccccgccgagccgcctcctggctcccgtggccgccagcccgccccggccgcaccgagcgtcgggatccgaggtgggagcgtacccctccccgctccccggacgcctcagtcctccgcactgagcttggccacgcgcccctaggcgccccccacgccctgggccccggagggccgcagccatgagtgaaatgtccagctttcttcacatcggggacatcgtctccctgtacgccgagggctccgtcaatggcttcatcagcactttggggctggtggatgaccgctgtgtggtggagcccgcggccggggacctggacaacccccctaagaagttccgtgactgcctcttcaaggtgtgccccatgaaccgctactcggcccagaagcagtactggaaggccaagcagactaagcaggacaaggagaagatcgctgatgtggtgttgctgcagaagctgcagcatgcggcgcagatggagcagaagcaaaatgacacggagaacaagaaggtgcatggggatgtcgtgaagtatggcagtgtgatccagctcctgcacatgaagagcaacaagtacctgacagtgaacaagcggcttccggccttgctggagaagaacgccatgcgggtgactctggatgccacaggcaacgagggttcctggctcttcatccagcccttctggaagctgcggagcaacggggacaacgtggtcgtgggggacaaggtgatcctgaatcctgtcaatgccgggcagcctctgcatgccagcaattacgagctcagcgacaacgccggctgcaaggaggtcaattctgtgaactgcaacaccagctggaagatcaacctgtttatgcagtttcgggaccacctggaggaggtgttgaaagggggagacgtggtgcggctgttccatgcggagcaggagaagttcctgacgtgtgacgagtacaagggcaagctgcaggtgttcctgcgaactacactgcgccagtctgccacctcggccaccagctccaatgctctctgggaggtggaggtggtccaccacgacccctgccgtggaggagctgggcactggaatggcttgtaccgcttcaagcacctggctacaggcaactacctggctgctgaggagaaccccagttacaaaggtgatgcctcagatcccaaggcagcaggaatgggggcacagggccgcacaggccgcaggaatgctggggagaagatcaagtactgcctggtggctgtgcctcatggcaatgacatcgcctctctctttgagctggaccccaccaccttgcagaaaaccgactctttcgtgccccggaactcgtacgtccggctgcggcacctctgcaccaacacgtggattcagagcaccaatgtgcccattgacatcgaggaggagcggcccatccggctcatgctgggcacctgccccaccaaggaggacaaggaggcctttgccatcgtgtcagtgcccgtgtctgagatccgagacctggactttgccaatgacgccagctccatgctggccagtgccgtggagaaactcaacgagggcttcatcagccagaatgaccgcaggtttgtcatccagctgctggaagacctggtgttctttgtcagcgatgtccccaacaatgggcagaatgtcctggacatcatggtcactaagcccaaccgggaacggcagaagctgatgagggagcagaacatcctcaaacaggtctttggcattctgaaggccccgttccgtgagaaggggggtgaaggtcccctggtgcggctggaggagctgtcagaccagaagaacgccccctaccagcacatgttccgcctgtgctaccgcgtgttgcggcattcccaggaggactaccgcaagaaccaggagcacattgccaagcagtttgggatgatgcagtcccagattggctacgacatcctggccgaggacaccatcactgccctgctgcacaacaaccgcaagctcctggaaaagcacatcaccaagaccgaggtggagaccttcgtcagccttgtgcgcaagaaccgggagcccaggttcctggactacctctctgacctgtgtgtgtccaaccacatcgccatccccgtcacccaagagctcatctgcaagtgtgtgctggaccccaagaacagtgacattctcatccggaccgagcttcggcccgtgaaggagatggcccaatcccacgagtacctgagcatcgagtactcagaagaggaagtgtggctcacgtggactgacaagaataacgagcatcatgagaagagtgtgaggcagctggcccaggaggcgcgggccggcaacgcccacgacgagaatgtgctcagctactacaggtaccagctgaagctctttgcccgcatgtgcttggaccgccagtacttggccatcgacgagatctcccagcagctgggcgtggacctgattttcctgtgcatggcagacgagatgctgccctttgacctgcgcgcctccttctgccacctgatgctgcacgtgcacgtggaccgtgacccccaggagctggtcacgccggtcaagtttgcccgtctctggactgagatccccacagccatcaccatcaaggactatgattccaacctcaacgcgtcccgagatgacaagaagaacaagtttgccaacaccatggagttcgtggaggactacctcaacaatgtagtcagcgaggccgtgccctttgccaacgaggagaagaacaagctcacttttgaggtggtcagcctggcgcacaatctcatctacttcggcttctacagcttcagcgagctgctgcggctcactcgcacactgctgggcatcatcgactgtgtgcaggggcccccggccatgctgcaggcctatgaggaccccggtggcaagaatgtgcggcggtccatccagggcgtggggcacatgatgtccaccatggtgctgagccgcaagcagtccgtcttcagtgcccccagcctgtctgctggggccagtgctgctgagccgctggacagaagcaagtttgaggagaatgaggacattgtggtgatggagaccaagctgaagatcctggaaatccttcagttcatcctcaacgtccgcctggattaccgcatatcctacctgctgtctgtcttcaagaaggagtttgtggaggtgtttcccatgcaggacagtggggctgatggcacagcccctgccttcgactctaccactgccaacatgaacctggatcgcatcggggagcaggcggaggccatgtttggagtggggaagacaagcagcatgctggaggtggatgacgagggcggccgcatgttcctgcgcgtgctcatccacctcaccatgcacgactatgcgccnctggtctcgggtgccctgcagctgctcttcaagcacttcagccagcgccaggaggccatgcacaccttcaagcaggttcagctgctgatctcagcgcaggacgtggagaactacaaggtgatcaagtcggagctggaccggctgcggaccatggtggagaagtcagagctgtgggtggacaagaagggcagtggcaagggtgaggaggtggaggcaggcgccgccaaggacaagaaagagcgtcccacggacgaggagggctttctgcacccaccaggggagaaaagcagtgagaactaccagatcgtcaagggcatcctggaaaggctgaacaagatgtgcggggttggggagcaaatgaggaagaagcagcaacggctgctgaagaacatggatgcccacaaggtcatgctggacctgctgcagatcccctatgacaagggtgatgccaagatgatggagatcctgcgctacacgcaccagttcctgcagaagttctgtgcagggaaccccggcaaccaggccctgctgcacaaacacctgcacctcttcctcacgccagggctcctggaggcagagaccatgcagcacatcttcctgaacaactatcagctctgctccgagatcagcgagcctgtgttgcagcacttcgtgcacctgctggccacgcacgggcgccatgtgcagtacctggacttcctgcacaccgtcattaaggccgagggcaagtacgtcaagaagtgccaggacatgatcatgactgagctgaccaatgcaggtgacgatgtggtcgtgttctacaatgataaggcatcgctggcccacctgctggacatgatgaaggccgcccgcgacggcgtggaggaccacagccccctcatgtaccacatttccctggtggacctgctggccgcctgtgccgagggcaaaaacgtctacactgagatcaagtgcacctccctgctgccgctggaggacgtggtgtctgtggtgacgcatgaggactgcatcactgaggtgaaaatggcctatgtgaacttcgtgaaccactgctacgtggacacggaggtggagatgaaggagatctacaccagcaaccacatctggacgctctttgagaacttcaccctggacatggctcgggtctgcagcaagcgtgagaagcgcgtggctgaccccaccttggagaagtacgtgctgagcgttgtgctggacaccatcaacgccttcttcagctccccattctctgagaacagcacttccctgcagacacaccagacgattgtggtgcagctgctgcagtctaccacacgcctcctcgagtgtccgtggctacagcagcagcacaagggctccgtggaggcctgcatccggaccctcgccatggtggccaagggccgggccatcttgctgcccatggacctggatgcccacatcagctcgatgctcagcagtggagccagctgtgcagctgccgcccagcggaacgcctccagctacaaggcaaccacgcgggccttcccccgcgtcacccccaccgccaaccagtgggactacaagaacatcattgagaagctgcaggacatcatcacagccctggaggagcggctgaagcccctggtacaggctgagctgtccgtgctggtggatgtcctgcactggcctgagctgctcttcctggagggcagtgaggcctaccagcgctgcgagagtgggggcttcctgtccaagctgatccagcacaccaaggacctcatggagtcggaggagaagctgtgcatcaaggtgctgcggaccctgcagcagatgctgctcaagaagaccaagtacggggaccggggcaaccagctgcgcaagatgctgctgcaaaactacctccagaaccggaagtccacctcgcggggggaccttcccgaccccataggcactggcctggacccagactggtcggcaatcgcagccacccagtgccggctggacaaggagggggccaccaagttggtatgcgacctcatcaccagcaccaagaacgagaagatcttccaggagagcatcggcctggccatccacctgctggatggtggcaacacagagatccagaaatccttccacaacctgatgatgagtgacaagaagtcagagcgcttcttcaaggtgctgcacgaccgcatgaagcgggcccagcaggagaccaagtccacggtggcagtcaacatgaatgacctgggcagccagccacatgaggaccgcgagccagtcgaccccaccaccaaaggccgcgtggcctccttctcgatacctggctcctcatcccgctactcgctgggccccagcctgcgccgggggcacgaggtgagcgaacgtgtgcagagcagtgagatgggcacatccgtgctcatcatgcagcccatcctgcgctttctgcagctgctgtgtgagaaccacaaccgggacctgcagaacttcctgcgctgtcagaacaacaaaaccaactacaacttggtatgcgagacgctgcagttcctggacatcatgtgcggcagcaccacgggcggcctggggctgctggggctctacatcaatgaggacaacgtgggcctcgtcatccagaccttggagaccctcactgagtactgccagggcccctgccatgagaaccagacttgcattgtgactcacgagtccaatggcatagacatcatcaccgcactgatcctcaatgacatcagccccctgtgcaagtaccgcatggatctggtgctgcagctcaaggacaatgcctccaagctgctcctggctctgatggagagccggcatgacagtgaaaatgctgagcgaatcctcatcagcctgcggccccaggagctggtggacgtcatcaagaaggcctacctgcaggaggaagagcgtgagaactcggaggtgagcccacgtgaagtgggccataacatctatatcctggcgctgcagctctccaggcacaataaacagctgcagcacctgctgaagccggtgaagcgcattcaagaggaggaggccgagggtatctcttccatgctcagcctcaacaacaagcagctgtcacagatgctcaagtcctcagcgccagcacaggaggaggaggaagaccccctggcctactatgagaaccacacgtcccagatcgagattgtgcggcaggaccgcagcatggagcagatcgtgttcccagtgcccggcatctgccagttcctgacggaggaaaccaagcaccggctcttcaccactactgagcaggacgagcagggcagcaaagtgagcgacttcttcgaccagtcctccttcctgcacaacgagatggagtggcagcgcaagctccgcagcatgccgctgatctactggttctcccgccgcatgaccctgtggggcagcatctccttcaacctggccgtgtttatcaacatcatcattgccttcttctacccttacatggagggcgcgtccacaggcgtgctggactcccctctcatctcattgctcttctggatcctcatctgcttctccatcgcggccctgttcaccaagcgctacagcatccgccccctcatcgtggcgctcatcctgcgctccatctactatctgggcatcgggcccacactcaacatcctgggtgccctcaatctgaccaacaagatcgtgtttgtggtgagcttcgtgggcaaccgtggcaccttcatccggggctataaggccatggtcatggacatggaattcctctaccacgtgggctacatcctgaccagtgtcctgggcctctttgctcatgagctgttctacagcatcctgctctttgacctcatctaccgcgaggagacgctgttcaacgtcatcaagagtgtgacccgcaatggccgctccatcctgctgacagccctgctggccctcatcctggtctacctcttctccatcgtcggcttcctcttcctcaaggatgacttcattctcgaggtcgaccggctgcccaacaaccactccacagccagccccctggggatgccacatggagctgctgcatttgtggacacctgcagtggggacaagatggactgtgtctcagggctctcggtgcctgaggtcctggaagaggacagggagctggacagcacagagcgggcctgtgacactctgttgatgtgcatcgtcactgtcatgaaccatgggctacgcaacggtggtggcgtgggcgacattctccgcaagccctccaaagatgagtctctcttcccagcccgagtggtctatgacctcctgttcttcttcatcgtcatcatcattgtgctgaacctcatctttggggtaatcatcgacaccttcgctgacctgcgtagtgagaagcagaagaaggaggagattcttaagacgacatgcttcatctgtggtctggagagggacaagtttgataacaagacagtgtcatttgaggaacacatcaagctggagcacaacatgtggaactacttgtacttcattgtgctggtccgcgtgaagaacaagaccgactacacgggccctgagagctacgtggcccagatgatcaagaacaagaacctggactggttcccccggatgcgggccatgtcccttgtcagcaatgagggcgagggggagcagaatgagattcggattctccaggacaagctaaagcctagcgttgcctggtttccgctgctccgtcatctgctccttgagctcgttgagctgggcaccgaggtgggacaccagcttcatggtggaggtgc

SEQ ID NO: 313451 - DNA, 1399 bp, Homo sapiens
gagggctgcagctgcggcagggcaggatctccactaagtggctgctgctttaaatagaagtgacccaaatagcccagagcgagctgttggaagcgctcatcccgagaacaaatgcctccaacccccggaagctgggtcccctccagcaggtgaccctgcagtggctcttgaaggctgatggtttcattcccgccctctgcaccctcaggtctggagagggacaagtttgataacaagacagtgtcatttgaggaacacatcaagctggagcacaacatgtggaactacttgtacttcattgtgctggtccgcgtgaagaacaagaccgactacacgggccctgagagctacgtggcccagatgatcaagaacaagaacctggactggttcccccggatgcgggccatgtcccttgtcagcaatgagggcgagggggagcagaatgagattcggattctccaggacaagctcaactccaccatgaagctggtgtcccacctcactgcccagctcaacgagctcaaggagcagatgacggagcagcggaaacgcaggcaacgcctaggctttgtggatgtccagaactgcattagccgctgaggagagccaccgaaggccccaacaggggatgctcatcactggagactgcgactgggaagaacactgccccctccctcgggttgggtggcccagccagctggccagcctccactcccactctgccagacaccctgacacccacccaggctttgaagagcatggagggggagcctcagagctgacagtcctgcttagagcccttaaaaagacttgaaagttcactgggactcagtttaccttaatgccttagcagaagataaatcctacctagagacctttgttccttaaagcaataactgacaactctttgtagtcctccttgtgggtagttaagagtggggtcacccctttaactccaagcactacattttggcggctgccggcctctgggggaggtggcagttatgctgttactagtgattttagggctttgttatttaacttatttcaagggtgctgtgctcagccctgcccatggctgtgcagctccctccgtgcctcagatctgctgtagccagtgcagacctcactgtcgtgtccatgccacccccggcatggctccaggtggcctggtgactccatgatggacgatcttgctcccaggacctgcctcttcccaggcttcctggggaagagttgtacgcccaggcaacaagggctgagctgcgcttgcgtggctgtttcatgaccgcttgtttttctccttttggtgtaatgttttacaaatcctttggcctgagaactaatatgttaattgccttaaataaattaatagaaatctagtccgttaaaaaaaaaa

SEQ ID NO: 313452 - DNA, 8210 bp, Homo sapiens
  misc_feature (4486)..(4486): n is a, c, g, or t
ttatttatttatttatttatttttttgtctatttgttgtgtaggggctatttcttgggctaatgcaagggcagggaccgaacccgcaacctcatggttcctagtcggattcgttaaccactgcgccacgacaggaactcccctgtgtctgacagttttaaagaaagcttttaagtggtgactcgacatcccgaggtgttgcggtcctattatcgcaatgggcactctatcttaggcgttcaaataaaggactaggaagcaaacacccaagcaccggggaacagaacagaaagaaagacggaaggagccaagagttttggagccaactcctggagagggagcggctgaactgattcggaagttggatctctttgtacacaggaatgcggagagaaaaaaaacaaaacccaccccattgcttcatttcccctccaagcctgagcactttctattgtgcaatgaaaaggcttttcacgttgagaaaaatgaatcccgaatttgctctgcaaagggatgagcgcgcctctgggcgccagcctgctctcagctgggcgcggagaccgcgcggtggccgcagggcggccgcggccagggcgctccagggcgcgccctccgcgagcggctccggggtgacgcccgccggagagctggactcccccttccgcgggcgcctgcactggctcttagccagccgagggcccgggtgcagatagtccgggaaccccgagggcggagagctccccactacgcctgggcctcccagggatggcagctccgagagccccctagacccggtgccttgcaggacgcctctggagatcaggagggctggcggcgcattcggcgtccgggaggccgggccccggacgcgcgaggagcgcggggcgcgggaaggcaggcgggtgcacatgggtgccggcgggcgagctgcggggggagggggggcggggtgtggcctccccgcctcccgggcgggatttgcatgtgtgtggtggccccagacttcctgctccttctacgctgcaggtacgcgcgggccgggcggggcgggcgggcggcgggcgcgccaagacgtgggcacctcctcacccggaccccgggccccgccgagccgcctcctggctcccgtggccgccagcccgccccggccgcaccgagcgtcgggatccgaggtgggagcgtacccctccccgctccccggacgcctcagtcctccgcactgagcttggccacgcgcccctaggcgccccccacgccctgggccccggagggccgcagccatgagtgaaatgtccagctttcttcacatcggggacatcgtctccctgtacgccgagggctccgtcaatggcttcatcagcactttggggctggtggatgaccgctgtgtggtggagcccgcggccggggacctggacaacccccctaagaagttccgtgactgcctcttcaaggtgtgccccatgaaccgctactcggcccagaagcagtactggaaggccaagcagactaagcaggacaaggagaagatcgctgatgtggtgttgctgcagaagctgcagcatgcggcgcagatggagcagaagcaaaatgacacggagaacaagaaggtgcatggggatgtcgtgaagtatggcagtgtgatccagctcctgcacatgaagagcaacaagtacctgacagtgaacaagcggcttccggccttgctggagaagaacgccatgcgggtgactctggatgccacaggcaacgagggttcctggctcttcatccagcccttctggaagctgcggagcaacggggacaacgtggtcgtgggggacaaggtgatcctgaatcctgtcaatgccgggcagcctctgcatgccagcaattacgagctcagcgacaacgccggctgcaaggaggtcaattctgtgaactgcaacaccagctggaagatcaacctgtttatgcagtttcgggaccacctggaggaggtgttgaaagggggagacgtggtgcggctgttccatgcggagcaggagaagttcctgacgtgtgacgagtacaagggcaagctgcaggtgttcctgcgaactacactgcgccagtctgccacctcggccaccagctccaatgctctctgggaggtggaggtggtccaccacgacccctgccgtggaggagctgggcactggaatggcttgtaccgcttcaagcacctggctacaggcaactacctggctgctgaggagaaccccagttacaaaggtgatgcctcagatcccaaggcagcaggaatgggggcacagggccgcacaggccgcaggaatgctggggagaagatcaagtactgcctggtggctgtgcctcatggcaatgacatcgcctctctctttgagctggaccccaccaccttgcagaaaaccgactctttcgtgccccggaactcgtacgtccggctgcggcacctctgcaccaacacgtggattcagagcaccaatgtgcccattgacatcgaggaggagcggcccatccggctcatgctgggcacctgccccaccaaggaggacaaggaggcctttgccatcgtgtcagtgcccgtgtctgagatccgagacctggactttgccaatgacgccagctccatgctggccagtgccgtggagaaactcaacgagggcttcatcagccagaatgaccgcaggtttgtcatccagctgctggaagacctggtgttctttgtcagcgatgtccccaacaatgggcagaatgtcctggacatcatggtcactaagcccaaccgggaacggcagaagctgatgagggagcagaacatcctcaaacaggtctttggcattctgaaggccccgttccgtgagaaggggggtgaaggtcccctggtgcggctggaggagctgtcagaccagaagaacgccccctaccagcacatgttccgcctgtgctaccgcgtgttgcggcattcccaggaggactaccgcaagaaccaggagcacattgccaagcagtttgggatgatgcagtcccagattggctacgacatcctggccgaggacaccatcactgccctgctgcacaacaaccgcaagctcctggaaaagcacatcaccaagaccgaggtggagaccttcgtcagccttgtgcgcaagaaccgggagcccaggttcctggactacctctctgacctgtgtgtgtccaaccacatcgccatccccgtcacccaagagctcatctgcaagtgtgtgctggaccccaagaacagtgacattctcatccggaccgagcttcggcccgtgaaggagatggcccaatcccacgagtacctgagcatcgagtactcagaagaggaagtgtggctcacgtggactgacaagaataacgagcatcatgagaagagtgtgaggcagctggcccaggaggcgcgggccggcaacgcccacgacgagaatgtgctcagctactacaggtaccagctgaagctctttgcccgcatgtgcttggaccgccagtacttggccatcgacgagatctcccagcagctgggcgtggacctgattttcctgtgcatggcagacgagatgctgccctttgacctgcgcgcctccttctgccacctgatgctgcacgtgcacgtggaccgtgacccccaggagctggtcacgccggtcaagtttgcccgtctctggactgagatccccacagccatcaccatcaaggactatgattccaacctcaacgcgtcccgagatgacaagaagaacaagtttgccaacaccatggagttcgtggaggactacctcaacaatgtagtcagcgaggccgtgccctttgccaacgaggagaagaacaagctcacttttgaggtggtcagcctggcgcacaatctcatctacttcggcttctacagcttcagcgagctgctgcggctcactcgcacactgctgggcatcatcgactgtgtgcaggggcccccggccatgctgcaggcctatgaggaccccggtggcaagaatgtgcggcggtccatccagggcgtggggcacatgatgtccaccatggtgctgagccgcaagcagtccgtcttcagtgcccccagcctgtctgctggggccagtgctgctgagccgctggacagaagcaagtttgaggagaatgaggacattgtggtgatggagaccaagctgaagatcctggaaatccttcagttcatcctcaacgtccgcctggattaccgcatatcctacctgctgtctgtcttcaagaaggagtttgtggaggtgtttcccatgcaggacagtggggctgatggcacagcccctgccttcgactctaccactgccaacatgaacctggatcgcatcggggagcaggcggaggccatgtttggagtggggaagacaagcagcatgctggaggtggatgacgagggcggccgcatgttcctgcgcgtgctcatccacctcaccatgcacgactatgcgccnctggtctcgggtgccctgcagctgctcttcaagcacttcagccagcgccaggaggccatgcacaccttcaagcaggttcagctgctgatctcagcgcaggacgtggagaactacaaggtgatcaagtcggagctggaccggctgcggaccatggtggagaagtcagagctgtgggtggacaagaagggcagtggcaagggtgaggaggtggaggcaggcgccgccaaggacaagaaagagcgtcccacggacgaggagggctttctgcacccaccaggggagaaaagcagtgagaactaccagatcgtcaagggcatcctggaaaggctgaacaagatgtgcggggttggggagcaaatgaggaagaagcagcaacggctgctgaagaacatggatgcccacaaggtcatgctggacctgctgcagatcccctatgacaagggtgatgccaagatgatggagatcctgcgctacacgcaccagttcctgcagaagttctgtgcagggaaccccggcaaccaggccctgctgcacaaacacctgcacctcttcctcacgccagggctcctggaggcagagaccatgcagcacatcttcctgaacaactatcagctctgctccgagatcagcgagcctgtgttgcagcacttcgtgcacctgctggccacgcacgggcgccatgtgcagtacctggacttcctgcacaccgtcattaaggccgagggcaagtacgtcaagaagtgccaggacatgatcatgactgagctgaccaatgcaggtgacgatgtggtcgtgttctacaatgataaggcatcgctggcccacctgctggacatgatgaaggccgcccgcgacggcgtggaggaccacagccccctcatgtaccacatttccctggtggacctgctggccgcctgtgccgagggcaaaaacgtctacactgagatcaagtgcacctccctgctgccgctggaggacgtggtgtctgtggtgacgcatgaggactgcatcactgaggtgaaaatggcctatgtgaacttcgtgaaccactgctacgtggacacggaggtggagatgaaggagatctacaccagcaaccacatctggacgctctttgagaacttcaccctggacatggctcgggtctgcagcaagcgtgagaagcgcgtggctgaccccaccttggagaagtacgtgctgagcgttgtgctggacaccatcaacgccttcttcagctccccattctctgagaacagcacttccctgcagacacaccagacgattgtggtgcagctgctgcagtctaccacacgcctcctcgagtgtccgtggctacagcagcagcacaagggctccgtggaggcctgcatccggaccctcgccatggtggccaagggccgggccatcttgctgcccatggacctggatgcccacatcagctcgatgctcagcagtggagccagctgtgcagctgccgcccagcggaacgcctccagctacaaggcaaccacgcgggccttcccccgcgtcacccccaccgccaaccagtgggactacaagaacatcattgagaagctgcaggacatcatcacagccctggaggagcggctgaagcccctggtacaggctgagctgtccgtgctggtggatgtcctgcactggcctgagctgctcttcctggagggcagtgaggcctaccagcgctgcgagagtgggggcttcctgtccaagctgatccagcacaccaaggacctcatggagtcggaggagaagctgtgcatcaaggtgctgcggaccctgcagcagatgctgctcaagaagaccaagtacggggaccggggcaaccagctgcgcaagatgctgctgcaaaactacctccagaaccggaagtccacctcgcggggggaccttcccgaccccataggcactggcctggacccagactggtcggcaatcgcagccacccagtgccggctggacaaggagggggccaccaagttggtatgcgacctcatcaccagcaccaagaacgagaagatcttccaggagagcatcggcctggccatccacctgctggatggtggcaacacagagatccagaaatccttccacaacctgatgatgagtgacaagaagtcagagcgcttcttcaaggtgctgcacgaccgcatgaagcgggcccagcaggagaccaagtccacggtggcagtcaacatgaatgacctgggcagccagccacatgaggaccgcgagccagtcgaccccaccaccaaaggccgcgtggcctccttctcgatacctggctcctcatcccgctactcgctgggccccagcctgcgccgggggcacgaggtgagcgaacgtgtgcagagcagtgagatgggcacatccgtgctcatcatgcagcccatcctgcgctttctgcagctgctgtgtgagaaccacaaccgggacctgcagaacttcctgcgctgtcagaacaacaaaaccaactacaacttggtatgcgagacgctgcagttcctggacatcatgtgcggcagcaccacgggcggcctggggctgctggggctctacatcaatgaggacaacgtgggcctcgtcatccagaccttggagaccctcactgagtactgccagggcccctgccatgagaaccagacttgcattgtgactcacgagtccaatggcatagacatcatcaccgcactgatcctcaatgacatcagccccctgtgcaagtaccgcatggatctggtgctgcagctcaaggacaatgcctccaagctgctcctggctctgatggagagccggcatgacagtgaaaatgctgagcgaatcctcatcagcctgcggccccaggagctggtggacgtcatcaagaaggcctacctgcaggaggaagagcgtgagaactcggaggtgagcccacgtgaagtgggccataacatctatatcctggcgctgcagctctccaggcacaataaacagctgcagcacctgctgaagccggtgaagcgcattcaagaggaggaggccgagggtatctcttccatgctcagcctcaacaacaagcagctgtcacagatgctcaagtcctcagcgccagcacaggaggaggaggaagaccccctggcctactatgagaaccacacgtcccagatcgagattgtgcggcaggaccgcagcatggagcagatcgtgttcccagtgcccggcatctgccagttcctgacggaggaaaccaagcaccggctcttcaccactactgagcaggacgagcagggcagcaaagtgagcgacttcttcgaccagtcctccttcctgcacaacgagatggagtggcagcgcaagctccgcagcatgccgctgatctactggttctcccgccgcatgaccctgtggggcagcatctccttcaacctggccgtgtttatcaacatcatcattgccttcttctacccttacatggagggcgcgtccacaggcgtgctggactcccctctcatctcattgctcttctggatcctcatctgcttctccatcgcggccctgttcaccaagcgctacagcatccgccccctcatcgtggcgctcatcctgcgctccatctactatctgggcatcgggcccacactcaacatcctgggtgccctcaatccaacaagatcgtgtttgtggtgagcttgagggcacccaggatgttgagtgtgggcccgatgga

SEQ ID NO: 313453 - DNA, 6975 bp, Homo sapiens
  misc_feature (4486)..(4486): n is a, c, g, or t
ttatttatttatttatttatttttttgtctatttgttgtgtaggggctatttcttgggctaatgcaagggcagggaccgaacccgcaacctcatggttcctagtcggattcgttaaccactgcgccacgacaggaactcccctgtgtctgacagttttaaagaaagcttttaagtggtgactcgacatcccgaggtgttgcggtcctattatcgcaatgggcactctatcttaggcgttcaaataaaggactaggaagcaaacacccaagcaccggggaacagaacagaaagaaagacggaaggagccaagagttttggagccaactcctggagagggagcggctgaactgattcggaagttggatctctttgtacacaggaatgcggagagaaaaaaaacaaaacccaccccattgcttcatttcccctccaagcctgagcactttctattgtgcaatgaaaaggcttttcacgttgagaaaaatgaatcccgaatttgctctgcaaagggatgagcgcgcctctgggcgccagcctgctctcagctgggcgcggagaccgcgcggtggccgcagggcggccgcggccagggcgctccagggcgcgccctccgcgagcggctccggggtgacgcccgccggagagctggactcccccttccgcgggcgcctgcactggctcttagccagccgagggcccgggtgcagatagtccgggaaccccgagggcggagagctccccactacgcctgggcctcccagggatggcagctccgagagccccctagacccggtgccttgcaggacgcctctggagatcaggagggctggcggcgcattcggcgtccgggaggccgggccccggacgcgcgaggagcgcggggcgcgggaaggcaggcgggtgcacatgggtgccggcgggcgagctgcggggggagggggggcggggtgtggcctccccgcctcccgggcgggatttgcatgtgtgtggtggccccagacttcctgctccttctacgctgcaggtacgcgcgggccgggcggggcgggcgggcggcgggcgcgccaagacgtgggcacctcctcacccggaccccgggccccgccgagccgcctcctggctcccgtggccgccagcccgccccggccgcaccgagcgtcgggatccgaggtgggagcgtacccctccccgctccccggacgcctcagtcctccgcactgagcttggccacgcgcccctaggcgccccccacgccctgggccccggagggccgcagccatgagtgaaatgtccagctttcttcacatcggggacatcgtctccctgtacgccgagggctccgtcaatggcttcatcagcactttggggctggtggatgaccgctgtgtggtggagcccgcggccggggacctggacaacccccctaagaagttccgtgactgcctcttcaaggtgtgccccatgaaccgctactcggcccagaagcagtactggaaggccaagcagactaagcaggacaaggagaagatcgctgatgtggtgttgctgcagaagctgcagcatgcggcgcagatggagcagaagcaaaatgacacggagaacaagaaggtgcatggggatgtcgtgaagtatggcagtgtgatccagctcctgcacatgaagagcaacaagtacctgacagtgaacaagcggcttccggccttgctggagaagaacgccatgcgggtgactctggatgccacaggcaacgagggttcctggctcttcatccagcccttctggaagctgcggagcaacggggacaacgtggtcgtgggggacaaggtgatcctgaatcctgtcaatgccgggcagcctctgcatgccagcaattacgagctcagcgacaacgccggctgcaaggaggtcaattctgtgaactgcaacaccagctggaagatcaacctgtttatgcagtttcgggaccacctggaggaggtgttgaaagggggagacgtggtgcggctgttccatgcggagcaggagaagttcctgacgtgtgacgagtacaagggcaagctgcaggtgttcctgcgaactacactgcgccagtctgccacctcggccaccagctccaatgctctctgggaggtggaggtggtccaccacgacccctgccgtggaggagctgggcactggaatggcttgtaccgcttcaagcacctggctacaggcaactacctggctgctgaggagaaccccagttacaaaggtgatgcctcagatcccaaggcagcaggaatgggggcacagggccgcacaggccgcaggaatgctggggagaagatcaagtactgcctggtggctgtgcctcatggcaatgacatcgcctctctctttgagctggaccccaccaccttgcagaaaaccgactctttcgtgccccggaactcgtacgtccggctgcggcacctctgcaccaacacgtggattcagagcaccaatgtgcccattgacatcgaggaggagcggcccatccggctcatgctgggcacctgccccaccaaggaggacaaggaggcctttgccatcgtgtcagtgcccgtgtctgagatccgagacctggactttgccaatgacgccagctccatgctggccagtgccgtggagaaactcaacgagggcttcatcagccagaatgaccgcaggtttgtcatccagctgctggaagacctggtgttctttgtcagcgatgtccccaacaatgggcagaatgtcctggacatcatggtcactaagcccaaccgggaacggcagaagctgatgagggagcagaacatcctcaaacaggtctttggcattctgaaggccccgttccgtgagaaggggggtgaaggtcccctggtgcggctggaggagctgtcagaccagaagaacgccccctaccagcacatgttccgcctgtgctaccgcgtgttgcggcattcccaggaggactaccgcaagaaccaggagcacattgccaagcagtttgggatgatgcagtcccagattggctacgacatcctggccgaggacaccatcactgccctgctgcacaacaaccgcaagctcctggaaaagcacatcaccaagaccgaggtggagaccttcgtcagccttgtgcgcaagaaccgggagcccaggttcctggactacctctctgacctgtgtgtgtccaaccacatcgccatccccgtcacccaagagctcatctgcaagtgtgtgctggaccccaagaacagtgacattctcatccggaccgagcttcggcccgtgaaggagatggcccaatcccacgagtacctgagcatcgagtactcagaagaggaagtgtggctcacgtggactgacaagaataacgagcatcatgagaagagtgtgaggcagctggcccaggaggcgcgggccggcaacgcccacgacgagaatgtgctcagctactacaggtaccagctgaagctctttgcccgcatgtgcttggaccgccagtacttggccatcgacgagatctcccagcagctgggcgtggacctgattttcctgtgcatggcagacgagatgctgccctttgacctgcgcgcctccttctgccacctgatgctgcacgtgcacgtggaccgtgacccccaggagctggtcacgccggtcaagtttgcccgtctctggactgagatccccacagccatcaccatcaaggactatgattccaacctcaacgcgtcccgagatgacaagaagaacaagtttgccaacaccatggagttcgtggaggactacctcaacaatgtagtcagcgaggccgtgccctttgccaacgaggagaagaacaagctcacttttgaggtggtcagcctggcgcacaatctcatctacttcggcttctacagcttcagcgagctgctgcggctcactcgcacactgctgggcatcatcgactgtgtgcaggggcccccggccatgctgcaggcctatgaggaccccggtggcaagaatgtgcggcggtccatccagggcgtggggcacatgatgtccaccatggtgctgagccgcaagcagtccgtcttcagtgcccccagcctgtctgctggggccagtgctgctgagccgctggacagaagcaagtttgaggagaatgaggacattgtggtgatggagaccaagctgaagatcctggaaatccttcagttcatcctcaacgtccgcctggattaccgcatatcctacctgctgtctgtcttcaagaaggagtttgtggaggtgtttcccatgcaggacagtggggctgatggcacagcccctgccttcgactctaccactgccaacatgaacctggatcgcatcggggagcaggcggaggccatgtttggagtggggaagacaagcagcatgctggaggtggatgacgagggcggccgcatgttcctgcgcgtgctcatccacctcaccatgcacgactatgcgccnctggtctcgggtgccctgcagctgctcttcaagcacttcagccagcgccaggaggccatgcacaccttcaagcaggttcagctgctgatctcagcgcaggacgtggagaactacaaggtgatcaagtcggagctggaccggctgcggaccatggtggagaagtcagagctgtgggtggacaagaagggcagtggcaagggtgaggaggtggaggcaggcgccgccaaggacaagaaagagcgtcccacggacgaggagggctttctgcacccaccaggggagaaaagcagtgagaactaccagatcgtcaagggcatcctggaaaggctgaacaagatgtgcggggttggggagcaaatgaggaagaagcagcaacggctgctgaagaacatggatgcccacaaggtcatgctggacctgctgcagatcccctatgacaagggtgatgccaagatgatggagatcctgcgctacacgcaccagttcctgcagaagttctgtgcagggaaccccggcaaccaggccctgctgcacaaacacctgcacctcttcctcacgccagggctcctggaggcagagaccatgcagcacatcttcctgaacaactatcagctctgctccgagatcagcgagcctgtgttgcagcacttcgtgcacctgctggccacgcacgggcgccatgtgcagtacctggacttcctgcacaccgtcattaaggccgagggcaagtacgtcaagaagtgccaggacatgatcatgactgagctgaccaatgcaggtgacgatgtggtcgtgttctacaatgataaggcatcgctggcccacctgctggacatgatgaaggccgcccgcgacggcgtggaggaccacagccccctcatgtaccacatttccctggtggacctgctggccgcctgtgccgagggcaaaaacgtctacactgagatcaagtgcacctccctgctgccgctggaggacgtggtgtctgtggtgacgcatgaggactgcatcactgaggtgaaaatggcctatgtgaacttcgtgaaccactgctacgtggacacggaggtggagatgaaggagatctacaccagcaaccacatctggacgctctttgagaacttcaccctggacatggctcgggtctgcagcaagcgtgagaagcgcgtggctgaccccaccttggagaagtacgtgctgagcgttgtgctggacaccatcaacgccttcttcagctccccattctctgagaacagcacttccctgcagacacaccagacgattgtggtgcagctgctgcagtctaccacacgcctcctcgagtgtccgtggctacagcagcagcacaagggctccgtggaggcctgcatccggaccctcgccatggtggccaagggccgggccatcttgctgcccatggacctggatgcccacatcagctcgatgctcagcagtggagccagctgtgcagctgccgcccagcggaacgcctccagctacaaggcaaccacgcgggccttcccccgcgtcacccccaccgccaaccagtgggactacaagaacatcattgagaagctgcaggacatcatcacagccctggaggagcggctgaagcccctggtacaggctgagctgtccgtgctggtggatgtcctgcactggcctgagctgctcttcctggagggcagtgaggcctaccagcgctgcgagagtgggggcttcctgtccaagctgatccagcacaccaaggacctcatggagtcggaggagaagctgtgcatcaaggtgctgcggaccctgcagcagatgctgctcaagaagaccaagtacggggaccggggcaaccagctgcgcaagatgctgctgcaaaactacctccagaaccggaagtccacctcgcggggggaccttcccgaccccataggcactggcctggacccagactggtcggcaatcgcagccacccagtgccggctggacaaggagggggccaccaagttggtatgcgacctcatcaccagcaccaagaacgagaagatcttccaggagagcatcggcctggccatccacctgctggatggtggcaacacagagatccaggtgtggggggcctggggcctggacatgccctcctttgcctccctccctttttggaggaggtgggccttgagttgggcactgaaggccgaggagggtgtgaaagaggagaggcctgagcagtggctgagagaaatccttccacaacctgatgatgagtgacaagaagtcagagcgcttcttcaaggtgctgcacgaccgcatgaagcgggcccagcaggagaccaagtccacggtggcagtcaacatgaatgacctgggcagccagccacatgaggaccgcgagccagtcgaccccaccaccaaagcttcaccggcgcagtcactctcataatcgcccacggacttacatcctcattactattctgcctagaaactcaactacgacgggc

SEQ ID NO: 313454 - DNA, 4874 bp, Homo sapiens
  misc_feature (4486)..(4486): n is a, c, g, or t
  misc_feature (4808)..(4808): n is a, c, g, or t
  misc_feature (4810)..(4810): n is a, c, g, or t
ttatttatttatttatttatttttttgtctatttgttgtgtaggggctatttcttgggctaatgcaagggcagggaccgaacccgcaacctcatggttcctagtcggattcgttaaccactgcgccacgacaggaactcccctgtgtctgacagttttaaagaaagcttttaagtggtgactcgacatcccgaggtgttgcggtcctattatcgcaatgggcactctatcttaggcgttcaaataaaggactaggaagcaaacacccaagcaccggggaacagaacagaaagaaagacggaaggagccaagagttttggagccaactcctggagagggagcggctgaactgattcggaagttggatctctttgtacacaggaatgcggagagaaaaaaaacaaaacccaccccattgcttcatttcccctccaagcctgagcactttctattgtgcaatgaaaaggcttttcacgttgagaaaaatgaatcccgaatttgctctgcaaagggatgagcgcgcctctgggcgccagcctgctctcagctgggcgcggagaccgcgcggtggccgcagggcggccgcggccagggcgctccagggcgcgccctccgcgagcggctccggggtgacgcccgccggagagctggactcccccttccgcgggcgcctgcactggctcttagccagccgagggcccgggtgcagatagtccgggaaccccgagggcggagagctccccactacgcctgggcctcccagggatggcagctccgagagccccctagacccggtgccttgcaggacgcctctggagatcaggagggctggcggcgcattcggcgtccgggaggccgggccccggacgcgcgaggagcgcggggcgcgggaaggcaggcgggtgcacatgggtgccggcgggcgagctgcggggggagggggggcggggtgtggcctccccgcctcccgggcgggatttgcatgtgtgtggtggccccagacttcctgctccttctacgctgcaggtacgcgcgggccgggcggggcgggcgggcggcgggcgcgccaagacgtgggcacctcctcacccggaccccgggccccgccgagccgcctcctggctcccgtggccgccagcccgccccggccgcaccgagcgtcgggatccgaggtgggagcgtacccctccccgctccccggacgcctcagtcctccgcactgagcttggccacgcgcccctaggcgccccccacgccctgggccccggagggccgcagccatgagtgaaatgtccagctttcttcacatcggggacatcgtctccctgtacgccgagggctccgtcaatggcttcatcagcactttggggctggtggatgaccgctgtgtggtggagcccgcggccggggacctggacaacccccctaagaagttccgtgactgcctcttcaaggtgtgccccatgaaccgctactcggcccagaagcagtactggaaggccaagcagactaagcaggacaaggagaagatcgctgatgtggtgttgctgcagaagctgcagcatgcggcgcagatggagcagaagcaaaatgacacggagaacaagaaggtgcatggggatgtcgtgaagtatggcagtgtgatccagctcctgcacatgaagagcaacaagtacctgacagtgaacaagcggcttccggccttgctggagaagaacgccatgcgggtgactctggatgccacaggcaacgagggttcctggctcttcatccagcccttctggaagctgcggagcaacggggacaacgtggtcgtgggggacaaggtgatcctgaatcctgtcaatgccgggcagcctctgcatgccagcaattacgagctcagcgacaacgccggctgcaaggaggtcaattctgtgaactgcaacaccagctggaagatcaacctgtttatgcagtttcgggaccacctggaggaggtgttgaaagggggagacgtggtgcggctgttccatgcggagcaggagaagttcctgacgtgtgacgagtacaagggcaagctgcaggtgttcctgcgaactacactgcgccagtctgccacctcggccaccagctccaatgctctctgggaggtggaggtggtccaccacgacccctgccgtggaggagctgggcactggaatggcttgtaccgcttcaagcacctggctacaggcaactacctggctgctgaggagaaccccagttacaaaggtgatgcctcagatcccaaggcagcaggaatgggggcacagggccgcacaggccgcaggaatgctggggagaagatcaagtactgcctggtggctgtgcctcatggcaatgacatcgcctctctctttgagctggaccccaccaccttgcagaaaaccgactctttcgtgccccggaactcgtacgtccggctgcggcacctctgcaccaacacgtggattcagagcaccaatgtgcccattgacatcgaggaggagcggcccatccggctcatgctgggcacctgccccaccaaggaggacaaggaggcctttgccatcgtgtcagtgcccgtgtctgagatccgagacctggactttgccaatgacgccagctccatgctggccagtgccgtggagaaactcaacgagggcttcatcagccagaatgaccgcaggtttgtcatccagctgctggaagacctggtgttctttgtcagcgatgtccccaacaatgggcagaatgtcctggacatcatggtcactaagcccaaccgggaacggcagaagctgatgagggagcagaacatcctcaaacaggtctttggcattctgaaggccccgttccgtgagaaggggggtgaaggtcccctggtgcggctggaggagctgtcagaccagaagaacgccccctaccagcacatgttccgcctgtgctaccgcgtgttgcggcattcccaggaggactaccgcaagaaccaggagcacattgccaagcagtttgggatgatgcagtcccagattggctacgacatcctggccgaggacaccatcactgccctgctgcacaacaaccgcaagctcctggaaaagcacatcaccaagaccgaggtggagaccttcgtcagccttgtgcgcaagaaccgggagcccaggttcctggactacctctctgacctgtgtgtgtccaaccacatcgccatccccgtcacccaagagctcatctgcaagtgtgtgctggaccccaagaacagtgacattctcatccggaccgagcttcggcccgtgaaggagatggcccaatcccacgagtacctgagcatcgagtactcagaagaggaagtgtggctcacgtggactgacaagaataacgagcatcatgagaagagtgtgaggcagctggcccaggaggcgcgggccggcaacgcccacgacgagaatgtgctcagctactacaggtaccagctgaagctctttgcccgcatgtgcttggaccgccagtacttggccatcgacgagatctcccagcagctgggcgtggacctgattttcctgtgcatggcagacgagatgctgccctttgacctgcgcgcctccttctgccacctgatgctgcacgtgcacgtggaccgtgacccccaggagctggtcacgccggtcaagtttgcccgtctctggactgagatccccacagccatcaccatcaaggactatgattccaacctcaacgcgtcccgagatgacaagaagaacaagtttgccaacaccatggagttcgtggaggactacctcaacaatgtagtcagcgaggccgtgccctttgccaacgaggagaagaacaagctcacttttgaggtggtcagcctggcgcacaatctcatctacttcggcttctacagcttcagcgagctgctgcggctcactcgcacactgctgggcatcatcgactgtgtgcaggggcccccggccatgctgcaggcctatgaggaccccggtggcaagaatgtgcggcggtccatccagggcgtggggcacatgatgtccaccatggtgctgagccgcaagcagtccgtcttcagtgcccccagcctgtctgctggggccagtgctgctgagccgctggacagaagcaagtttgaggagaatgaggacattgtggtgatggagaccaagctgaagatcctggaaatccttcagttcatcctcaacgtccgcctggattaccgcatatcctacctgctgtctgtcttcaagaaggagtttgtggaggtgtttcccatgcaggacagtggggctgatggcacagcccctgccttcgactctaccactgccaacatgaacctggatcgcatcggggagcaggcggaggccatgtttggagtggggaagacaagcagcatgctggaggtggatgacgagggcggccgcatgttcctgcgcgtgctcatccacctcaccatgcacgactatgcgccnctggtctcgggtgccctgcagctgctcttcaagcacttcagccagcgccaggaggccatgcacaccttcaagcaggttcagctgctgatctcagcgcaggacgtggagaactacaaggtgatcaagtcggagctggaccggctgcggaccatggtggagaagtcagagctgtgggtggacaagaagggcagtggcaagggtgaggaggtggaggcaggcgccgccaaggacaagaaagagcgtcccacggacgaggagggctttctgcacccaccaggggagaaaagcagtgagaactaccagatcgtcaagggcatcctgnanaggctgtactagacgtccagtgtgttggggagacaatgaggaagttgacagcgaccgatcattg

SEQ ID NO: 313455 - DNA, 2477 bp, Homo sapiens
ttatttatttatttatttatttttttgtctatttgttgtgtaggggctatttcttgggctaatgcaagggcagggaccgaacccgcaacctcatggttcctagtcggattcgttaaccactgcgccacgacaggaactcccctgtgtctgacagttttaaagaaagcttttaagtggtgactcgacatcccgaggtgttgcggtcctattatcgcaatgggcactctatcttaggcgttcaaataaaggactaggaagcaaacacccaagcaccggggaacagaacagaaagaaagacggaaggagccaagagttttggagccaactcctggagagggagcggctgaactgattcggaagttggatctctttgtacacaggaatgcggagagaaaaaaaacaaaacccaccccattgcttcatttcccctccaagcctgagcactttctattgtgcaatgaaaaggcttttcacgttgagaaaaatgaatcccgaatttgctctgcaaagggatgagcgcgcctctgggcgccagcctgctctcagctgggcgcggagaccgcgcggtggccgcagggcggccgcggccagggcgctccagggcgcgccctccgcgagcggctccggggtgacgcccgccggagagctggactcccccttccgcgggcgcctgcactggctcttagccagccgagggcccgggtgcagatagtccgggaaccccgagggcggagagctccccactacgcctgggcctcccagggatggcagctccgagagccccctagacccggtgccttgcaggacgcctctggagatcaggagggctggcggcgcattcggcgtccgggaggccgggccccggacgcgcgaggagcgcggggcgcgggaaggcaggcgggtgcacatgggtgccggcgggcgagctgcggggggagggggggcggggtgtggcctccccgcctcccgggcgggatttgcatgtgtgtggtggccccagacttcctgctccttctacgctgcaggtacgcgcgggccgggcggggcgggcgggcggcgggcgcgccaagacgtgggcacctcctcacccggaccccgggccccgccgagccgcctcctggctcccgtggccgccagcccgccccggccgcaccgagcgtcgggatccgaggtgggagcgtacccctccccgctccccggacgcctcagtcctccgcactgagcttggccacgcgcccctaggcgccccccacgccctgggccccggagggccgcagccatgagtgaaatgtccagctttcttcacatcggggacatcgtctccctgtacgccgagggctccgtcaatggcttcatcagcactttggggctggtggatgaccgctgtgtggtggagcccgcggccggggacctggacaacccccctaagaagttccgtgactgcctcttcaaggtgtgccccatgaaccgctactcggcccagaagcagtactggaaggccaagcagactaagcaggacaaggagaagatcgctgatgtggtgttgctgcagaagctgcagcatgcggcgcagatggagcagaagcaaaatgacacggagaacaagaaggtgcatggggatgtcgtgaagtatggcagtgtgatccagctcctgcacatgaagagcaacaagtacctgacagtgaacaagcggcttccggccttgctggagaagaacgccatgcgggtgactctggatgccacaggcaacgagggttcctggctcttcatccagcccttctggaagctgcggagcaacggggacaacgtggtcgtgggggacaaggtgatcctgaatcctgtcaatgccgggcagcctctgcatgccagcaattacgagctcagcgacaacgccggctgcaaggaggtcaattctgtgaactgcaacaccagctggaagatcaacctgtttatgcagtttcgggaccacctggaggaggtgttgaaagggggagacgtggtgcggctgttccatgcggagcaggagaagttcctgacgtgtgacgagtacaagggcaagctgcaggtgttcctgcgaactacactgcgccagtctgccacctcggccaccagctccaatgctctctgggaggtggaggtggaaaacgtgatggtgtggactgtgggggtctgcagacacagtgttgagaggaaaggggaggtcctgctgattcctcagaatggcttctggaccctggagatgttttggaaacccataccgggccctgtcctcccctgagaggattctccctttgaaggagtccctttgccgggtgggcgtcttcctggactatgaagctggagatgtctccttctacaacatgagggacagatcgcacatctacacatgtccccgttcagcctttactgtgcctgtgaggcccttcttcaggttagggtctgatgacagccccatcttcatctgtcctgcactcaca

SEQ ID NO: 313456 - DNA, 513 bp, Homo sapiens
ataaccttttggtttttcaaccatgtaaatccatcacctttttatgacattaatttttttaaacattttttaaaagggtcagcaacatggctatgagcccacggccttggtgagttacagggctgccgtgtacagttgggcaggtcgtgcactgctgaagggaatacaagtacctttttccaactggcacagaggcacatggtggctagtgaaggctccgtctctccacccatgcccattctgattgggccctggttcctggacctggggttgcccagggtgggggcctgggctgcagcagcgggctctgtgacttcttgcagacacaccagacgattgtggtgcagctgctgcagtctaccacacgcctcctcgagtgtccgtggctacagcagcagcacaagggctccgtggaggcctgcatccggaccctcgccatggtgggtgagtgtgccggggcactggccagccccaaaccactcctcctgccgctcacagtggggacgcctgccc

SEQ ID NO: 313457 - DNA, 5440 bp, Homo sapiens
  misc_feature (3772)..(3772): n is a, c, g, or t
  misc_feature (4262)..(4262): n is a, c, g, or t
  misc_feature (4671)..(4671): n is a, c, g, or t
ccgggaagccaccccgcctctccgaggcctccctgccccgccccgtcacgcccctttcccggcgggacgctttgagccgccccgaactaagcagggcggtcgggggagtcatactccatgggtttatgtgataaatgatcttggcatagaagagaatttaaagagtgatggaaaacctaaatgtcaaactggtggaaaatctaagaggaccattcaaggcactcataaaactactaaacagagtactgcagtggactgtaaaataacatcgtctacgactggagataaacactttgataaaagtcccactaaaacaaggcaccctcggaaaattgatctaagagctcgatactgggcatttctttttgataatcttcgccgagcagtagatgaaatctatgtaacttgcgaatcagatcagagtgtggtcgaatgtaaggaggtgctaatgatgctggataactatgtaagagatttcaaagcattgattgactggattcagcttcaggaaaagctagagaagacagatgctcaaagcagaccaacatcattggcatgggaagtaaagaagatgtctccgggacgccatgtgattccaagtccatcaacagatagaataaatgtaacatcaaatgctcgacgaagcttaaattttggaggttcaactggcacagtgccagctcctcgtctggctcccacaggtgtcagttgggctgacaaggtaaaggctcatcatacaggctctactgcttcttcagaaataacacccgcccagtcttgcccaccaatgacagtgcagaaggcctcacgcaaaaatgaacggaaagatgctgaaggatgggagaccgttcagagaggaaggcctattcgttctcgatcaacagcagtgatgccaaaagtttcattggcaacagaagccacaagatcaaaggatgacagtgataaagaaaatgtatgtcttttacctgatgaaagcatacagaaaggtcaatttgttggagatggaacttctaatactatagaatctcatcccaaagactcattacactcttgtgaccatcctcttgccgaaaaaacccagttcacagtgagtacattggatgatgtgaagaattctggcagtattcgagacaattatgttcgaacttctgaaatatctgctgtccacattgatacagagtgtgtttcagttatgctgcaagctggtacacctcctttacaagtaaatgaagaaaaatttccagcagagaaagcaaggatagaaaatgaaatggacccttcagatatttcaaatgtgagtgctgctaacttgtccatggcagaagtccttgctaaaaaagaagagctagcagatcgtctagaaaaggccaatgaagaagccattgctagtgctattgctgaagaagaacagttaactagagaaattgaagctgaagaaaacaatgatattaacattgaaactgacaacgacagtgatttttctgccagcatgggcagtgggagtgtttctttctgtggtatgtccatggactggaacgatgtccttgcagattatgaagctcgtgagtcttggcgccaaaatacatcctggggggacattgtagaagaagaacctgctagacctccagggcatggaattcacatgcatgaaaaactttcttcaccctctcgtaaaagaacaattgcagaatctaagaagaaacatgaagaaaaacaaatgaaagcacagcagctaagggaaaagttacgcgaagagaaaacattgaagcttcagaaattgttagaaagggagaaggatgtccggaagtggaaggaagaattgctagatcaacgacgcaggatgatggaagaaaaattacttcatgctgagtttaagcgagaagtgcagttacaagcaattgtgaaaaaagcacaagaagaagaagctaaggtaaatgaaattgcctttataaatacccttgaagcccagaataaacgtcatgatgttttatcaaaattgaaggaatatgaacagaggcttaatgagctacaggaagagcgtcagagaagacaggaagaaaagcaagcacgtgatgaagctgtgcaggaacgcaagagagctctagaggcagagcggcaggcccgtgtagaagaattgttaatgaagaggaaagaacaagaagcccgaattgaacaacagaggcaagaaaaggaaaaagcccgtgaggatgcagcccgggaaagagctagagacagggaagaacgattggcagcactcacagctgctcaacaagaagctatggaagagttacagaaaaaaattcagctcaagcatgatgaaagtattcgaaggcacatggaacagattgaacaaagaaaagaaaaagctgctgagctaagcagtgggcgacatgcaaatactgattatgcccccaaactgaccccttatgaaagaaagaagcagtgttctctctgcaatgtcctgatctcttcagaggtatatctttttagccatgttaaagggagaaaacaccagcaagccgtgagagagaataccagcatccaggggcgtgaactgtcagatgaagaagtggagcatctttccttgaagaagtacattattgacattgtggttgaaagtacagctccagcagaagctttgaaagatggagaagagcggcaaaaaaataaaaaaaaagccaaaaagataaaagcccggatgaacttcagggctaaggaatatgagagtttaatggaaaccaaaaattctggctctgattcaccttataaagcaaagcttcagcgattagccaaagatcttctaaaacaagtacaagttcaagacagtggctcatgggcaaacaataaagtgtctgctttggatcggaccctaggagagatcactagaatactggaaaaagagaatgtggcagatcagattgcatttcaagctgctggtggattaacagcccttgaacacatccttcaagcagtagtcccagccacaaatgtgaacacagttttaagaattcctcctaagtctctctgcaatgcaatcaatgtttacaacctcacctgcaataactgttcagaaaactgcagtgatgttctgtttagtaacaagattaccttcttaatggacctcctgatacaccagttgacggtttatgttccagatgaaaataatactattttggggagaaatacaaataaacaagtttttgaaggcttgacaactggacttctcaaagtcagtgctgtggttttgggctgcctgattgccaatcgaccagatggaaactgccagccagctaccccaaaaataccaacacaggaaatgaaaaacaaaccctcacaaggtgatccttttaacaatcgagttcaggaccttatcagctacgtggtgaacatgggtctgattgacaaactgtgtgcctgcttcctctcggtgcaaggcccagtggatgagaatcccaagatggccatatttctgcagcatgccgcaggactcttacatgcaatgtgtacactgtgctttgctgtcactggaaggtcatacagcatatttgacaataatcgccaggatcccacagggctgacagctgctcttcaggcaaccgacctggctggagttcttcatatgctctactgtgtcctcttccatggcaccatcttggaccccagcactgccagtcccaaggagaattacactcaaaataccatccaagtggccattcagagtttacgtttcttcaacagctttgcagctcttcatctgcctgcttttcaggtnccaagtattggtttatatcgatgttaaccaatcaagagttagtattttagtgtagataggatgtcagattcttctcctgaattggggcataaggaataaactacaataaatggaattataatatatattataatttattaaactactattttctgggaactgtattagatgctctataacatctagcattctcatttattctcatagctaccatgcaaagtattattatacccattttacagatagagaagctgacagttaagtaatgtgcccaaggttacatgtttgtgaaccaggactagtaaccatgactctcccaccccaaagcctatgttcatcctttgccatgctgctatttataaatcttttgtctggaattctttatatcaggacattatcatctcatcaacttttaaatattaaggaaagtaatggtttcttacgtaaatagaaccaaaattagataaattgattgatatgactttctacngatggtttagctgattttgtgtccaatgtaaagtgtataactagctttacagggatttgcatctttagctatgaagtttttatagctaaagaaagaagaattgctttatgctataacaccagactgtcagcctggaaacagattttttttttcatgtaggaaatttaattttcaaaaacactgaacctttggaacagagcaagccccaaggaatagactttctctttcagtttattaactgtcaagtgatttcattaaaaaaggaacaaatttggcagatgatgaacccataatttagatgaattgctttgctctgagggaaaaaggttatagagaaacaaatgtatgaaaatagtggactttgccattctgagatgagaagaatacttctatattgtagctgatgacnaatgtgccattctttaattgatgtcttcctgtcattttgttcaaaaaaggaaacttgtgactaagttgtatcattggatctagtatctttcaactttgtagaattagtttatctgtcacaagaacagaaatcccttcctttgggttaatgcttttctgtctccagagcagttgaactagccttaggaggtaactgactgcacaatacgtagagttctgggaggttacagccacatataaatgagagatatctgctccaaaaaatgtcagtagttcttgcctcagggttgaacataacatctgtgttttatgaagacgtaagcccaccgtattctgtctggaaacagtttggaaatcagggaaccttaactttacatgctcaggatatggagtccaccagtctacccatcagctgcgtcgaaagggagtgatttcttttgttaacagattatggaatagcaaatatctaaaaactgtctcttagcttcctgtttcacgggtcttcttggccaacatttatactgctacaggggactccatatcataaacaagcatctaggataagtcagctgttcggtcagtcactccatcagggagccctaggtccctgctccctgcccctctcctcctgtgaacttgtggcctgtgcaggctcactcacaaaggcgcaccactgaacttcaccagacctgctccctagtgcctttaagcctaaagggcttaataatgggcgataatgtcaagtgatttcattaaaaaaggaaaaagaa

SEQ ID NO: 313458 - DNA, 257 bp, Homo sapiens
aaacaagtatctctaacattaggaacgcaagagagctctagaggcagagcggcaggcccgtgtagaagaattgttaatgaagaggaaagaacaagaagcccgaattgaacaacagaggcaagaaaaggaaaaagcccgtgaggatgcagcccgggaaagagctaggtatctcatttgctatcttgatgaacattttgcactgagtgaatattcaagttgaggtcttaaagccatttactgtaatgttagagtttttt

SEQ ID NO: 313459 - DNA, 467 bp, Homo sapiens
ggagctggttctcactacagtccctcctatattctatttggtgaaaataagtagcttcaaaagtttaaaaaagagattacttgcagcattaacacttctttgttgattaaccagtttcctatggagttttaaagctcatactttgttcttgtccttgtggacacaaattttctaactgccaatgggacctttgtgtcccacattcaaatcctctctagtaatttctgcaaaggttgagaaggctggcatgctaactagttacgcgaagagaaaacattgaagcttcagaaattgttagaaagggagaaggatgtccggaagtggaaggaagaattgctagatcaacgacgcaggatgatggaagaaaaattacttcatgctgagtttaagcgagaagtgcagttacaagcaattgtgaaaaaagcacaagaagaagaagctaaggtatatcataagagctttaaatg

SEQ ID NO: 313460 - DNA, 4359 bp, Homo sapiens
agtcataggtaagagattagggtcctctcaaatatttcctaggtatgcacacaacctgcatatgtgtgtggccttcttgattttcaggaatttgctagaacttttcaaagcctcccatggatgtctcattcttgagcttttccttttaagttttttggtcagctctttgtttgcttcaaatggtatttcaatctctggtagttgtattattttaaaaaattgtcacatttgtttcgcacaaacaaaaaaattgtttttaagactaagttgttttggactctacttctttagagtgaatgttaacatctgatgtttaatggaagggttgaggttcaactggcacagtgccagctcctcgtctggctcccacaggtgtcagttgggctgacaaggtaaaggctcatcatacaggctctactgcttcttcagaaataacacccgcccagtcttgcccaccaatgacagtgcagaaggcctcacgcaaaaatgaacggaaagatgctgaaggatgggagaccgttcagagaggaaggcctattcgttctcgatcaacagcagtgatgccaaaagtttcattggcaacagaagccacaagatcaaaggatgacagtgataaagaaaatgtatgtcttttacctgatgaaagcatacagaaaggtcaatttgttggagatggaacttctaatactatagaatctcatcccaaagactcattacactcttgtgaccatcctcttgccgaaaaaacccagttcacagtgagtacattggatgatgtgaagaattctggcagtattcgagacaattatgttcgaacttctgaaatatctgctgtccacattgatacagagtgtgtttcagttatgctgcaagctggtacacctcctttacaagtaaatgaagaaaaatttccagcagagaaagcaaggatagaaaatgaaatggacccttcagatatttcaaattccatggcagaagtccttgctaaaaaagaagagctagcagatcgtctagaaaaggccaatgaagaagccattgctagtgctattgctgaagaagaacagttaactagagaaattgaagctgaagaaaacaatgatattaacattgaaactgacaacgacagtgatttttctgccagcatgggcagtgggagtgtttctttctgtggtatgtccatggactggaacgatgtccttgcagattatgaagctcgtgagtcttggcgccaaaatacatcctggggggacattgtagaagaagaacctgctagacctccagggcatggaattcacatgcatgaaaaactttcttcaccctctcgtaaaagaacaattgcagaatctaagaagaaacatgaagaaaaacaaatgaaagcacagcagctaagggaaaagttacgcgaagagaaaacattgaagcttcagaaattgttagaaagggagaaggatgtccggaagtggaaggaagaattgctagatcaacgacgcaggatgatggaagaaaaattacttcatgctgagtttaagcgagaagtgcagttacaagcaattgtgaaaaaagcacaagaagaagaagctaaggtaaatgaaattgcctttataaatacccttgaagcccagaataaacgtcatgatgttttatcaaaattgaaggaatatgaacagaggcttaatgagctacaggaagagcgtcagagaagacaggaagaaaagcaagcacgtgatgaagctgtgcaggaacgcaagagagctctagaggcagagcggcaggcccgtgtagaagaattgttaatgaagaggaaagaacaagaagcccgaattgaacaacagaggcaagaaaaggaaaaagcccgtgaggatgcagcccgggaaagagctagagacagggaagaacgattggcagcactcacagctgctcaacaagaagctatggaagagttacagaaaaaaattcagctcaagcatgatgaaagtattcgaaggcacatggaacagattgaacaaagaaaagaaaaagctgctgagctaagcagtgggcgacatgcaaatactgattatgcccccaaactgaccccttatgaaagaaagaagcagtgttctctctgcaatgtcctgatctcttcagaggtatatctttttagccatgttaaagggagaaaacaccagcaagccgtgagagagaataccagcatccaggggcgtgaactgtcagatgaagaagtggagcatctttccttgaagaagtacattattgacattgtggttgaaagtacagctccagcagaagctttgaaagatggagaagagcggcaaaaaaataaaaaaaaagccaaaaagataaaagcccggatgaacttcagggctaaggaatatgagagtttaatggaaaccaaaaattctggctctgattcaccttataaagcaaagcttcagcgattagccaaagatcttctaaaacaagtacaagttcaagacagtggctcatgggcaaacaataaagtgtctgctttggatcggaccctaggagagatcactagaatactggaaaaagagaatgtggcagatcagattgcatttcaagctgctggtggattaacagcccttgaacacatccttcaagcagtagtcccagccacaaatgtgaacacagttttaagaattcctcctaagtctctctgcaatgcaatcaatgtttacaacctcacctgcaataactgttcagaaaactgcagtgatgttctgtttagtaacaagattaccttcttaatggacctcctgatacaccagttgacggtttatgttccagatgaaaataatactattttggggagaaatacaaataaacaagtttttgaaggcttgacaactggacttctcaaagtcagtgctgtggttttgggctgcctgattgccaatcgaccagatggaaactgccagccagctaccccaaaaataccaacacaggaaatgaaaaacaaaccctcacaaggtgatccttttaacaatcgagttcaggaccttatcagctacgtggtgaacatgggtctgattgacaaactgtgtgcctgcttcctctcggtgcaaggcccagtggatgagaatcccaagatggccatatttctgcagcatgccgcaggactcttacatgcaatgtgtacactgtgctttgctgtcactggaaggtcatacagcatatttgacaataatcgccaggatcccacagggctgacagctgctcttcaggcaaccgacctggctggagttcttcatatgctctactgtgtcctcttccatggcaccatcttggaccccagcactgccagtcccaaggagaattacactcaaaataccatccaagtggccattcagagtttacgtttcttcaacagctttgcagctcttcatctgcctgcttttcagtctattgtaggggcagagggcttgtcccttgcattccggcacatggccagctccctgctgggccactgcagccaagtctcctgtgaaagcctccttcatgaggtcatcgtctgtgtgggctacttcactgtcaaccacccagataaccaggtgatcgtgcagtccggccgccaccccacagtgctgcagaagctctgccagttgcccttccagtatttcagtgacccacggctgatcaaagtactgttcccttcacttatcgctgcttgttacaacaaccatcagaacaagatcattctggagcaagagatgagctgtgttttactggccactttcattcaggatttggcacagactccaggtcaagcggaaaaccagccttaccaacccaaagggaaatgccttggttcccaagactatcttgagctggctaacagatttcctcagcaggcctgggaagaagctcgacagtttttcttgaaaaaagagaaaaaataaatgttttggttgattctgtatttgagtacccttgttaatattttaaattgtccaaacaaacattctaattgttccttaagaactcattttcccatgtttatactcttcccacactgtagatatggcatgtactttacactatttataatgactgtagatacttgaatgttctacttgctaattttgcaagttgagtttatttcatttatgcagagtatcttggagtttggtaatttccatcttatgataatatatactttgcatttgtgatatgggtgaaaggagacataaaattagcaagtctgttttgttcttgtaataaagtaacttattctgttttcattgttgacttttcatgttaaggaaatacgaatctgaaagaaaaatgttaactccagctcttgaagtatcttaaataaagacttaattaaagtttacc

SEQ ID NO: 313461 - DNA, 4752 bp, Homo sapiens
ccgggaagccaccccgcctctccgaggcctccctgccccgccccgtcacgcccctttcccggcgggacgctttgagccgccccgaactaagcagggcggtcgggggagtcatactccatgggtttatgtgataaatgatcttggcatagaagagaatttaaagagtgatggcttcattccagcgctccaatagtcatgacaaagtaaggagaatagttgcagaggagggtcgtacagcaagaaacctaatagcttggagtgttccactagaaagcaaagatgatgatggaaaacctaaatgtcaaactggtggaaaatctaagaggaccattcaaggcactcataaaactactaaacagagtactgcagtggactgtaaaataacatcgtctacgactggagataaacactttgataaaagtcccactaaaacaaggcaccctcggaaaattgatctaagagctcgatactgggcatttctttttgataatcttcgccgagcagtagatgaaatctatgtaacttgcgaatcagatcagagtgtggtcgaatgtaaggaggtgctaatgatgctggataactatgtaagagatttcaaagcattgattgactggattcagcttcaggaaaagctagagaagacagatgctcaaagcagaccaacatcattggcatgggaagtaaagaagatgtctccgggacgccatgtgattccaagtccatcaacagatagaataaatgtaacatcaaatgctcgacgaagcttaaattttggaggttcaactggcacagtgccagctcctcgtctggctcccacaggtgtcagttgggctgacaaggtaaaggctcatcatacaggctctactgcttcttcagaaataacacccgcccagtcttgcccaccaatgacagtgcagaaggcctcacgcaaaaatgaacggaaagatgctgaaggatgggagaccgttcagagaggaaggcctattcgttctcgatcaacagcagtgatgccaaaagtttcattggcaacagaagccacaagatcaaaggatgacagtgataaagaaaatgtatgtcttttacctgatgaaagcatacagaaaggtcaatttgttggagatggaacttctaatactatagaatctcatcccaaagactcattacactcttgtgaccatcctcttgccgaaaaaacccagttcacagtgagtacattggatgatgtgaagaattctggcagtattcgagacaattatgttcgaacttctgaaatatctgctgtccacattgatacagagtgtgtttcagttatgctgcaagctggtacacctcctttacaagtaaatgaagaaaaatttccagcagagaaagcaaggatagaaaatgaaatggacccttcagatatttcaaattccatggcagaagtccttgctaaaaaagaagagctagcagatcgtctagaaaaggccaatgaagaagccattgctagtgctattgctgaagaagaacagttaactagagaaattgaagctgaagaaaacaatgatattaacattgaaactgacaacgacagtgatttttctgccagcatgggcagtgggagtgtttctttctgtggtatgtccatggactggaacgatgtccttgcagattatgaagctcgtgagtcttggcgccaaaatacatcctggggggacattgtagaagaagaacctgctagacctccagggcatggaattcacatgcatgaaaaactttcttcaccctctcgtaaaagaacaattgcagaatctaagaagaaacatgaagaaaaacaaatgaaagcacagcagctaagggaaaagttacgcgaagagaaaacattgaagcttcagaaattgttagaaagggagaaggatgtccggaagtggaaggaagaattgctagatcaacgacgcaggatgatggaagaaaaattacttcatgctgagtttaagcgagaagtgcagttacaagcaattgtgaaaaaagcacaagaagaagaagctaaggtaaatgaaattgcctttataaatacccttgaagcccagaataaacgtcatgatgttttatcaaaattgaaggaatatgaacagaggcttaatgagctacaggaagagcgtcagagaagacaggaagaaaagcaagcacgtgatgaagctgtgcaggaacgcaagagagctctagaggcagagcggcaggcccgtgtagaagaattgttaatgaagaggaaagaacaagaagcccgaattgaacaacagaggcaagaaaaggaaaaagcccgtgaggatgcagcccgggaaagagctagagacagggaagaacgattggcagcactcacagctgctcaacaagaagctatggaagagttacagaaaaaaattcagctcaagcatgatgaaagtattcgaaggcacatggaacagattgaacaaagaaaagaaaaagctgctgagctaagcagtgggcgacatgcaaatactgattatgcccccaaactgaccccttatgaaagtagccatgttaaagggagaaaacaccagcaagccgtgagagagaataccagcatccaggggcgtgaactgtcagatgaagaagtggagcatctttccttgaagaagtacattattgacattgtggttgaaagtacagctccagcagaagctttgaaagatggagaagagcggcaaaaaaataaaaaaaaagccaaaaagataaaagcccggatgaacttcagggctaaggaatatgagagtttaatggaaaccaaaaattctggctctgattcaccttataaagcaaagcttcagcgattagccaaagatcttctaaaacaagtacaagttcaagacagtggctcatgggcaaacaataaagtgtctgctttggatcggaccctaggagagatcactagaatactggaaaaagagaatgtggcagatcagattgcatttcaagctgctggtggattaacagcccttgaacacatccttcaagcagtagtcccagccacaaatgtgaacacagttttaagaattcctcctaagtctctctgcaatgcaatcaatgtttacaacctcacctgcaataactgttcagaaaactgcagtgatgttctgtttagtaacaagattaccttcttaatggacctcctgatacaccagttgacggtttatgttccagatgaaaataatactattttggggagaaatacaaataaacaagtttttgaaggcttgacaactggacttctcaaagtcagtgctgtggttttgggctgcctgattgccaatcgaccagatggaaactgccagccagctaccccaaaaataccaacacaggaaatgaaaaacaaaccctcacaaggtgatccttttaacaatcgagttcaggaccttatcagctacgtggtgaacatgggtctgattgacaaactgtgtgcctgcttcctctcggtgcaaggcccagtggatgagaatcccaagatggccatatttctgcagcatgccgcaggactcttacatgcaatgtgtacactgtgctttgctgtcactggaaggtcatacagcatatttgacaataatcgccaggatcccacagggctgacagctgctcttcaggcaaccgacctggctggagttcttcatatgctctactgtgtcctcttccatggcaccatcttggaccccagcactgccagtcccaaggagaattacactcaaaataccatccaagtggccattcagagtttacgtttcttcaacagctttgcagctcttcatctgcctgcttttcagtctattgtaggggcagagggcttgtcccttgcattccggcacatggccagctccctgctgggccactgcagccaagtctcctgtgaaagcctccttcatgaggtcatcgtctgtgtgggctacttcactgtcaaccacccagataaccaggtgatcgtgcagtccggccgccaccccacagtgctgcagaagctctgccagttgcccttccagtatttcagtgacccacggctgatcaaagtactgttcccttcacttatcgctgcttgttacaacaaccatcagaacaagatcattctggagcaagagatgagctgtgttttactggccactttcattcaggatttggcacagactccaggtcaagcggaaaaccagccttaccaacccaaagggaaatgccttggttcccaagactatcttgagctggctaacagatttcctcagcaggcctgggaagaagctcgacagtttttcttgaaaaaagagaaaaaataaatgttttggttgattctgtatttgagtacccttgttaatattttaaattgtccaaacaaacattctaattgttccttaagaactcattttcccatgtttatactcttcccacactgtagatatggcatgtactttacactatttataatgactgtagatacttgaatgttctacttgctaattttgcaagttgagtttatttcatttatgcagagtatcttggagtttggtaatttccatcttatgataatatatactttgcatttgtgatatgggtgaaaggagacataaaattagcaagtctgttttgttcttgtaataaagtaacttattctgttttcattgttgacttttcatgttaaggaaatacgaatctgaaagaaaaatgttaactccagctcttgaagtatcttaaataaagacttaattaaagtttacc

SEQ ID NO: 313462 - DNA, 4386 bp, Homo sapiens
ccgggaagccaccccgcctctccgaggcctccctgccccgccccgtcacgcccctttcccggcgggacgctttgagccgccccgaactaagcagggcggtcgggggagtcatactccatgggtttatgtgataaatgatcttggcatagaagagaatttaaagagtgatggcttcattccagcgctccaatagtcatgacaaagtaaggagaatagttgcagaggagggtcgtacagcaagaaacctaatagcttggagtgttccactagaaagcaaagatgatgatggaaaacctaaatgtcaaactggtggaaaatctaagaggaccattcaaggcactcataaaactactaaacagagtactgcagtggactgtaaaataacatcgtctacgactggagataaacactttgataaaagtcccactaaaacaaggcaccctcggaaaattgatctaagagctcgatactgggcatttctttttgataatcttcgccgagcagtagatgaaatctatgtaacttgcgaatcagatcagagtgtggtcgaatgtaaggaggtgctaatgatgctggataactatgtaagagatttcaaagcattgattgactggattcagcttcaggaaaagctagagaagacagatgctcaaagcagaccaacatcattggcatgggaagtaaagaagatgtctccgggacgccatgtgattccaagtccatcaacagatagaataaatgtaacatcaaatgctcgacgaagcttaaattttggaggttcaactggcacagtgccagctcctcgtctggctcccacaggtgtcagttgggctgacaaggtaaaggctcatcatacaggctctactgcttcttcagaaataacacccgcccagtcttgcccaccaatgacagtgcagaaggcctcacgcaaaaatgaacggaaagatgctgaaggatgggagaccgttcagagaggaaggcctattcgttctcgatcaacagcagtgatgccaaaagtttcattggcaacagaagccacaagatcaaaggatgacagtgataaagaaaatgtatgtcttttacctgatgaaagcatacagaaaggtcaatttgttggagatggaacttctaatactatagaatctcatcccaaagactcattacactcttgtgaccatcctcttgccgaaaaaacccagttcacagtgagtacattggatgatgtgaagaattctggcagtattcgagacaattatgttcgaacttctgaaatatctgctgtccacattgatacagagtgtgtttcagttatgctgcaagctggtacacctcctttacaagtaaatgaagaaaaatttccagcagagaaagcaaggatagaaaatgaaatggacccttcagatatttcaaattccatggcagaagtccttgctaaaaaagaagagctagcagatcgtctagaaaaggccaatgaagaagccattgctagtgctattgctgaagaagaacagttaactagagaaattgaagctgaagaaaacaatgatattaacattgaaactgacaacgacagtgatttttctgccagcatgggcagtgggagtgtttctttctgtggtatgtccatggactggaacgatgtccttgcagattatgaagctcgtgagtcttggcgccaaaatacatcctggggggacattgtagaagaagaacctgctagacctccagggcatggaattcacatgcatgaaaaactttcttcaccctctcgtaaaagaacaattgcagaatctaagaagaaacatgaagaaaaacaaatgaaagcacagcagctaagggaaaagttacgcgaagagaaaacattgaagcttcagaaattgttagaaagggagaaggatgtccggaagtggaaggaagaattgctagatcaacgacgcaggatgatggaagaaaaattacttcatgctgagtttaagcgagaagtgcagttacaagcaattgtgaaaaaagcacaagaagaagaagctaaggtaaatgaaattgcctttataaatacccttgaagcccagaataaacgtcatgatgttttatcaaaattgaaggaatatgaacagaggcttaatgagctacaggaagagcgtcagagaagacaggaagaaaagcaagcacgtgatgaagctgtgcaggaacgcaagagagctctagaggcagagcggcaggcccgtgtagaagaattgttaatgaagaggaaagaacaagaagcccgaattgaacaacagaggcaagaaaaggaaaaagcccgtgaggatgcagcccgggaaagagctagagacagggaagaacgattggcagcactcacagctgctcaacaagaagctatggaagagttacagaaaaaaattcagctcaagcatgatgaaagtattcgaaggcacatggaacagattgaacaaagaaaagaaaaagctgctgagctaagcagtgggcgacatgcaaatactgattatgcccccaaactgaccccttatgaaagaaagaagcagtgttctctctgcaatgtcctgatctcttcagaggtatatctttttagccatgttaaagggagaaaacaccagcaagccgtgagagagaataccagcatccaggggcgtgaactgtcagatgaagaagtggagcatctttccttgaagaagtacattattgacattgtggttgaaagtacagctccagcagaagctttgaaagatggagaagagcggcaaaaaaataaaaaaaaagccaaaaagataaaagcccggatgaacttcagggctaaggaatatgagagtttaatggaaaccaaaaattctggctctgattcaccttataaagcaaagcttcagcgattagccaaagatcttctaaaacaagtacaagttcaagacagtggctcatgggcaaacaataaagtgtctgctttggatcggaccctaggagagatcactagaatactggaaaaagagaatgtggcagatcagattgcatttcaagctgctggtggattaacagcccttgaacacatccttcaagcagtagtcccagccacaaatgtgaacacagttttaagaattcctcctaagtctctctgcaatgcaatcaatgtttacaacctcacctgcaataactgttcagaaaactgcagtgatgttctgtttagtaacaagattaccttcttaatggacctcctgatacaccagttgacggtttatgttccagatgaaaataatactattttggggagaaatacaaataaacaagtttttgaaggcttgacaactggacttctcaaagtcagtgctgtggttttgggctgcctgattgccaatcgaccagatggaaactgccagccagctaccccaaaaataccaacacaggaaatgaaaaacaaaccctcacaaggtgatccttttaacaatcgagttcaggaccttatcagctacgtggtgaacatgggtctgattgacaaactgtgtgcctgcttcctctcggtgcaaggcccagtggatgagaatcccaagatggccatatttctgcagcatgccgcaggactcttacatgcaatgtgtacactgtgctttgctgtcactggaaggtcatacagcatatttgacaataatcgccaggatcccacagggctgacagctgctcttcaggcaaccgacctggctggagttcttcatatgctctactgtgtcctcttccatggcaccatcttggaccccagcactgccagtcccaaggagaattacactcaaaataccatccaagtggccattcagagtttacgtttcttcaacagctttgcagctcttcatctgcctgcttttcagtctattgtaggggcagagggcttgtcccttgcattccggcacatggccagctccctgctgggccactgcagccaagtctcctgtgaaagcctccttcatgaggtcatcgtctgtgtgggctacttcactgtcaaccacccagataaccaggtgatcgtgcagtccggccgccaccccacagtgctgcagaagctctgccagttgcccttccagtatttcagtgacccacggctgatcaaagtactgttcccttcacttatcgctgcttgttacaacaaccatcagaacaagatcattctggagcaagagatgagctgtgttttactggccactttcattcaggatttggcacagactccaggtcaagcggaaaaccagccttaccaacccaaagggaaatgccttggttcccaagactatcttgagctggctaacagatttcctcagcaggcctgggaagaagctcgacagtttttcttgaaaaaagagaaaaaataaatgttttggttgattctgt

SEQ ID NO: 313463 - DNA, 4736 bp, Homo sapiens
ccgggaagccaccccgcctctccgaggcctccctgccccgccccgtcacgcccctttcccggcgggacgctttgagccgccccgaactaagcagggcggtcgggggagtcatactccatgggtttatgtgataaatgatcttggcatagaagagaatttaaagagtgatggcttcattccagcgctccaatagtcatgacaaagtaaggagaatagttgcagaggagggtcgtacagcaagaaacctaatagcttggagtgttccactagaaagcaaagatgatgatggaaaacctaaatgtcaaactggtggaaaatctaagaggaccattcaaggcactcataaaactactaaacagagtactgcagtggactgtaaaataacatcgtctacgactggagataaacactttgataaaagtcccactaaaacaaggcaccctcggaaaattgatctaagagctcgatactgggcatttctttttgataatcttcgccgagcagtagatgaaatctatgtaacttgcgaatcagatcagagtgtggtcgaatgtaaggaggtgctaatgatgctggataactatgtaagagatttcaaagcattgattgactggattcagcttcaggaaaagctagagaagacagatgctcaaagcagaccaacatcattggcatgggaagtaaagaagatgtctccgggacgccatgtgattccaagtccatcaacagatagaataaatgtaacatcaaatgctcgacgaagcttaaattttggaggttcaactggcacagtgccagctcctcgtctggctcccacaggtgtcagttgggctgacaaggtaaaggctcatcatacaggctctactgcttcttcagaaataacacccgcccagtcttgcccaccaatgacagtgcagaaggcctcacgcaaaaatgaacggaaagatgctgaaggatgggagaccgttcagagaggaaggcctattcgttctcgatcaacagcagtgatgccaaaagtttcattggcaacagaagccacaagatcaaaggatgacagtgataaagaaaatgtatgtcttttacctgatgaaagcatacagaaaggtcaatttgttggagatggaacttctaatactatagaatctcatcccaaagactcattacactcttgtgaccatcctcttgccgaaaaaacccagttcacagtgagtacattggatgatgtgaagaattctggcagtattcgagacaattatgttcgaacttctgaaatatctgctgtccacattgatacagagtgtgtttcagttatgctgcaagctggtacacctcctttacaagtaaatgaagaaaaatttccagcagagaaagcaaggatagaaaatgaaatggacccttcagatatttcaaattccatggcagaagtccttgctaaaaaagaagagctagcagatcgtctagaaaaggccaatgaagaagccattgctagtgctattgctgaagaagaacagttaactagagaaattgaagctgaagaaaacaatgatattaacattgaaactgacaacgacagtgatttttctgccagcatgggcagtgggagtgtttctttctgtggtatgtccatggactggaacgatgtccttgcagattatgaagctcgtgagtcttggcgccaaaatacatcctggggggacattgtagaagaagaacctgctagacctccagggcatggaattcacatgcatgaaaaactttcttcaccctctcgtaaaagaacaattgcagaatctaagaagaaacatgaagaaaaacaaatgaaagcacagcagctaagggaaaagttacgcgaagagaaaacattgaagcttcagaaattgttagaaagggagaaggatgtccggaagtggaaggaagaattgctagatcaacgacgcaggatgatggaagaaaaattacttcatgctgagtttaagcgagaagtgcagttacaagcaattgtgaaaaaagcacaagaagaagaagctaaggtaaatgaaattgcctttataaatacccttgaagcccagaataaacgtcatgatgttttatcaaaattgaaggaatatgaacagaggcttaatgagctacaggaagagcgtcagagaagacaggaagaaaagcaagcacgtgatgaagctgtgcaggaacgcaagagagctctagaggcagagcggcaggcccgtgtagaagaattgttaatgaagaggaaagaacaagaagcccgaattgaacaacagaggcaagaaaaggaaaaagcccgtgaggatgcagcccgggaaagagctagagacagggaagaacgattggcagcactcacagctgctcaacaagaagctatggaagagttacagaaaaaaattcagctcaagcatgatgaaagtattcgaaggcacatggaacagattgaacaaagaaaagaaaaagctgctgagctaagcagtgggcgacatgcaaatactgattatgcccccaaactgaccccttatgaaagaaagaagcagtgttctctctgcaatgtcctgatctcttcagaggtatatctttttagccatgttaaagggagaaaacaccagcaagccgtgagagagaataccagcatccaggggcgtgaactgtcagatgaagaagtggagcatctttccttgaagaagtacattattgacattgtggttgaaagtacagctccagcagaagctttgaaagatggagaagagcggcaaaaaaataaaaaaaaagccaaaaagataaaagcccggatgaacttcagggctaaggaatatgagagtttaatggaaaccaaaaattctggctctgattcaccttataaagcaaagcttcagcgattagccaaagatcttctaaaacaagtacaagttcaagacagtggctcatgggcaaacaataaagtgtctgctttggatcggaccctaggagagatcactagaatactggaaaaagagaatgtggcagatcagattgcatttcaagctgctggtggattaacagcccttgaacacatccttcaagcagtagtcccagccacaaatgtgaacacagttttaagaattcctcctaagtctctctgcaatgcaatcaatgtttacaacctcacctgcaataactgttcagaaaactgcagtgatgttctgtttagtaacaagattaccttcttaatggacctcctgatacaccagttgacggtttatgttccagatgaaaataatactattttggggagaaatacaaataaacaagtttttgaaggcttgacaactggacttctcaaagtcagtgctgtggttttgggctgcctgattgccaatcgaccagatggaaactgccagccagctaccccaaaaataccaacacaggaaatgaaaaacaaaccctcacaaggtgatccttttaacaatcgagttcaggaccttatcagctacgtggtgaacatgggtctgattgacaaactgtgtgcctgcttcctctcggtgcaaggcccagtggatgagaatcccaagatggccatatttctgcagcatgccgcaggactcttacatgcaatgtgtacactgtgctttgctgtcactggaaggtcatacagcatatttgacaataatcgccaggatcccacagggctgacagctgctcttcaggcaaccgacctggctggagttcttcatatgctctactgtgtcctcttccatggcaccatcttggaccccagcactgccagtcccaaggagaattacactcaaaataccatccaagtggccattcagagtttacgtttcttcaacagctttgcagctcttcatctgcctgcttttcagtctattgtaggggcagagggcttgtcccttgcattccggcacatggccagctccctgctgggccactgcagccaagtctcctgtgaaagcctccttcatgaggtcatcgtctgtgtgggctacttcactgtcaaccacccagataaccaggtgatcgtgcagtccggccgccaccccacagtgctgcagaagctctgccagttgcccttccagtatttcagtgacccacggctgatcaaagtactgttcccttcacttatcgctgcttgttacaacaaccatcagaacaagatcattctggagcaagagatgagctgtgttttactggccactttcattcaggatttggcacagactccaggtcaagcggaaaaccagccttaccaacccaaagggaaatgccttggttcccaagactatcttgagctggctaacagatttcctcagcaggcctgggaagaagctcgacagtttttcttgaaaaaagagaaaaaataaatgttttggttgattctgtatttgagtacccttgttaatattttaaattgtccaaacaaacattctaattgttccttaagaactcattttcccatgtttatactcttcccacactgtagatatggcatgtactttacactatttataatgactgtagatacttgaatgttctacttgctaattttgcaagttgagtttatttcatttatgcagagtatcttggagtttggtaatttccatcttatgataatatatactttgcatttgtgatatgggtgaaaggagacataaaattagcaagtctgttttgttcttgtaataaagtaacttattctgtaaaaaaaaataaaatggccttcttggcctcat

SEQ ID NO: 313464 - DNA, 3566 bp, Homo sapiens
ccgggaagccaccccgcctctccgaggcctccctgccccgccccgtcacgcccctttcccggcgggacgctttgagccgccccgaactaagcagggcggtcgggggagtcatactccatgggtttatgtgataaatgatcttggcatagaagagaatttaaagagtgatggcttcattccagcgctccaatagtcatgacaaagtaaggagaatagttgcagaggagggtcgtacagcaagaaacctaatagcttggagtgttccactagaaagcaaagatgatgatggaaaacctaaatgtcaaactggtggaaaatctaagaggaccattcaaggcactcataaaactactaaacagagtactgcagtggactgtaaaataacatcgtctacgactggagataaacactttgataaaagtcccactaaaacaaggcaccctcggaaaattgatctaagagctcgatactgggcatttctttttgataatcttcgccgagcagtagatgaaatctatgtaacttgcgaatcagatcagagtgtggtcgaatgtaaggaggtgctaatgatgctggataactatgtaagagatttcaaagcattgattgactggattcagcttcaggaaaagctagagaagacagatgctcaaagcagaccaacatcattggcatgggaagtaaagaagatgtctccgggacgccatgtgattccaagtccatcaacagatagaataaatgtaacatcaaatgctcgacgaagcttaaattttggaggttcaactggcacagtgccagctcctcgtctggctcccacaggtgtcagttgggctgacaaggtaaaggctcatcatacaggctctactgcttcttcagaaataacacccgcccagtcttgcccaccaatgacagtgcagaaggcctcacgcaaaaatgaacggaaagatgctgaaggatgggagaccgttcagagaggaaggcctattcgttctcgatcaacagcagtgatgccaaaagtttcattggcaacagaagccacaagatcaaaggatgacagtgataaagaaaatgtatgtcttttacctgatgaaagcatacagaaaggtcaatttgttggagatggaacttctaatactatagaatctcatcccaaagactcattacactcttgtgaccatcctcttgccgaaaaaacccagttcacagtgagtacattggatgatgtgaagaattctggcagtattcgagacaattatgttcgaacttctgaaatatctgctgtccacattgatacagagtgtgtttcagttatgctgcaagctggtacacctcctttacaagtaaatgaagaaaaatttccagcagagaaagcaaggatagaaaatgaaatggacccttcagatatttcaaattccatggcagaagtccttgctaaaaaagaagagctagcagatcgtctagaaaaggccaatgaagaagccattgctagtgctattgctgaagaagaacagttaactagagaaattgaagctgaagaaaacaatgatattaacattgaaactgacaacgacagtgatttttctgccagcatgggcagtgggagtgtttctttctgtggtatgtccatggactggaacgatgtccttgcagattatgaagctcgtgagtcttggcgccaaaatacatcctggggggacattgtagaagaagaacctgctagacctccagggcatggaattcacatgcatgaaaaactttcttcaccctctcgtaaaagaacaattgcagaatctaagaagaaacatgaagaaaaacaaatgaaagcacagcagctaagggaaaagttacgcgaagagaaaacattgaagcttcagaaattgttagaaagggagaaggatgtccggaagtggaaggaagaattgctagatcaacgacgcaggatgatggaagaaaaattacttcatgctgagtttaagcgagaagtgcagttacaagcaattgtgaaaaaagcacaagaagaagaagctaaggtaaatgaaattgcctttataaatacccttgaagcccagaataaacgtcatgatgttttatcaaaattgaaggaatatgaacagaggcttaatgagctacaggaagagcgtcagagaagacaggaagaaaagcaagcacgtgatgaagctgtgcaggaacgcaagagagctctagaggcagagcggcaggcccgtgtagaagaattgttaatgaagaggaaagaacaagaagcccgaattgaacaacagaggcaagaaaaggaaaaagcccgtgaggatgcagcccgggaaagagctagagacagggaagaacgattggcagcactcacagctgctcaacaagaagctatggaagagttacagaaaaaaattcagctcaagcatgatgaaagtattcgaaggcacatggaacagattgaacaaagaaaagaaaaagctgctgagctaagcagtgggcgacatgcaaatactgattatgcccccaaactgaccccttatgaaagaaagaagcagtgttctctctgcaatgtcctgatctcttcagaggtatatctttttagccatgttaaagggagaaaacaccagcaagccgtgagagagaataccagcatccaggggcgtgaactgtcagatgaagaagtggagcatctttccttgaagaagtacattattgacattgtggttgaaagtacagctccagcagaagctttgaaagatggagaagagcggcaaaaaaataaaaaaaaagccaaaaagataaaagcccggatgaacttcagggctaaggaatatgagagtttaatggaaaccaaaaattctggctctgattcaccttataaagcaaagcttcagcgattagccaaagatcttctaaaacaagtacaagttcaagacagtggctcatgggcaaacaataaagtgtctgctttggatcggaccctaggagagatcactagaatactggaaaaagagaatgtggcagatcagattgcatttcaagctgctggtggattaacagcccttgaacacatccttcaagcagtagtcccagccacaaatgtgaacacagttttaagaattcctcctaagtctctctgcaatgcaatcaatgtttacaacctcacctgcaataactgttcagaaaactgcagtgatgttctgtttagtaacaagattaccttcttaatggacctcctgatacaccagttgacgcagaggccagaagacagtgaccatctttagagtgcttaaagaagaaacaaacatcaatctggaattctatatccatcaaaatatccttcaagaataaatgtgaaataaatacattttcatattaaatatatatacacctccgagaatttgttgacaacagacctgcactactagaaatgctaaaggaagttcttcaggctgaagggaaatgatacccagtgaaaatttctatcttcaggaaatgataaagagcagtggaaacagactctgtatttattttaaaattttaaaaaatacatgtgatggttaaattttactttaaaa

SEQ ID NO: 313465 - DNA, 1256 bp, Homo sapiens
gtggtttatgaagatggaatggatggcacttcatgcccacacaaatcatgctgtttttgcccagctgtactctcctttaaggtcatacagcatatttgacaataatcgccaggatcccacagggctgacagctgctcttcaggcaaccgacctggctggagttcttcatatgctctactgtgtcctcttccatggcaccatcttggaccccagcactgccagtcccaaggagaattacactcaaaataccatccaagtggccattcagagtttacgtttcttcaacagctttgcagctcttcatctgcctgcttttcagtctattgtaggggcagagggcttgtcccttgcattccggcacatggccagctccctgctgggccactgcagccaagtctcctgtgaaagcctccttcatgaggtcatcgtctgtgtgggctacttcactgtcaaccacccagataaccaggtgatcgtgcagtccggccgccaccccacagtgctgcagaagctctgccagttgcccttccagtatttcagtgacccacggctgatcaaagtactgttcccttcacttatcgctgcttgttacaacaaccatcagaacaagatcattctggagcaagagatgagctgtgttttactggccactttcattcaggatttggcacagactccaggtcaagcggaaaaccagccttaccaacccaaagggaaatgccttggttcccaagactatcttgagctggctaacagatttcctcagcaggcctgggaagaagctcgacagtttttcttgaaaaaagagaaaaaataaatgttttggttgattctgtatttgagtacccttgttaatattttaaattgtccaaacaaacattctaattgttccttaagaactcattttcccatgtttatactcttcccacactgtagatatggcatgtactttacactatttataatgactgtagatacttgaatgttctacttgctaattttgcaagttgagtttatttcatttatgcagagtatcttggagtttggtaatttccatcttatgataatatatactttgcatttgtgatatgggtgaaaggagacataaaattagcaagtctgttttgttcttgtaataaagtaacttattctgttttcattgttgacttttcatgttaaggaaatacgaatctgaaagaaaaatgttaactccagctcttgaagtatcttaaataaagacttaattaaagtttacc

SEQ ID NO: 313466 - DNA, 1990 bp, Homo sapiens
ccgggaagccaccccgcctctccgaggcctccctgccccgccccgtcacgcccctttcccggcgggacgctttgagccgccccgaactaagcagggcggtcgggggagtcatactccatgggtttatgtgataaatgatcttggcatagaagagaatttaaagagtgatggcttcattccagcgctccaatagtcatgacaaagtaaggagaatagttgcagaggagggtcgtacagcaagaaacctaatagcttggagtgttccactagaaagcaaagatgatgatggaaaacctaaatgtcaaactggtggaaaatctaagaggaccattcaaggcactcataaaactactaaacagagtactgcagtggactgtaaaataacatcgtctacgactggagataaacactttgataaaagtcccactaaaacaaggcaccctcggaaaattgatctaagagctcgatactgggcatttctttttgataatcttcgccgagcagtagatgaaatctatgtaacttgcgaatcagatcagagtgtggtcgaatgtaaggaggtgctaatgatgctggataactatgtaagagatttcaaagcattgattgactggattcagcttcaggaaaagctagagaagacagatgctcaaagcagaccaacatcattggcatgggaagtaaagaagatgtctccgggacgccatgtgattccaagtccatcaacagatagaataaatgtaacatcaaatgctcgacgaagcttaaattttggaggttcaactggcacagtgccagctcctcgtctggctcccacaggtgtcagttgggctgacaaggtaaaggctcatcatacaggctctactgcttcttcagaaataacacccgcccagtcttgcccaccaatgacagtgcagaaggcctcacgcaaaaatgaacggaaagatgctgaaggatgggagaccgttcagagaggaaggcctattcgttctcgatcaacagcagtgatgccaaaagtttcattggcaacagaagccacaagatcaaaggatgacagtgataaagaaaatgtatgtcttttacctgatgaaagcatacagaaaggtcaatttgttggagatggaacttctaatactatagaatctcatcccaaagactcattacactcttgtgaccatcctcttgccgaaaaaacccagttcacagtgagtacattggatgatgtgaagaattctggcagtattcgagacaattatgttcgaacttctgaaatatctgctgtccacattgatacagagtgtgtttcagttatgctgcaagctggtacacctcctttacaagtaaatgaagaaaaatttccagcagagaaagcaaggatagaaaatgaaatggacccttcagatatttcaaattccatggcagaagtccttgctaaaaaagaagagctagcagatcgtctagaaaaggccaatgaagaagccattgctagtgctattgctgaagaagaacagttaactagagaaattgaagctgaagaaaacaatgatattaacattgaaactgacaacgacagtgatttttctgccagcatgggcagtgggagtgtttctttctgtggtatgtccatggactggaacgatgtccttgcagattatgaagctcgtgagtcttggcgccaaaatacatcctggggggacattgtagaagaagaacctgctagacctccagggcatggaattcacatgcatgaaaaactttcttcaccctctcgtaaaagaacaattgcagaatctaagaagaaacatgaagaaaaacaaatgaaagcacagcagctaagggaaaagttacgcgaagagaaaacattgaagcttcagaaattgttagaaaggggttgatttagtaagaagaaccttatcagatgccaccaccttgatattggacttccagtctccagaactattatacgataaataaagttctttttttaata

SEQ ID NO: 313467 - DNA, 427 bp, Homo sapiens
tttaagactaatatgtaaatactaggtggatctcaactcacatatcatatactggactgaatgtgtagtgtttaaaattcatataatgttatattgattacattgctttgattttgtgctttcagatctcttcagaggtatatctttttagccatgttaaagggagaaaacaccagcaagccgtgagagagaataccagcatccaggggcgtgaactgtcagatgaagaagtggtaaactttatttttgttcatttacaattgtttattgagtacccaatatgtgctgttttattataaagaattccgtgtttgtatttatttctatgattatttaaaactatatttagcacttaatagctactacaatatagtgtacaaatgtgtcattattttagtgtatatattaatttaacaagaaagataga

SEQ ID NO: 313468 - DNA, 4806 bp, Homo sapiens
ccgggaagccaccccgcctctccgaggcctccctgccccgccccgtcacgcccctttcccggcgggacgctttgagccgccccgaactaagcagggcggtcgggggagtcatactccatgggtttatgtgataaatgatcttggcatagaagagaatttaaagagtgatggcttcattccagcgctccaatagtcatgacaaagtaaggagaatagttgcagaggagggtcgtacagcaagaaacctaatagcttggagtgttccactagaaagcaaagatgatgatggaaaacctaaatgtcaaactggtggaaaatctaagaggaccattcaaggcactcataaaactactaaacagagtactgcagtggactgtaaaataacatcgtctacgactggagataaacactttgataaaagtcccactaaaacaaggcaccctcggaaaattgatctaagagctcgatactgggcatttctttttgataatcttcgccgagcagtagatgaaatctatgtaacttgcgaatcagatcagagtgtggtcgaatgtaaggaggtgctaatgatgctggataactatgtaagagatttcaaagcattgattgactggattcagcttcaggaaaagctagagaagacagatgctcaaagcagaccaacatcattggcatgggaagtaaagaagatgtctccgggacgccatgtgattccaagtccatcaacagatagaataaatgtaacatcaaatgctcgacgaagcttaaattttggaggttcaactggcacagtgccagctcctcgtctggctcccacaggtgtcagttgggctgacaaggtaaaggctcatcatacaggctctactgcttcttcagaaataacacccgcccagtcttgcccaccaatgacagtgcagaaggcctcacgcaaaaatgaacggaaagatgctgaaggatgggagaccgttcagagaggaaggcctattcgttctcgatcaacagcagtgatgccaaaagtttcattggcaacagaagccacaagatcaaaggatgacagtgataaagaaaatgtatgtcttttacctgatgaaagcatacagaaaggtcaatttgttggagatggaacttctaatactatagaatctcatcccaaagactcattacactcttgtgaccatcctcttgccgaaaaaacccagttcacagtgagtacattggatgatgtgaagaattctggcagtattcgagacaattatgttcgaacttctgaaatatctgctgtccacattgatacagagtgtgtttcagttatgctgcaagctggtacacctcctttacaagtaaatgaagaaaaatttccagcagagaaagcaaggatagaaaatgaaatggacccttcagatatttcaaattccatggcagaagtccttgctaaaaaagaagagctagcagatcgtctagaaaaggccaatgaagaagccattgctagtgctattgctgaagaagaacagttaactagagaaattgaagctgaagaaaacaatgatattaacattgaaactgacaacgacagtgatttttctgccagcatgggcagtgggagtgtttctttctgtggtatgtccatggactggaacgatgtccttgcagattatgaagctcgtgagtcttggcgccaaaatacatcctggggggacattgtagaagaagaacctgctagacctccagggcatggaattcacatgcatgaaaaactttcttcaccctctcgtaaaagaacaattgcagaatctaagaagaaacatgaagaaaaacaaatgaaagcacagcagctaagggaaaagttacgcgaagagaaaacattgaagcttcagaaattgttagaaagggagaaggatgtccggaagtggaaggaagaattgctagatcaacgacgcaggatgatggaagaaaaattacttcatgctgagtttaagcgagaagtgcagttacaagcaattgtgaaaaaagcacaagaagaagaagctaaggtaaatgaaattgcctttataaatacccttgaagcccagaataaacgtcatgatgttttatcaaaattgaaggaatatgaacagaggcttaatgagctacaggaagagcgtcagagaagacaggaagaaaagcaagcacgtgatgaagctgtgcaggaacgcaagagagctctagaggcagagcggcaggcccgtgtagaagaattgttaatgaagaggaaagaacaagaagcccgaattgaacaacagaggcaagaaaaggaaaaagcccgtgaggatgcagcccgggaaagagctagagacagggaagaacgattggcagcactcacagctgctcaacaagaagctatggaagagttacagaaaaaaattcagctcaagcatgatgaaagtattcgaaggcacatggaacagattgaacaaagaaaagaaaaagctgctgagctaagcagtgggcgacatgcaaatactgattatgcccccaaactgaccccttatgaaagaaagaagcagtgttctctctgcaatgtcctgatctcttcagaggtatatctttttagccatgttaaagggagaaaacaccagcaagccgtgagagagaataccagcatccaggggcgtgaactgtcagatgaagaagtggagcatctttccttgaagaagtacattattgacattgtggttgaaagtacagctccagcagaagctttgaaagatggagaagagcggcaaaaaaataaaaaaaaagccaaaaagataaaagcccggatgaacttcagggctaaggaatatgagagtttaatggaaaccaaaaattctggctctgattcaccttataaagcaaagcttcagcgattagccaaagatcttctaaaacaagtacaagttcaagacagtggctcatgggcaaacaataaagtgtctgctttggatcggaccctaggagagatcactagaatactggaaaaagagaatgtggcagatcagattgcatttcaagctgctggtggattaacagcccttgaacacatccttcaagcagtagtcccagccacaaatgtgaacacagttttaagaattcctcctaagtctctctgcaatgcaatcaatgtttacaacctcacctgcaataactgttcagaaaactgcagtgatgttctgtttagtaacaagattaccttcttaatggacctcctgatacaccagttgacggtttatgttccagatgaaaataatactattttggggagaaatacaaataaacaagtttttgaaggcttgacaactggacttctcaaagtcagtgctgtggttttgggctgcctgattgccaatcgaccagatggaaactgccagccagctaccccaaaaataccaacacaggaaatgaaaaacaaaccctcacaaggtgatccttttaacaatcgagttcaggaccttatcagctacgtggtgaacatgggtctgattgacaaactgtgtgcctgcttcctctcggtgcaaggcccagtggatgagaatcccaagatggccatatttctgcagcatgccgcaggactcttacatgcaatgtgtacactgtgctttgctgtcactggaaggtcatacagcatatttgacaataatcgccaggatcccacagggctgacagctgctcttcaggcaaccgacctggctggagttcttcatatgctctactgtgtcctcttccatggcaccatcttggaccccagcactgccagtcccaaggagaattacactcaaaataccatccaagtggccattcagagtttacgtttcttcaacagctttgcagctcttcatctgcctgcttttcagtctattgtaggggcagagggcttgtcccttgcattccggcacatggccagctccctgctgggccactgcagccaagtctcctgtgaaagcctccttcatgaggtcatcgtctgtgtgggctacttcactgtcaaccacccagataaccaggtgatcgtgcagtccggccgccaccccacagtgctgcagaagctctgccagttgcccttccagtatttcagtgacccacggctgatcaaagtactgttcccttcacttatcgctgcttgttacaacaaccatcagaacaagatcattctggagcaagagatgagctgtgttttactggccactttcattcaggatttggcacagactccaggtcaagcggaaaaccagccttaccaacccaaagggaaatgccttggttcccaagactatcttgagctggctaacagatttcctcagcaggcctgggaagaagctcgacagtttttcttgaaaaaagagaaaaaataaatgttttggttgattctgtatttgagtacccttgttaatattttaaattgtccaaacaaacattctaattgttccttaagaactcattttcccatgtttatactcttcccacactgtagatatggcatgtactttacactatttataatgactgtagatacttgaatgttctacttgctaattttgcaagttgagtttatttcatttatgcagagtatcttggagtttggtaatttccatcttatgataatatatactttgcatttgtgatatgggtgaaaggagacataaaattagcaagtctgttttgttcttgtaataaagtaacttattctgttttcattgttgacttttcatgttaaggaaatacgaatctgaaagaaaaatgttaactccagctcttgaagtatcttaaataaagacttaattaaagtttacc

SEQ ID NO: 313469 - DNA, 4656 bp, Homo sapiens
ccgggaagccaccccgcctctccgaggcctccctgccccgccccgtcacgcccctttcccggcgggacgctttgagccgccccgaactaagcagggcggtcgggggagtcatactccatgggtttatgtgataaatgatcttggcatagaagagaatttaaagagtgatggcttcattccagcgctccaatagtcatgacaaagtaaggagaatagttgcagaggagggtcgtacagcaagaaacctaatagcttggagtgttccactagaaagcaaagatgatgatggaaaacctaaatgtcaaactggtggaaaatctaagaggaccattcaaggcactcataaaactactaaacagagtactgcagtggactgtaaaataacatcgtctacgactggagataaacactttgataaaagtcccactaaaacaaggcaccctcggaaaattgatctaagagctcgatactgggcatttctttttgataatcttcgccgagcagtagatgaaatctatgtaacttgcgaatcagatcagagtgtggtcgaatgtaaggaggtgctaatgatgctggataactatgtaagagatttcaaagcattgattgactggattcagcttcaggaaaagctagagaagacagatgctcaaagcagaccaacatcattggcatgggaagtaaagaagatgtctccgggacgccatgtgattccaagtccatcaacagatagaataaatgtaacatcaaatgctcgacgaagcttaaattttggaggttcaactggcacagtgccagctcctcgtctggctcccacaggtgtcagttgggctgacaaggtaaaggctcatcatacaggctctactgcttcttcagaaataacacccgcccagtcttgcccaccaatgacagtgcagaaggcctcacgcaaaaatgaacggaaagatgctgaaggatgggagaccgttcagagaggaaggcctattcgttctcgatcaacagcagtgatgccaaaagtttcattggcaacagaagccacaagatcaaaggatgacagtgataaagaaaatgtatgtcttttacctgatgaaagcatacagaaaggtcaatttgttggagatggaacttctaatactatagaatctcatcccaaagactcattacactcttgtgaccatcctcttgccgaaaaaacccagttcacagtgagtacattggatgatgtgaagaattctggcagtattcgagacaattatgttcgaacttctgaaatatctgctgtccacattgatacagagtgtgtttcagttatgctgcaagctggtacacctcctttacaagtaaatgaagaaaaatttccagcagagaaagcaaggatagaaaatgaaatggacccttcagatatttcaaattccatggcagaagtccttgctaaaaaagaagagctagcagatcgtctagaaaaggccaatgaagaagccattgctagtgctattgctgaagaagaacagttaactagagaaattgaagctgaagaaaacaatgatattaacattgaaactgacaacgacagtgatttttctgccagcatgggcagtgggagtgtttctttctgtggtatgtccatggactggaacgatgtccttgcagattatgaagctcgtgagtcttggcgccaaaatacatcctggggggacattgtagaagaagaacctgctagacctccagggcatggaattcacatgcatgaaaaactttcttcaccctctcgtaaaagaacaattgcagaatctaagaagaaacatgaagaaaaacaaatgaaagcacagcagctaagggaaaagttacgcgaagagaaaacattgaagcttcagaaattgttagaaagggagaaggatgtccggaagtggaaggaagaattgctagatcaacgacgcaggatgatggaagaaaaattacttcatgctgagtttaagcgagaagtgcagttacaagcaattgtgaaaaaagcacaagaagaagaagctaaggtaaatgaaattgcctttataaatacccttgaagcccagaataaacgtcatgatgttttatcaaaattgaaggaatatgaacagaggcttaatgagctacaggaagagcgtcagagaagacaggaagaaaagcaagcacgtgatgaagctgtgcaggaacgcaagagagctctagaggcagagcggcaggcccgtgtagaagaattgttaatgaagaggaaagaacaagaagcccgaattgaacaacagaggcaagaaaaggaaaaagcccgtgaggatgcagcccgggaaagagctagagacagggaagaacgattggcagcactcacagctgctcaacaagaagctatggaagagttacagaaaaaaattcagctcaagcatgatgaaagtattcgaaggcacatggaacagattgaacaaagaaaagaaaaagctgctgagctaagcagtgggcgacatgcaaatactgattatgcccccaaactgaccccttatgaaagaaagaagcagtgttctctctgcaatgtcctgatctcttcagaggtatatctttttagccatgttaaagggagaaaacaccagcaagccgtgagagagaataccagcatccaggggcgtgaactgtcagatgaagaagtggagcatctttccttgaagaagtacattattgacattgtggttgaaagtacagctccagcagaagctttgaaagatggagaagagcggcaaaaaaataaaaaaaaagccaaaaagataaaagcccggatgaacttcagggctaaggaatatgagagtttaatggaaaccaaaaattctggctctgattcaccttataaagcaaagcttcagcgattagccaaagatcttctaaaacaagtacaagttcaagacagtggctcatgggcaaacaataaagtgtctgctttggatcggaccctaggagagatcactagaatactggaaaaagagaatgtggcagatcagattgcatttcaagctgctggtggattaacagcccttgaacacatccttcaagcagtagtcccagccacaaatgtgaacacagttttaagaattcctcctaagtctctctgcaatgcaatcaatgtttacaacctcacctgcaataactgttcagaaaactgcagtgatgttctgtttagtaacaagattaccttcttaatggacctcctgatacaccagttgacggtttatgttccagatgaaaataatactattttggggagaaatacaaataaacaagtttttgaaggcttgacaactggacttctcaaagtcagtgctgtggttttgggctgcctgattgccaatcgaccagatggaaactgccagccagctaccccaaaaataccaacacaggaaatgaaaaacaaaccctcacaaggtgatccttttaacaatcgagttcaggaccttatcagctacgtggtgaacatgggtctgattgacaaactgtgtgcctgcttcctctcggtgcaaggcccagtggatgagaatcccaagatggccatatttctgcagcatgccgcaggactcttacatgcaatgtgtacactgtgctttgctgtcactggaaggtcatacagcatatttgacaataatcgccaggatcccacagggctgacagctgctcttcaggcaaccgacctggctggagttcttcatatgctctactgtgtcctcttccatggcaccatcttggaccccagcactgccagtcccaaggagaattacactcaaaataccatccaagtggccattcagagtttacgtttcttcaacagctttgcagctcttcatctgcctgcttttcaggtgatcgtgcagtccggccgccaccccacagtgctgcagaagctctgccagttgcccttccagtatttcagtgacccacggctgatcaaagtactgttcccttcacttatcgctgcttgttacaacaaccatcagaacaagatcattctggagcaagagatgagctgtgttttactggccactttcattcaggatttggcacagactccaggtcaagcggaaaaccagccttaccaacccaaagggaaatgccttggttcccaagactatcttgagctggctaacagatttcctcagcaggcctgggaagaagctcgacagtttttcttgaaaaaagagaaaaaataaatgttttggttgattctgtatttgagtacccttgttaatattttaaattgtccaaacaaacattctaattgttccttaagaactcattttcccatgtttatactcttcccacactgtagatatggcatgtactttacactatttataatgactgtagatacttgaatgttctacttgctaattttgcaagttgagtttatttcatttatgcagagtatcttggagtttggtaatttccatcttatgataatatatactttgcatttgtgatatgggtgaaaggagacataaaattagcaagtctgttttgttcttgtaataaagtaacttattctgttttcattgttgacttttcatgttaaggaaatacgaatctgaaagaaaaatgttaactccagctcttgaagtatcttaaataaagacttaattaaagtttacc

SEQ ID NO: 313470 - DNA, 2140 bp, Homo sapiens
gcttgaatccgggaggcagaggttgcattgagccgagatcgtgccatcgcactctagcctgggcaacagagtgagactccatctcaaaataaacaaaaaaataaaaaaaaagccaaaaagataaaagcccggatgaacttcagggctaaggaatatgagagtttaatggaaaccaaaaattctggctctgattcaccttataaagcaaagcttcagcgattagccaaagatcttctaaaacaagtacaagttcaagacagtggctcatgggcaaacaataaagtgtctgctttggatcggaccctaggagagatcactagaatactggaaaaagagaatgtggcagatcagattgcatttcaagctgctggtggattaacagcccttgaacacatccttcaagcagtagtcccagccacaaatgtgaacacagttttaagaattcctcctaagtctctctgcaatgcaatcaatgtttacaacctcacctgcaataactgttcagaaaactgcagtgatgttctgtttagtaacaagattaccttcttaatggacctcctgatacaccagttgacggtttatgttccagatgaaaataatactattttggggagaaatacaaataaacaagtttttgaaggcttgacaactggacttctcaaagtcagtgctgtggttttgggctgcctgattgccaatcgaccagatggaaactgccagccagctaccccaaaaataccaacacaggaaatgaaaaacaaaccctcacaaggtgatccttttaacaatcgagttcaggaccttatcagctacgtggtgaacatgggtctgattgacaaactgtgtgcctgcttcctctcggtgcaaggcccagtggatgagaatcccaagatggccatatttctgcagcatgccgcaggactcttacatgcaatgtgtacactgtgctttgctgtcactggaaggtcatacagcatatttgacaataatcgccaggatcccacagggctgacagctgctcttcaggcaaccgacctggctggagttcttcatatgctctactgtgtcctcttccatggcaccatcttggaccccagcactgccagtcccaaggagaattacactcaaaataccatccaagtggccattcagagtttacgtttcttcaacagctttgcagctcttcatctgcctgcttttcagtctattgtaggggcagagggcttgtcccttgcattccggcacatggccagctccctgctgggccactgcagccaagtctcctgtgaaagcctccttcatgaggtcatcgtctgtgtgggctacttcactgtcaaccacccagataaccaggtgatcgtgcagtccggccgccaccccacagtgctgcagaagctctgccagttgcccttccagtatttcagtgacccacggctgatcaaagtactgttcccttcacttatcgctgcttgttacaacaaccatcagaacaagatcattctggagcaagagatgagctgtgttttactggccactttcattcaggatttggcacagactccaggtcaagcggaaaaccagccttaccaacccaaagggaaatgccttggttcccaagactatcttgagctggctaacagatttcctcagcaggcctgggaagaagctcgacagtttttcttgaaaaaagagaaaaaataaatgttttggttgattctgtatttgagtacccttgttaatattttaaattgtccaaacaaacattctaattgttccttaagaactcattttcccatgtttatactcttcccacactgtagatatggcatgtactttacactatttataatgactgtagatacttgaatgttctacttgctaattttgcaagttgagtttatttcatttatgcagagtatcttggagtttggtaatttccatcttatgataatatatactttgcatttgtgatatgggtgaaaggagacataaaattagcaagtctgttttgttcttgtaataaagtaacttattctgttttcattgttgacttttcatgttaaggaaatacgaatctgaaagaaaaatgttaactccagctcttgaagtatcttaaataaagacttaattaaagtttacc

SEQ ID NO: 313471 - DNA, 4754 bp, Homo sapiens
ccgggaagccaccccgcctctccgaggcctccctgccccgccccgtcacgcccctttcccggcgggacgctttgagccgccccgaactaagcagggcggtcgggggagtcatactccatgggtttatgtgataaatgatcttggcatagaagagaatttaaagagtgatggcttcattccagcgctccaatagtcatgacaaagtaaggagaatagttgcagaggagggtcgtacagcaagaaacctaatagcttggagtgttccactagaaagcaaagatgatgatggaaaacctaaatgtcaaactggtggaaaatctaagaggaccattcaaggcactcataaaactactaaacagagtactgcagtggactgtaaaataacatcgtctacgactggagataaacactttgataaaagtcccactaaaacaaggcaccctcggaaaattgatctaagagctcgatactgggcatttctttttgataatcttcgccgagcagtagatgaaatctatgtaacttgcgaatcagatcagagtgtggtcgaatgtaaggaggtgctaatgatgctggataactatgtaagagatttcaaagcattgattgactggattcagcttcaggaaaagctagagaagacagatgctcaaagcagaccaacatcattggcatgggaagtaaagaagatgtctccgggacgccatgtgattccaagtccatcaacagatagaataaatgtaacatcaaatgctcgacgaagcttaaattttggaggttcaactggcacagtgccagctcctcgtctggctcccacaggtgtcagttgggctgacaaggtaaaggctcatcatacaggctctactgcttcttcagaaataacacccgcccagtcttgcccaccaatgacagtgcagaaggcctcacgcaaaaatgaacggaaagatgctgaaggatgggagaccgttcagagaggaaggcctattcgttctcgatcaacagcagtgatgccaaaagtttcattggcaacagaagccacaagatcaaaggatgacagtgataaagaaaatgtatgtcttttacctgatgaaagcatacagaaaggtcaatttgttggagatggaacttctaatactatagaatctcatcccaaagactcattacactcttgtgaccatcctcttgccgaaaaaacccagttcacagtgagtacattggatgatgtgaagaattctggcagtattcgagacaattatgttcgaacttctgaaatatctgctgtccacattgatacagagtgtgtttcagttatgctgcaagctggtacacctcctttacaagtaaatgaagaaaaatttccagcagagaaagcaaggatagaaaatgaaatggacccttcagatatttcaaattccatggcagaagtccttgctaaaaaagaagagctagcagatcgtctagaaaaggccaatgaagaagccattgctagtgctattgctgaagaagaacagttaactagagaaattgaagctgaagaaaacaatgatattaacattgaaactgacaacgacagtgatttttctgccagcatgggcagtgggagtgtttctttctgtggtatgtccatggactggaacgatgtccttgcagattatgaagctcgtgagtcttggcgccaaaatacatcctggggggacattgtagaagaagaacctgctagacctccagggcatggaattcacatgcatgaaaaactttcttcaccctctcgtaaaagaacaattgcagaatctaagaagaaacatgaagaaaaacaaatgaaagcacagcagctaagggaaaagttacgcgaagagaaaacattgaagcttcagaaattgttagaaagggagaaggatgtccggaagtggaaggaagaattgctagatcaacgacgcaggatgatggaagaaaaattacttcatgctgagtttaagcgagaagtgcagttacaagcaattgtgaaaaaagcacaagaagaagaagctaaggtaaatgaaattgcctttataaatacccttgaagcccagaataaacgtcatgatgttttatcaaaattgaaggaatatgaacagaggcttaatgagctacaggaagagcgtcagagaagacaggaagaaaagcaagcacgtgatgaagctgtgcaggaacgcaagagagctctagaggcagagcggcaggcccgtgtagaagaattgttaatgaagaggaaagaacaagaagcccgaattgaacaacagaggcaagaaaaggaaaaagcccgtgaggatgcagcccgggaaagagctagagacagggaagaacgattggcagcactcacagctgctcaacaagaagctatggaagagttacagaaaaaaattcagctcaagcatgatgaaagtattcgaaggcacatggaacagattgaacaaagaaaagaaaaagctgctgagctaagcagtgggcgacatgcaaatactgattatgcccccaaactgaccccttatgaaagaaagaagcagtgttctctctgcaatgtcctgatctcttcagaggtatatctttttagccatgttaaagggagaaaacaccagcaagccgtgagagagaataccagcatccaggggcgtgaactgtcagatgaagaagtggagcatctttccttgaagaagtacattattgacattgtggttgaaagtacagctccagcagaagctttgaaagatggagaagagcggcaaaaaaataaaaaaaaagccaaaaagataaaagcccggatgaacttcagggctaaggaatatgagagtttaatggaaaccaaaaattctggctctgattcaccttataaagcaaagcttcagcgattagccaaagatcttctaaaacaagtacaagttcaagacagtggctcatgggcaaacaataaagtgtctgctttggatcggaccctaggagagatcactagaatactggaaaaagagaatgtggcagatcagattgcatttcaagctgctggtggattaacagcccttgaacacatccttcaagcagtagtcccagccacaaatgtgaacacagttttaagaattcctcctaagtctctctgcaatgcaatcaatgtttacaacctcacctgcaataactgttcagaaaactgcagtgatgttctgtttagtaacaagattaccttcttaatggacctcctgatacaccagttgacggtttatgttccagatgaaaataatactattttggggagaaatacaaataaacaagtttttgaaggcttgacaactggacttctcaaagtcagtgctgtggttttgggctgcctgattgccaatcgaccagatggaaactgccagccagctaccccaaaaataccaacacaggaaatgaaaaacaaaccctcacaaggtgatccttttaacaatcgagttcaggaccttatcagctacgtggtgaacatgggtctgattgacaaactgtgtgcctgcttcctctcggtgcaaggcccagtggatgagaatcccaagatggccatatttctgcagcatgccgcaggactcttacatgcaatgtgtacactgtgctttgctgtcactggaaggtcatacagcatatttgacaataatcgccaggatcccacagggctgacagctgctcttcaggcaaccgacctggctggagttcttcatatgctctactgtgtcctcttccatggcaccatcttggaccccagcactgccagtcccaaggagaattacactcaaaataccatccaagtggccattcagagtttacgtttcttcaacagctttgcagctcttcatctgcctgcttttcagtctattgtaggggcagagggcttgtcccttgcattccggcacatggccagctccctgctgggccactgcagccaagtctcctgtgaaagcctccttcatgaggtcatcgtctgtgtgggctacttcactgtcaaccacccagataaccaggtgatcgtgcagtccggccgccaccccacagtgctgcagaagctctgccagttgcccttccagtatttcagtgacccacggctgatcaaagtactgttcccttcacttatcgctgcttgttacaacaaccatcagaacaagatcattctggagcaagagatgagctgtgttttactggccactttcattcaggatttggcacagactccaggtcaagcggaaaaccagccttaccaacccaaagggaaatgccttggttcccaagactatcttgagctggctaacagatttcctcagcaggcctgggaagaagctcgacagtttttcttgaaaaaagagaaaaaataaatgttttggttgattctgtatttgagtacccttgttaatattttaaattgtccaaacaaacattctaattgttccttaagaactcattttcccatgtttatactcttcccacactgtagatatggcatgtactttacactatttataatgactgtagatacttgaatgttctacttgctaattttgcaagttgagtttatttcatttatgcagagtatcttggagtttggtaatttccatcttatgataatatatactttgcatttgtgatatgggtgaaaggagacataaaattagcaagtctgttttgttcttgtaataaagtaacttattctgttttctttcagattcgtatttccttaacatgaaaagtcaacaatgaaaaca

SEQ ID NO: 313472 - DNA, 3346 bp, Homo sapiens
ccgggaagccaccccgcctctccgaggcctccctgccccgccccgtcacgcccctttcccggcgggacgctttgagccgccccgaactaagcagggcggtcgggggagtcatactccatgggtttatgtgataaatgatcttggcatagaagagaatttaaagagtgatggcttcattccagcgctccaatagtcatgacaaagtaaggagaatagttgcagaggagggtcgtacagcaagaaacctaatagcttggagtgttccactagaaagcaaagatgatgatggaaaacctaaatgtcaaactggtggaaaatctaagaggaccattcaaggcactcataaaactactaaacagagtactgcagtggactgtaaaataacatcgtctacgactggagataaacactttgataaaagtcccactaaaacaaggcaccctcggaaaattgatctaagagctcgatactgggcatttctttttgataatcttcgccgagcagtagatgaaatctatgtaacttgcgaatcagatcagagtgtggtcgaatgtaaggaggtgctaatgatgctggataactatgtaagagatttcaaagcattgattgactggattcagcttcaggaaaagctagagaagacagatgctcaaagcagaccaacatcattggcatgggaagtaaagaagatgtctccgggacgccatgtgattccaagtccatcaacagatagaataaatgtaacatcaaatgctcgacgaagcttaaattttggaggttcaactggcacagtgccagctcctcgtctggctcccacaggtgtcagttgggctgacaaggtaaaggctcatcatacaggctctactgcttcttcagaaataacacccgcccagtcttgcccaccaatgacagtgcagaaggcctcacgcaaaaatgaacggaaagatgctgaaggatgggagaccgttcagagaggaaggcctattcgttctcgatcaacagcagtgatgccaaaagtttcattggcaacagaagccacaagatcaaaggatgacagtgataaagaaaatgtatgtcttttacctgatgaaagcatacagaaaggtcaatttgttggagatggaacttctaatactatagaatctcatcccaaagactcattacactcttgtgaccatcctcttgccgaaaaaacccagttcacagtgagtacattggatgatgtgaagaattctggcagtattcgagacaattatgttcgaacttctgaaatatctgctgtccacattgatacagagtgtgtttcagttatgctgcaagctggtacacctcctttacaagtaaatgaagaaaaatttccagcagagaaagcaaggatagaaaatgaaatggacccttcagatatttcaaattccatggcagaagtccttgctaaaaaagaagagctagcagatcgtctagaaaaggccaatgaagaagccattgctagtgctattgctgaagaagaacagttaactagagaaattgaagctgaagaaaacaatgatattaacattgaaactgacaacgacagtgatttttctgccagcatgggcagtgggagtgtttctttctgtggtatgtccatggactggaacgatgtccttgcagattatgaagctcgtgagtcttggcgccaaaatacatcctggggggacattgtagaagaagaacctgctagacctccagggcatggaattcacatgcatgaaaaactttcttcaccctctcgtaaaagaacaattgcagaatctaagaagaaacatgaagaaaaacaaatgaaagcacagcagctaagggaaaagttacgcgaagagaaaacattgaagcttcagaaattgttagaaagggagaaggatgtccggaagtggaaggaagaattgctagatcaacgacgcaggatgatggaagaaaaattacttcatgctgagtttaagcgagaagtgcagttacaagcaattgtgaaaaaagcacaagaagaagaagctaaggtaaatgaaattgcctttataaatacccttgaagcccagaataaacgtcatgatgttttatcaaaattgaaggaatatgaacagaggcttaatgagctacaggaagagcgtcagagaagacaggaagaaaagcaagcacgtgatgaagctgtgcaggaacgcaagagagctctagaggcagagcggcaggcccgtgtagaagaattgttaatgaagaggaaagaacaagaagcccgaattgaacaacagaggcaagaaaaggaaaaagcccgtgaggatgcagcccgggaaagagctagagacagggaagaacgattggcagcactcacagctgctcaacaagaagctatggaagagttacagaaaaaaattcagctcaagcatgatgaaagtattcgaaggcacatggaacagattgaacaaagaaaagaaaaagctgctgagctaagcagtgggcgacatgcaaatactgattatgcccccaaactgaccccttatgaaagaaagaagcagtgttctctctgcaatgtcctgatctcttcagaggtatatctttttagccatgttaaagggagaaaacaccagcaagccgtgagagagaataccagcatccaggggcgtgaactgtcagatgaagaagtggagcatctttccttgaagaagtacattattgacattgtggttgaaagtacagctccagcagaagctttgaaagatggagaagagcggcaaaaaaataaaaaaaaagccaaaaagataaaagcccggatgaacttcagggctaaggaatatgagagtttaatggaaaccaaaaattctggctctgattcaccttataaagcaaagcttcagcgattagccaaagatcttctaaaacaagtacaagttcaagacagtggctcatgggcaaacaataaagtgtctgctttggatcggaccctaggagagatcactagaatactggaaaaagagaatgtggcagatcagattgcatttcaagctgctggtggattaacagcccttgaacacatccttcaagcagtagtcccagccacaaatgtgaacacagttttaagaattcctcctaagtctctctgcaatgcaatcaatgtttacaacctcacctgcaataactgttcagaaaactgcagtgatgttctgtttagtaacaagattaccttcttaatggacctcctgatacaccagttgacggtatgtaatattattgctttgagttagaagcagttaaggtttgagaaatagtccctgtggagaaaactaaaagaattcaacttagttactctccagatgaaaaa

SEQ ID NO: 313473 - DNA, 1210 bp, Homo sapiens
agctaagggaagactgcagtgggcagggccttactttcttgtgagtgaactctttgcaggttttaaggaatatgactactctgctttaagggggtgtggggagcactttgttaaagcaatgtgcattctgaatccatttcataggcgtccttactccgtggcagctacacctttaatcgtggattataataacttttaaatgagtgcaaaactttcaggatcttttccttaagttgggaaatgagattttttttttctgctcttttcaagtatcacttaaattaagctctggtacggagtcaggagtctttttctttacactccttcagcatgttttccatggtactagccgacactgtgcaggtgggtgagggacaggctggggcgtttcggcagctgacctgggctgctcttccatttcaggtgatcgtgcagtccggccgccaccccacagtgctgcagaagctctgccagttgcccttccagtatttcagtgacccacggctgatcaaagtactgttcccttcacttatcgctgcttgttacaacaaccatcagaacaagatcattctggagcaagagatgagctgtgttttactggccactttcattcaggatttggcacagactccaggtcaagcggaaaaccagccttaccaacccaaagggaaatgccttggttcccaagactatcttgagctggctaacagatttcctcagcaggcctgggaagaagctcgacagtttttcttgaaaaaagagaaaaaataaatgttttggttgattctgtatttgagtacccttgttaatattttaaattgtccaaacaaacattctaattgttccttaagaactcattttcccatgtttatactcttcccacactgtagatatggcatgtactttacactatttataatgactgtagatacttgaatgttctacttgctaattttgcaagttgagtttatttcatttatgcagagtatcttggagtttggtaatttccatcttatgataatatatactttgcatttgtgatatgggtgaaaggagacataaaattagcaagtctgttttgttcttgtaataaagtaacttattctgttttcattgttgacttttcatgttaaggaaatacgaatctgaaagaaaaatgttaactccagctcttgaagtatcttaaataaagacttaattaaagtttacc

SEQ ID NO: 313474 - DNA, 1924 bp, Homo sapiens
ggcacgaggctggagtttgcggagggccgagccgggtgcgcacggggaggcggaggcagcggcggcggcggcggcggcggcggcggcggagcagatgaagaaactgaggccctgtgatgtgaagtgacttgccccccagccacacagctggaccattctggctgctgtctggacaagaagtcgtagggggtgagggtggaagctgggaaacccacaggaggcaaccacactagtttagatcttctggtgaccccacttctcgctgctcatgccgctgggactggggcggcggaaaaaggcgccccctctagtggaaaatgaggaggctgagccaggccgtggagggctgggcgtgggggagccagggcctctgggcggaggtgggtcggggggcccccaaatgggcttgcccccccctcccccagccctgcggccccgcctcgtgttccacacccagctggcccatggcagtcccactggccgcatcgagggcttcaccaacgtcaaggagctgtatggcaagatcgccgaggccttccgcctgccaactgccgaggtgatgttctgcaccctgaacacccacaaagtggacatggacaagctcctggggggccagatcgggctggaggacttcatcttcgcccacgtgaaggggcagcgcaaggaggtggaggtgttcaagtcggaggatgcactcgggctcaccatcacggacaacggggctggctacgccttcatcaagcgcatcaaggagggcagcgtgatcgaccacatccacctcatcagcgtgggcgacatgatcgaggccattaacgggcagagcctgctgggctgccggcactacgaggtggcccggctgctcaaggagctgccccgaggccgtaccttcacgctgaagctcacggagcctcgcaaggccttcgacatgatcagccagcgttcagcgggtggccgccctggctctggcccacaactgggcactggccgagggaccctgcggctccgatcccggggccccgccacggtggaggatctgccctctgcctttgaagagaaggccattgagaaggtggatgacctgctggagagttacatgggtatcagggacacggagctggcggccaccatggtggagctgggaaaggacaaaaggaacccggatgagctggccgaggccctggacgaacggctgggtgactttgccttccctgacgagttcgtctttgacgtctggggcgccattggggacgccaaggtcggccgctactaggactgcccccggaccctgcgatgatgacccgggcgcaacctggtgggggcccccagcagggacactgacgtcaggacccgagcctccagcctgagcctagctcagcagcccaaggacgatggtgaggggaggtggggccaggccccctgccccgctccaatcggtaccatcccctccctggttcccagtctggccggggtccccggcccccctgtgccctgttccccacctacctcagctgggtcaggcacagggaggggagggatcagccaaattgggcggccacccccgcctccaccactttccaccatcagctgccaaactggtccctctgtctccctggggccttgggttctgtttgggggtcatgaccttcctagtttcctgacgcagggaatacaggggagagggttgtccttccccccagcaaatgcaataatgccctcacccctcctgagaggagccccctccctgtggagcctgttacctccgcatttgacacgagtctgctgtgaaccccgcaacctcctccccacctcccatctctccttccaggcccatccctggcccagagcaggagggagggagggacgatggcggtgggtttttgtatctgaatttgctgtcttgaacataaagaatctatctgctgtt

SEQ ID NO: 313475 - DNA, 485 bp, Homo sapiens
agtggctgaattcagcaaagatttgctttttcttcctgctacacttccattgcggctcagcagggggcaccattcaccgtagtcattcagggcccggcctcatagagtcgccaccatatcaaatgtggctcatcaccctgcctgggaaagatagatgtccctctgtctccctggggccttgggttctgtttgggggtcatgaccttcctagtttcctgacgcagggaatacaggggagagggttgtccttccccccagcaaatgcaataatgccctcacccctcctgagaggagccccctccctgtggagcctgttacctccgcatttgacacgagtctgctgtgaaccccgcaacctcctccccacctcccatctctccttccaggcccatccctggcccagagcaggagggagggagggacgatggcggtgggtttttgtatctgaatttgctgtcttgaacataaagaatctatctgctgtt

SEQ ID NO: 313476 - DNA, 596 bp, Homo sapiens
ggcacgaggctggagtttgcggagggccgagccgggtgcgcacggggaggcggaggcagcggcggcggcggcggcggcggcggcggcggagcagatgaagaaactgaggccctgtgatgtgaagtgacttgccccccagccacacagctggaccattctggctgctgtctggacaagaagtcgtagggggtgagggtggaagctgggaaacccacaggaggcaaccacactagtttagatcttctggtgaccccacttctcgctgctcatgccgctgggactggggcggcggaaaaaggcgccccctctagtggaaaatgaggaggctgagccaggccgtggagggctgggcgtgggggagccagggcctctgggcggaggtgggtcggggggccgcgggaatgggcatgccaggggctcgggagcatattgggacccggcacggcacggcgcccgccggcggcggagaccaggcggccatcggcaacatgactgggtggtcccccgggacaggcaccagcggaaacaccagggtcgcgtaggacgcaactggcaccacgggctcgcgcaacgcgggacgatgtactaccgggcgg

SEQ ID NO: 313477 - DNA, 889 bp, Homo sapiens
tacatcatagtaaaacaggccctatggagagaggacatgggtttctctgctgaacagccattatttatactcattccaaggcttctaacatgatgatactatttcctcgtatttccaccattccaatatttttctgttgtccactagtcgccatctccacacattcatctatcacaaggttcataaaggaatcaaatccccgcaatattccttggacatgtctgccaccatttaatttcaatgaaaacttcttgtccgtaaattttttcaactcaggagggtgagctttgctcatggtgtatactccatgggctcacagatgccttggaacagaacgcacggcttccctcacgctaccgcggtaggcccagcatcttgtgcctggcgtcatcgacctcgttagccaatcgattgttcgagcatgagtttcaatggggcaaaccttatccaaaccatagcaggctgggtgtggtagctcatgcctgtaatcccagcactttggaaggccaaggcgggaggattgcttgagcccaggagttcaggaccaatctgggcaacgtggtgagacccgtctctacaaaaaataaaaattggctgggcatggctgtgaacacctgtagtctcagctattcaggaggttgagacaggaggattgcttgagcccaggaatttgaggctgtagtgagctgtgatcacatcactccactgcagcctggacgacagagtgagaccccattaaaaaaaaaaaatcaggaaaacatagcaacctgttacctccctgccctcatgttctcactatccccccttcactcactgttccaaccccccaggcctcctcactgttcctcaaacatgccaattgcatgcccagttcagggcttggcttttc

SEQ ID NO: 313478 - DNA, 591 bp, Homo sapiens
cagtacggatgtgggactcaatgtagcaggaagtttgcaccagagccaagaagagagcttgcagctgccagggaatggcctggcggaggaagcgcagcccgggccagtacggatgtggaggtgttcaagtcggaggatgcactcgggctcaccatcacggacaacggggctggctacgccttcatcaagcgcatcaaggagggcagcgtgatcgaccacatccacctcatcagcgtgggcgacatgatcgaggccattaacgggcagagcctgctgggctgccggcactacgaggtggcccggctgctcaaggagctgccccgaggccgtaccttcacgctgaagccggacgctgtgtgcgcacatgggctgtgctgtgaagactgccagctgaagcctgcaggaacagcgtgcagggactccagcaactcctgtgacctcccagagttctgcacaggggtcagccctcactggccagccaacgtgtacctgcacgatgggcactcatgtcaggatgttggacggatactgctacaatggcatctgccagactcacgagcagcagtagcggtccacatccgtagtgtgccg

SEQ ID NO: 313479 - DNA, 496 bp, Homo sapiens
tacatcatagtaaaacaggccctatggagagaggacatgggtttctctgctgaacagccattatttatactcattccaaggcttctaacatgatgatactatttcctcgtatttccaccattccaatatttttctgttgtccactagtcgccatctccacacattcatctatcacaaggttcataaaggaatcaaatccccgcaatattccttggacatgtctgccaccatttaatttcaatgaaaacttcttgtccgtaaattttttcaactcaggagggtgagctttgctcatggtgtatactccatgggctcacagatgccttggaacagaacgcaaaaattcctgccccgcgggacttctgccatcagcgaggctttatgttttgtcggcctccgctttccagcggggcaggaatttttgcgttttgttcattgtggtatcctagaaattcgaacagtgtctgtcttgggggatcctcagatcaaccagcac

SEQ ID NO: 313480 - DNA, 1887 bp, Homo sapiens
gggcggaggcagcggcggcgtgctgtgcgtgtgtgtgtgtggctggcggcggagcagatgaagaaactgaggccctgtgatgtgaagtgacttgccccccagccacacagctggaccattctggctgctgtctggacaagaagtcgtagggggtgagggtggaagctgggaaacccacaggaggcaaccacactagtttagatcttctggtgaccccacttctcgctgctcatgccgctgggactggggcggcggaaaaaggcgccccctctagtggaaaatgaggaggctgagccaggccgtggagggctgggcgtgggggagccagggcctctgggcggaggtgggtcggggggcccccaaatgggcttgcccccccctcccccagccctgcggccccgcctcgtgttccacacccagctggcccatggcagtcccactggccgcatcgagggcttcaccaacgtcaaggagctgtatggcaagatcgccgaggccttccgcctgccaactgccgaggtgatgttctgcaccctgaacacccacaaagtggacatggacaagctcctggggggccagatcgggctggaggacttcatcttcgcccacgtgaaggggcagcgcaaggaggtggaggtgttcaagtcggaggatgcactcgggctcaccatcacggacaacggggctggctacgccttcatcaagcgcatcaaggagggcagcgtgatcgaccacatccacctcatcagcgtgggcgacatgatcgaggccattaacgggcagagcctgctgggctgccggcactacgaggtggcccggctgctcaaggagctgccccgaggccgtaccttcacgctgaagctcacggagcctcgcaaggccttcgacatgatcagccagcgttcagcgggtggccgccctggctctggcccacaactgggcactggccgagggaccctgcggctccgatcccggggccccgccacggtggaggatctgccctctgcctttgaagagaaggccattgagaaggtggatgacctgctggagagttacatgggtatcagggacacggagctggcggccaccatggtggagctgggaaaggacaaaaggaacccggatgagctggccgaggccctggacgaacggctgggtgactttgccttccctgacgagttcgtctttgacgtctggggcgccattggggacgccaaggtcggccgctactaggactgcccccggaccctgcgatgatgacccgggcgcaacctggtgggggcccccagcagggacactgacgtcaggacccgagcctccagcctgagcctagctcagcagcccaaggacgatggtgaggggaggtggggccaggccccctgccccgctccaatcggtaccatcccctccctggttcccagtctggccggggtccccggcccccctgtgccctgttccccacctacctcagctgggtcaggcacagggaggggagggatcagccaaattgggcggccacccccgcctccaccactttccaccatcagctgccaaactggtccctctgtctccctggggccttgggttctgtttgggggtcatgaccttcctagtttcctgacgcagggaatacaggggagagggttgtccttccccccagcaaatgcaataatgccctcacccctcctgagaggagccccctccctgtggagcctgttacctccgcatttgacacgagtctgctgtgaaccccgcaacctcctccccacctcccatctctccttccaggcccatccctggcccagagcaggagggagggagggacgatggcggtgggtttttgtatctgaatttgctgtcttgaacataaagaatctatctgctgtt

SEQ ID NO: 313481 - DNA, 1836 bp, Homo sapiens
ggcacgaggctggagtttgcggagggccgagccgggtgcgcacggggaggcggaggcagcggcggcggcggcggcggcggcggcggcggagcagatgaagaaactgaggccctgtgatgtgaagtgacttgccccccagccacacagctgatcttctggtgaccccacttctcgctgctcatgccgctgggactggggcggcggaaaaaggcgccccctctagtggaaaatgaggaggctgagccaggccgtggagggctgggcgtgggggagccagggcctctgggcggaggtgggtcggggggcccccaaatgggcttgcccccccctcccccagccctgcggccccgcctcgtgttccacacccagctggcccatggcagtcccactggccgcatcgagggcttcaccaacgtcaaggagctgtatggcaagatcgccgaggccttccgcctgccaactgccgaggtgatgttctgcaccctgaacacccacaaagtggacatggacaagctcctggggggccagatcgggctggaggacttcatcttcgcccacgtgaaggggcagcgcaaggaggtggaggtgttcaagtcggaggatgcactcgggctcaccatcacggacaacggggctggctacgccttcatcaagcgcatcaaggagggcagcgtgatcgaccacatccacctcatcagcgtgggcgacatgatcgaggccattaacgggcagagcctgctgggctgccggcactacgaggtggcccggctgctcaaggagctgccccgaggccgtaccttcacgctgaagctcacggagcctcgcaaggccttcgacatgatcagccagcgttcagcgggtggccgccctggctctggcccacaactgggcactggccgagggaccctgcggctccgatcccggggccccgccacggtggaggatctgccctctgcctttgaagagaaggccattgagaaggtggatgacctgctggagagttacatgggtatcagggacacggagctggcggccaccatggtggagctgggaaaggacaaaaggaacccggatgagctggccgaggccctggacgaacggctgggtgactttgccttccctgacgagttcgtctttgacgtctggggcgccattggggacgccaaggtcggccgctactaggactgcccccggaccctgcgatgatgacccgggcgcaacctggtgggggcccccagcagggacactgacgtcaggacccgagcctccagcctgagcctagctcagcagcccaaggacgatggtgaggggaggtggggccaggccccctgccccgctccaatcggtaccatcccctccctggttcccagtctggccggggtccccggcccccctgtgccctgttccccacctacctcagctgggtcaggcacagggaggggagggatcagccaaattgggcggccacccccgcctccaccactttccaccatcagctgccaaactggtccctctgtctccctggggccttgggttctgtttgggggtcatgaccttcctagtttcctgacgcagggaatacaggggagagggttgtccttccccccagcaaatgcaataatgccctcacccctcctgagaggagccccctccctgtggagcctgttacctccgcatttgacacgagtctgctgtgaaccccgcaacctcctccccacctcccatctctccttccaggcccatccctggcccagagcaggagggagggagggacgatggcggtgggtttttgtatctgaatttgctgtcttgaacataaagaatctatctgctgtt

SEQ ID NO: 313482 - DNA, 1606 bp, Homo sapiens
ggcacgaggctggagtttgcggagggccgagccgggtgcgcacggggaggcggaggcagcggcggcggcggcggcggcggcggcggcggagcagatgaagaaactgaggccctgtgatgtgaagtgacttgccccccagccacacagctggaccattctggctgctgtctggacaagaagtcgtagggggtgagggtggaagctgggaaacccacaggaggcaaccacactagtttaggtgatgttctgcaccctgaacacccacaaagtggacatggacaagctcctggggggccagatcgggctggaggacttcatcttcgcccacgtgaaggggcagcgcaaggaggtggaggtgttcaagtcggaggatgcactcgggctcaccatcacggacaacggggctggctacgccttcatcaagcgcatcaaggagggcagcgtgatcgaccacatccacctcatcagcgtgggcgacatgatcgaggccattaacgggcagagcctgctgggctgccggcactacgaggtggcccggctgctcaaggagctgccccgaggccgtaccttcacgctgaagctcacggagcctcgcaaggccttcgacatgatcagccagcgttcagcgggtggccgccctggctctggcccacaactgggcactggccgagggaccctgcggctccgatcccggggccccgccacggtggaggatctgccctctgcctttgaagagaaggccattgagaaggtggatgacctgctggagagttacatgggtatcagggacacggagctggcggccaccatggtggagctgggaaaggacaaaaggaacccggatgagctggccgaggccctggacgaacggctgggtgactttgccttccctgacgagttcgtctttgacgtctggggcgccattggggacgccaaggtcggccgctactaggactgcccccggaccctgcgatgatgacccgggcgcaacctggtgggggcccccagcagggacactgacgtcaggacccgagcctccagcctgagcctagctcagcagcccaaggacgatggtgaggggaggtggggccaggccccctgccccgctccaatcggtaccatcccctccctggttcccagtctggccggggtccccggcccccctgtgccctgttccccacctacctcagctgggtcaggcacagggaggggagggatcagccaaattgggcggccacccccgcctccaccactttccaccatcagctgccaaactggtccctctgtctccctggggccttgggttctgtttgggggtcatgaccttcctagtttcctgacgcagggaatacaggggagagggttgtccttccccccagcaaatgcaataatgccctcacccctcctgagaggagccccctccctgtggagcctgttacctccgcatttgacacgagtctgctgtgaaccccgcaacctcctccccacctcccatctctccttccaggcccatccctggcccagagcaggagggagggagggacgatggcggtgggtttttgtatctgaatttgctgtcttgaacataaagaatctatctgctgtt

SEQ ID NO: 313483 - DNA, 1528 bp, Homo sapiens
ggcacgaggctggagtttgcggagggccgagccgggtgcgcacggggaggcggaggcagcggcggcggcggcggcggcggcggcggcggagcagatgaagaaactgaggccctgtgatgtgaagtgacttgccccccagccacacagctggaccattctggctgctgtctggacaagaagtcgtagggggtgagggtggaagctgggaaacccacaggaggcaaccacactagtttagatcttctggtgaccccacttctcgctgctcatgccgctgggactggggcggcggaaaaaggcgccccctctagtggaaaatgaggaggctgagccaggccgtggagggctgggcgtgggggagccagggcctctgggcggaggtgggtcggggggcccccaaatgggcttgcccccccctcccccagccctgcggccccgcctcgtgttccacacccagctggcccatggcagtcccactggccgcatcgagggcttcaccaacgtcaaggagctgtatggcaagatcgacatgatcagccagcgttcagcgggtggccgccctggctctggcccacaactgggcactggccgagggaccctgcggctccgatcccggggccccgccacggtggaggatctgccctctgcctttgaagagaaggccattgagaaggtggatgacctgctggagagttacatgggtatcagggacacggagctggcggccaccatggtggagctgggaaaggacaaaaggaacccggatgagctggccgaggccctggacgaacggctgggtgactttgccttccctgacgagttcgtctttgacgtctggggcgccattggggacgccaaggtcggccgctactaggactgcccccggaccctgcgatgatgacccgggcgcaacctggtgggggcccccagcagggacactgacgtcaggacccgagcctccagcctgagcctagctcagcagcccaaggacgatggtgaggggaggtggggccaggccccctgccccgctccaatcggtaccatcccctccctggttcccagtctggccggggtccccggcccccctgtgccctgttccccacctacctcagctgggtcaggcacagggaggggagggatcagccaaattgggcggccacccccgcctccaccactttccaccatcagctgccaaactggtccctctgtctccctggggccttgggttctgtttgggggtcatgaccttcctagtttcctgacgcagggaatacaggggagagggttgtccttccccccagcaaatgcaataatgccctcacccctcctgagaggagccccctccctgtggagcctgttacctccgcatttgacacgagtctgctgtgaaccccgcaacctcctccccacctcccatctctccttccaggcccatccctggcccagagcaggagggagggagggacgatggcggtgggtttttgtatctgaatttgctgtcttgaacataaagaatctatctgctgtt

SEQ ID NO: 313484 - DNA, 1041 bp, Homo sapiens
aagaggagacggactcaggcagctggagactcaggctgggacatgatcagccagcgttcagcgggtggccgccctggctctggcccacaactgggcactggccgagggaccctgcggctccgatcccggggccccgccacggtggaggatctgccctctgcctttgaagagaaggccattgagaaggtggatgacctgctggagagttacatgggtatcagggacacggagctggcggccaccatggtggagctgggaaaggacaaaaggaacccggatgagctggccgaggccctggacgaacggctgggtgactttgccttccctgacgagttcgtctttgacgtctggggcgccattggggacgccaaggtcggccgctactaggactgcccccggaccctgcgatgatgacccgggcgcaacctggtgggggcccccagcagggacactgacgtcaggacccgagcctccagcctgagcctagctcagcagcccaaggacgatggtgaggggaggtggggccaggccccctgccccgctccaatcggtaccatcccctccctggttcccagtctggccggggtccccggcccccctgtgccctgttccccacctacctcagctgggtcaggcacagggaggggagggatcagccaaattgggcggccacccccgcctccaccactttccaccatcagctgccaaactggtccctctgtctccctggggccttgggttctgtttgggggtcatgaccttcctagtttcctgacgcagggaatacaggggagagggttgtccttccccccagcaaatgcaataatgccctcacccctcctgagaggagccccctccctgtggagcctgttacctccgcatttgacacgagtctgctgtgaaccccgcaacctcctccccacctcccatctctccttccaggcccatccctggcccagagcaggagggagggagggacgatggcggtgggtttttgtatctgaatttgctgtcttgaacataaagaatctatctgctgtt

SEQ ID NO: 313485 - DNA, 603 bp, Homo sapiens
  misc_feature (3)..(3): n is a, c, g, or t
  misc_feature (75)..(75): n is a, c, g, or t
atnacttatgtctaggtacccgagcctccctactctcgccaccccaccccaccacccccaaccaccatccccacnccaccctcccaccacgccccctgccccgctccaatcggtaccatcccctccctggttcccagtctggccggggtccccggcccccctgtgccctgttccccacctacctcagctgggtcaggcacagggaggggagggatcagccaaattgggcggccacccccgcctccaccactttccaccatcagctgccaaactggtccctctgtctccctggggccttgggttctgtttgggggtcatgaccttcctagtttcctgacgcagggaatacaggggagagggttgtccttccccccagcaaatgcaataatgccctcacccctcctgagaggagccccctccctgtggagcctgttacctccgcatttgacacgagtctgctgtgaaccccgcaacctcctccccacctcccatctctccttccaggcccatccctggcccagagcaggagggagggagggacgatggcggtgggtttttgtatctgaatttgctgtcttgaacataaagaatctatctgctgtt

SEQ ID NO: 313486 - DNA, 1071 bp, Homo sapiens
ggcacgaggctggagtttgcggagggccgagccgggtgcgcacggggaggcggaggcagcggcggcggcggcggcggcggcggcggcggagcagatgaagaaactgaggccctgtgatgtgaagtgacttgccccccagccacacagctggaccattctggctgctgtctggacaagaagtcgtagggggtgagggtggaagctgggaaacccacaggaggcaaccacactagtttagatcttctggtgaccccacttctcgctgctcatgccgctgggactggggcggcggaaaaaggcgccccctctagtggaaaatgaggaggctgagccaggccgtggagggctgggcgtgggggagccagggcctctgggcggaggtgggtcggggggcccccaaatgggcttgcccccccctcccccagccctgcggccccgcctcgtgttccacacccagctggcccatggcagtcccactggccgcatcgagggcttcaccaacgtcaaggagctgtatggcaagatcgccgaggccttccgcctgccaactgccgaggtgatgttctgcaccctgaacacccacaaagtggacatggacaagctcctggggggccagatcgggctggaggacttcatcttcgcccacgtgaaggggcagcgcaaggaggtggaggtgttcaagtcggaggatgcactcgggctcaccatcacggacaacggggctggctacgccttcatcaaggtccctctgtctccctggggccttgggttctgtttgggggtcatgaccttcctagtttcctgacgcagggaatacaggggagagggttgtccttccccccagcaaatgcaataatgccctcacccctcctgagaggagccccctccctgtggagcctgttacctccgcatttgacacgagtctgctgtgaaccccgcaacctcctccccacctcccatctctccttccaggcccatccctggcccagagcaggagggagggagggacgatggcggtgggtttttgtatctgaatttgctgtcttgaacataaagaatctatctgctgtt

SEQ ID NO: 313487 - DNA, 935 bp, Homo sapiens
ggcacgaggctggagtttgcggagggccgagccgggtgcgcacggggaggcggaggcagcggcggcggcggcggcggcggcggcggcggagcagatgaagaaactgaggccctgtgatgtgaagtgacttgccccccagccacacagctggaccattctggctgctgtctggacaagaagtcgtagggggtgagggtggaagctgggaaacccacaggaggcaaccacactagtttagatcttctggtgaccccacttctcgctgctcatgccgctgggactggggcggcggaaaaaggcgccccctctagtggaaaatgaggaggctgagccaggccgtggagggctgggcgtgggggagccagggcctctgggcggaggtgggtcggggggcccccaaatgggcttgcccccccctcccccagccctgcggccccgcctcgtgttccacacccagctggcccatggcagtcccactggccgcatcgagggcttcaccaacgtcaaggagctgtatggcaagatcgccgaggccttccgcctgccaactgccgaggtgatgttctgcaccctgaacacccacaaagtggacatggacaagctcctggggggccagatcgggctggaggacttcatcttcgcccacgtgaaggggcagcgcaaggaggtggaggtgttcaagtcggaggatgcactcgggctcaccatcaaatgcaataatgccctcacccctcctgagaggagccccctccctgtggagcctgttacctccgcatttgacacgagtctgctgtgaaccccgcaacctcctccccacctcccatctctccttccaggcccatccctggcccagagcaggagggagggagggacgatggcggtgggtttttgtatctgaatttgctgtcttgaacataaagaatctatctgctgtt

SEQ ID NO: 313488 - DNA, 695 bp, Homo sapiens
ggcacgaggctggagtttgcggagggccgagccgggtgcgcacggggaggcggaggcagcggcggcggcggcggcggcggcggcggcggagcagatgaagaaactgaggccctgtgatgtgaagtgacttgccccccagccacacagctggaccattctggctgctgtctggacaagaagtcgtagggggtgagggtggaagctgggaaacccacaggaggcaaccacactagtttagatcttctggtgaccccacttctcgctgctcatgccgctgggactggggcggcggaaaaaggcgccccctctagtggaaaatgaggaggctgagccaggccgtggagggctgggcgtgggggagccagggcctctgggcggaggtgggtcggggggcccccaaatgggcttgcccccccctcccccagccctgcggccccgcctcgtgttccacacccagctggcccatggcagtcccactggccgcatcgagggctctgagaggagccccctccctgtggagcctgttacctccgcatttgacacgagtctgctgtgaaccccgcaacctcctccccacctcccatctctccttccaggcccatccctggcccagagcaggagggagggagggacgatggcggtgggtttttgtatctgaatttgctgtcttgaacataaagaatctatctgctgtt

SEQ ID NO: 313489 - DNA, 493 bp, Homo sapiens
gggcggaggcagcggcggcgtgctgtgcgtgtgtgtgtgtggctggcggcggagcagatgaagaaactgaggccctgtgatgtgaagtgacttgccccccagccacacagctggaccattctggctgctgtctggacaagaagtcgtagggggtgagggtggaagtccctctgtctccctggggccttgggttctgtttgggggtcatgaccttcctagtttcctgacgcagggaatacaggggagagggttgtccttccccccagcaaatgcaataatgccctcacccctcctgagaggagccccctccctgtggagcctgttacctccgcatttgacacgagtctgctgtgaaccccgcaacctcctccccacctcccatctctccttccaggcccatccctggcccagagcaggagggagggagggacgatggcggtgggtttttgtatctgaatttgctgtcttgaacataaagaatctatctgctgtt

SEQ ID NO: 313490 - DNA, 469 bp, Homo sapiens
agctctctctgtggggttttgggggttcagaggccccgccctcttggagggctggggtgaacaggtggcaatgaagtgtgccatctggctggcagagcaacgggtgcccctgagtgtgcaactgaaggacgctctctctggtccctctgtctccctggggccttgggttctgtttgggggtcatgaccttcctagtttcctgacgcagggaatacaggggagagggttgtccttccccccagcaaatgcaataatgccctcacccctcctgagaggagccccctccctgtggagcctgttacctccgcatttgacacgagtctgctgtgaaccccgcaacctcctccccacctcccatctctccttccaggcccatccctggcccagagcaggagggagggagggacgatggcggtgggtttttgtatctgaatttgctgtcttgaacataaagaatctatctgctgtt

SEQ ID NO: 313491 - DNA, 727 bp, Homo sapiens
gggcggaggcagcggcggcgtgctgtgcgtgtgtgtgtgtggctggcggcggagcagatgaagaaactgaggccctgtgatgtgaagtgacttgccccccagccacacagctggaccattctggctgctgtctggacaagaagtcgtagggggtgagggtggaagctgggaaacccacaggaggcaaccacactagtttaggtaagtgatcatggagatggaccaggtgagatgagagggtgtgttaggggacagacgaatggatgcatgaacaaatggatacatgagactaggtgcaggctgggtgcagtggctcacacctctaatcccggcactttggaaggccaaggcgggaggattgcttgagcccaggagttcaggaccaatctgggcaacgtggtgagacccgtctctacaaaaaataaaaattggctgggcatggctgtgaacacctgtagtctcagctattcaggaggttgagacaggaggattgcttgagcccaggaatttgaggctgtagtgagctgtgatcacatcactccactgcagcctggacgacagagtgagaccccattaaaaaaaaaaaatcaggaaaacatagcaacctgttacctccctgccctcatgttctcactatccccccttcactcactgttccaaccccccaggcctcctcactgttcctcaaacatgccaattgcatgcccagttcagggcttggcttttc

SEQ ID NO: 313492 - DNA, 1780 bp, Homo sapiens
ggcacgaggctggagtttgcggagggccgagccgggtgcgcacggggaggcggaggcagcggcggcggcggcggcggcggcggcggcggagcagatcttctggtgaccccacttctcgctgctcatgccgctgggactggggcggcggaaaaaggcgccccctctagtggaaaatgaggaggctgagccaggccgtggagggctgggcgtgggggagccagggcctctgggcggaggtgggtcggggggcccccaaatgggcttgcccccccctcccccagccctgcggccccgcctcgtgttccacacccagctggcccatggcagtcccactggccgcatcgagggcttcaccaacgtcaaggagctgtatggcaagatcgccgaggccttccgcctgccaactgccgaggtgatgttctgcaccctgaacacccacaaagtggacatggacaagctcctggggggccagatcgggctggaggacttcatcttcgcccacgtgaaggggcagcgcaaggaggtggaggtgttcaagtcggaggatgcactcgggctcaccatcacggacaacggggctggctacgccttcatcaagcgcatcaaggagggcagcgtgatcgaccacatccacctcatcagcgtgggcgacatgatcgaggccattaacgggcagagcctgctgggctgccggcactacgaggtggcccggctgctcaaggagctgccccgaggccgtaccttcacgctgaagctcacggagcctcgcaaggccttcgacatgatcagccagcgttcagcgggtggccgccctggctctggcccacaactgggcactggccgagggaccctgcggctccgatcccggggccccgccacggtggaggatctgccctctgcctttgaagagaaggccattgagaaggtggatgacctgctggagagttacatgggtatcagggacacggagctggcggccaccatggtggagctgggaaaggacaaaaggaacccggatgagctggccgaggccctggacgaacggctgggtgactttgccttccctgacgagttcgtctttgacgtctggggcgccattggggacgccaaggtcggccgctactaggactgcccccggaccctgcgatgatgacccgggcgcaacctggtgggggcccccagcagggacactgacgtcaggacccgagcctccagcctgagcctagctcagcagcccaaggacgatggtgaggggaggtggggccaggccccctgccccgctccaatcggtaccatcccctccctggttcccagtctggccggggtccccggcccccctgtgccctgttccccacctacctcagctgggtcaggcacagggaggggagggatcagccaaattgggcggccacccccgcctccaccactttccaccatcagctgccaaactggtccctctgtctccctggggccttgggttctgtttgggggtcatgaccttcctagtttcctgacgcagggaatacaggggagagggttgtccttccccccagcaaatgcaataatgccctcacccctcctgagaggagccccctccctgtggagcctgttacctccgcatttgacacgagtctgctgtgaaccccgcaacctcctccccacctcccatctctccttccaggcccatccctggcccagagcaggagggagggagggacgatggcggtgggtttttgtatctgaatttgctgtcttgaacataaagaatctatctgctgtt

SEQ ID NO: 313493 - DNA, 1868 bp, Homo sapiens
ggcacgaggctggagtttgcggagggccgagccgggtgcgcacggggaggcggaggcagcggcggcggcggcggcggcggcggcggcggagcaggaccattctggctgctgtctggacaagaagtcgtagggggtgagggtggaagctgggaaacccacaggaggcaaccacactagtttagatcttctggtgaccccacttctcgctgctcatgccgctgggactggggcggcggaaaaaggcgccccctctagtggaaaatgaggaggctgagccaggccgtggagggctgggcgtgggggagccagggcctctgggcggaggtgggtcggggggcccccaaatgggcttgcccccccctcccccagccctgcggccccgcctcgtgttccacacccagctggcccatggcagtcccactggccgcatcgagggcttcaccaacgtcaaggagctgtatggcaagatcgccgaggccttccgcctgccaactgccgaggtgatgttctgcaccctgaacacccacaaagtggacatggacaagctcctggggggccagatcgggctggaggacttcatcttcgcccacgtgaaggggcagcgcaaggaggtggaggtgttcaagtcggaggatgcactcgggctcaccatcacggacaacggggctggctacgccttcatcaagcgcatcaaggagggcagcgtgatcgaccacatccacctcatcagcgtgggcgacatgatcgaggccattaacgggcagagcctgctgggctgccggcactacgaggtggcccggctgctcaaggagctgccccgaggccgtaccttcacgctgaagctcacggagcctcgcaaggccttcgacatgatcagccagcgttcagcgggtggccgccctggctctggcccacaactgggcactggccgagggaccctgcggctccgatcccggggccccgccacggtggaggatctgccctctgcctttgaagagaaggccattgagaaggtggatgacctgctggagagttacatgggtatcagggacacggagctggcggccaccatggtggagctgggaaaggacaaaaggaacccggatgagctggccgaggccctggacgaacggctgggtgactttgccttccctgacgagttcgtctttgacgtctggggcgccattggggacgccaaggtcggccgctactaggactgcccccggaccctgcgatgatgacccgggcgcaacctggtgggggcccccagcagggacactgacgtcaggacccgagcctccagcctgagcctagctcagcagcccaaggacgatggtgaggggaggtggggccaggccccctgccccgctccaatcggtaccatcccctccctggttcccagtctggccggggtccccggcccccctgtgccctgttccccacctacctcagctgggtcaggcacagggaggggagggatcagccaaattgggcggccacccccgcctccaccactttccaccatcagctgccaaactggtccctctgtctccctggggccttgggttctgtttgggggtcatgaccttcctagtttcctgacgcagggaatacaggggagagggttgtccttccccccagcaaatgcaataatgccctcacccctcctgagaggagccccctccctgtggagcctgttacctccgcatttgacacgagtctgctgtgaaccccgcaacctcctccccacctcccatctctccttccaggcccatccctggcccagagcaggagggagggagggacgatggcggtgggtttttgtatctgaatttgctgtcttgaacataaagaatctatctgctgtt

SEQ ID NO: 313494 - DNA, 1991 bp, Homo sapiens
gctaatttttatatttttagtagaggtggggtttcaccatgttggccaagctggtttcaaagttttgacctcaagtgatccgcccacctcagccttccgtagtggtgggattacaggcgtgagccaccgcacccagccctattattacttttatataagtgtcctgtcactatacaagagatgaggatttcaaccgaggccaatttgttctctgagtatttccttgggcctgtatggttcgagtagtgtgggaggggcacccaaggcctctgcccaggccctgagccccacttcctgtcctgcagatcttctggtgaccccacttctcgctgctcatgccgctgggactggggcggcggaaaaaggcgccccctctagtggaaaatgaggaggctgagccaggccgtggagggctgggcgtgggggagccagggcctctgggcggaggtgggtcggggggcccccaaatgggcttgcccccccctcccccagccctgcggccccgcctcgtgttccacacccagctggcccatggcagtcccactggccgcatcgagggcttcaccaacgtcaaggagctgtatggcaagatcgccgaggccttccgcctgccaactgccgaggtgatgttctgcaccctgaacacccacaaagtggacatggacaagctcctggggggccagatcgggctggaggacttcatcttcgcccacgtgaaggggcagcgcaaggaggtggaggtgttcaagtcggaggatgcactcgggctcaccatcacggacaacggggctggctacgccttcatcaagcgcatcaaggagggcagcgtgatcgaccacatccacctcatcagcgtgggcgacatgatcgaggccattaacgggcagagcctgctgggctgccggcactacgaggtggcccggctgctcaaggagctgccccgaggccgtaccttcacgctgaagctcacggagcctcgcaaggccttcgacatgatcagccagcgttcagcgggtggccgccctggctctggcccacaactgggcactggccgagggaccctgcggctccgatcccggggccccgccacggtggaggatctgccctctgcctttgaagagaaggccattgagaaggtggatgacctgctggagagttacatgggtatcagggacacggagctggcggccaccatggtggagctgggaaaggacaaaaggaacccggatgagctggccgaggccctggacgaacggctgggtgactttgccttccctgacgagttcgtctttgacgtctggggcgccattggggacgccaaggtcggccgctactaggactgcccccggaccctgcgatgatgacccgggcgcaacctggtgggggcccccagcagggacactgacgtcaggacccgagcctccagcctgagcctagctcagcagcccaaggacgatggtgaggggaggtggggccaggccccctgccccgctccaatcggtaccatcccctccctggttcccagtctggccggggtccccggcccccctgtgccctgttccccacctacctcagctgggtcaggcacagggaggggagggatcagccaaattgggcggccacccccgcctccaccactttccaccatcagctgccaaactggtccctctgtctccctggggccttgggttctgtttgggggtcatgaccttcctagtttcctgacgcagggaatacaggggagagggttgtccttccccccagcaaatgcaataatgccctcacccctcctgagaggagccccctccctgtggagcctgttacctccgcatttgacacgagtctgctgtgaaccccgcaacctcctccccacctcccatctctccttccaggcccatccctggcccagagcaggagggagggagggacgatggcggtgggtttttgtatctgaatttgctgtcttgaacataaagaatctatctgctgtt

SEQ ID NO: 313495 - DNA, 3243 bp, Homo sapiens
  misc_feature (1962)..(1962): n is a, c, g, or t
ggcacgaggctggagtttgcggagggccgagccgggtgcgcacggggaggcggaggcagcggcggcggcggcggcggcggcggcggcggagcagatgaagaaactgaggccctgtgatgtgaagtgacttgccccccagccacacagctggaccattctggctgctgtctggacaagaagtcgtagggggtgagggtggaagctgggaaacccacaggaggcaaccacactagtttagatcttctggtgaccccacttctcgctgctcatgccgctgggactggggcggcggaaaaaggcgccccctctagtggaaaatgaggaggctgagccaggccgtggagggctgggcgtgggggagccagggcctctgggcggaggtgggtcggggggcccccaaatgggcttgcccccccctcccccagccctgcggccccgcctcgtgttccacacccagctggcccatggcagtcccactggccgcatcgagggcttcaccaacgtcaaggagctgtatggcaagatcgccgaggccttccgcctgccaactgccgaggtgatgttctgcaccctgaacacccacaaagtggacatggacaagctcctggggggccagatcgggctggaggacttcatcttcgcccacgtgaaggggcagcgcaaggaggtggaggtgttcaagtcggaggatgcactcgggctcaccatcacggacaacggggctggctacgccttcatcaagcgcatcaaggagggcagcgtgatcgaccacatccacctcatcagcgtgggcgacatgatcgaggccattaacgggcagagcctgctgggctgccggcactacgaggtggcccggctgctcaaggagctgccccgaggccgtaccttcacgctgaagctcacggagcctcgcaaggccttcgacatgatcagccagcgttcagcgggtggccgccctggctctggcccacaactgggcactggccgagggaccctgcggctccgatcccggggccccgccacggtggaggatctgccctctgcctttgaagagaaggccattgagaaggtggatgacctgctggagagttacatgggtatcagggacacggagctggcggccaccatggtggagctgggaaaggacaaaaggaacccggatgagctggccgaggccctggacgaacggctgggtgactttgccttccctgacgagttcgtctttgacgtctggggcgccattggggacgccaaggtcggccgctactaggactgcccccggaccctgcgatgatgacccgggcgcaacctggtgggggcccccagcagggacactgacgtcaggacccgagcctccagcctgagcctagctcagcagcccaaggacgatggtgaggggaggtggggccaggccccctgccccgctccaatcggtaccatcccctccctggttcccagtctggccggggtccccggcccccctgtgccctgttccccacctacctcagctgggtcaggcacagggaggggagggatcagccaaattgggcggccacccccgcctccaccactttccaccatcagctgccaaactggtccctctgtctccctggggccttgggttctgtttgggggtcatgaccttcctagtttcctgacgcagggaatacaggggagagggttgtccttccccccagcaaatgcaataatgccctcacccctcctgagaggagccccctccctgtggagcctgttacctccgcatttgacacgagtctgctgtgaaccccgcaacctcctccccacctcccatctctccttccaggcccatccctggcccagagcaggagggagggagggacgatggcggtgggtttttgtatctgaatttgctgtcttgaacataaagaatctatctgctgttaaaaaaaaaaaaaaaaaaaaaaaaaaaaaaaaaaaaanaaaaaaaaaaaaaaaaaaaaaaaaaaaaaaaaaaaaaaaaaaaaaaaaaagagggaggggcgcggcgcacacaaaatctctccccccggcgggggccccactaatacccgacaccacccacgcgtctttagaaagagaggggcccaccacacagagaggcgacttacatcacagcgagaggcgggacagcgggcggcattatacaacaaaatcatggtgctggcggagaaacacaagtcgctgatagtgggacaactatctggcgagaggagaagcccatccctccccctgccgcggggcggtggacaacagatgtgggagagcacacatcctcagacagagagatatatatactagtcaacaccacccatcaccacgaccaccacatatcacatcaaacctcataccacagaccaagacaatcaaaactagtcgtgtctcacccaccaacaacagctcaccacttaatcatctcacccacccccacacacaaacaaacgacaccacacacgaccgcaccacttccctcctatacacaccaacaaccttctcctaccccccgcacggcgtctatatctaattcccccatacagcttcaccgccagaccgccactgcccaacagaccactgccatacaactccaaacgtcatcgctgaccaaccatacacaccgccaacagacgacaaacaccatgcatcaatacacacacaactaacagcaccaacacactagcacgaccacaaccgaagcacaccacaacgacgaaaccaacaaccatactcgcacacgatacccatacaccggtaaagacacaggcacacacacacagacgaactataccaaccacattaaaagtacacacagctaaatacagactcaaacacacatgacaacagcaacacacaactgacataacatatcaaattcacaaaaaactacaacagacacccaaacacactaatatacaacacactccacactcacacacaaagatacatcaaaacgacaaaagaaaaacaatacaacagacaaaaagcaaagcacaactcatcaagcaccactagcccaacagcactacacacccacacacactcaccaccactccacgcacccaacccactacaaccgacatcacaacgcacatatgagtgtcagactcacacactaaccccacaaaacacacaccacaaacacacaaaacaacaaccagactacctaaacacacgcacgctcactaacagcaataacaaccataacttcatctgaccaccaccacccaa

SEQ ID NO: 313496 - DNA, 1425 bp, Homo sapiens
ggcacgaggctggagtttgcggagggccgagccgggtgcgcacggggaggcggaggcagcggcggcggcggcggcggcggcggcggcggagcagatgaagaaactgaggccctgtgatgtgaagtgacttgccccccagccacacagctggaccattctggctgctgtctggacaagaagtcgtagggggtgagggtggaagctgggaaacccacaggaggcaaccacactagtttaggtgatgttctgcaccctgaacacccacaaagtggacatggacaagctcctggggggccagatcgggctggaggacttcatcttcgcccacgtgaaggggcagcgcaaggaggtggaggtgttcaagtcggaggatgcactcgggctcaccatcacggacaacggggctggctacgccttcatcaagacatgatcagccagcgttcagcgggtggccgccctggctctggcccacaactgggcactggccgagggaccctgcggctccgatcccggggccccgccacggtggaggatctgccctctgcctttgaagagaaggccattgagaaggtggatgacctgctggagagttacatgggtatcagggacacggagctggcggccaccatggtggagctgggaaaggacaaaaggaacccggatgagctggccgaggccctggacgaacggctgggtgactttgccttccctgacgagttcgtctttgacgtctggggcgccattggggacgccaaggtcggccgctactaggactgcccccggaccctgcgatgatgacccgggcgcaacctggtgggggcccccagcagggacactgacgtcaggacccgagcctccagcctgagcctagctcagcagcccaaggacgatggtgaggggaggtggggccaggccccctgccccgctccaatcggtaccatcccctccctggttcccagtctggccggggtccccggcccccctgtgccctgttccccacctacctcagctgggtcaggcacagggaggggagggatcagccaaattgggcggccacccccgcctccaccactttccaccatcagctgccaaactggtccctctgtctccctggggccttgggttctgtttgggggtcatgaccttcctagtttcctgacgcagggaatacaggggagagggttgtccttccccccagcaaatgcaataatgccctcacccctcctgagaggagccccctccctgtggagcctgttacctccgcatttgacacgagtctgctgtgaaccccgcaacctcctccccacctcccatctctccttccaggcccatccctggcccagagcaggagggagggagggacgatggcggtgggtttttgtatctgaatttgctgtcttgaacataaagaatctatctgctgtt

SEQ ID NO: 313497 - DNA, 1346 bp, Homo sapiens
ggcacgaggctggagtttgcggagggccgagccgggtgcgcacggggaggcggaggcagcggcggcggcggcggcggcggcggcggcggagcaggaccattctggctgctgtctggacaagaagtcgtagggggtgagggtggaagctgggaaacccacaggaggcaaccacactagtttaggtgatgttctgcaccctgaacacccacaaagtggacatggacaagctcctggggggccagatcgggctggaggacttcatcttcgcccacgtgaaggggcagcgcaaggaggtggaggtgttcaagtcggaggatgcactcgggctcaccatcacggacaacggggctggctacgccttcatcaagcgcatcaaggagggcagcgtgatcgaccacatccacctcatcagcgtgggcgacatgatcgaggccattaacgggcagagcctgctgggctgccggcactacgaggtggcccggctgctcaaggagctgccccgaggccgtaccttcacgctgaagctcacggagcctcgcaaggccttcgacatgatcagccagcgttcagcgggtggccgccctggctctggcccacaactgggcactggccgagggaccctgcggctccgatcccggggccccgccacggtggaggatctgccctctgcctttgaagagaaggccattgagaaggtggatgacctgctggagagttacatgggtatcagggacacggagctggcggccaccatggtggagctgggaaaggacaaaaggaacccggatgagctggccgaggccctggacgatggtgaggggaggtggggccaggccccctgccccgctccaatcggtaccatcccctccctggttcccagtctggccggggtccccggcccccctgtgccctgttccccacctacctcagctgggtcaggcacagggaggggagggatcagccaaattgggcggccacccccgcctccaccactttccaccatcagctgccaaactggtccctctgtctccctggggccttgggttctgtttgggggtcatgaccttcctagtttcctgacgcagggaatacaggggagagggttgtccttccccccagcaaatgcaataatgccctcacccctcctgagaggagccccctccctgtggagcctgttacctccgcatttgacacgagtctgctgtgaaccccgcaacctcctccccacctcccatctctccttccaggcccatccctggcccagagcaggagggagggagggacgatggcggtgggtttttgtatctgaatttgctgtcttgaacataaagaatctatctgctgtt

SEQ ID NO: 313498 - DNA, 1784 bp, Homo sapiens
ggcacgaggctggagtttgcggagggccgagccgggtgcgcacggggaggcggaggcagcggcggcggcggcggcggcggcggcggcggagcagatgaagaaactgaggccctgtgatgtgaagtgacttgccccccagccacacagctggaccattctggctgctgtctggacaagaagtcgtagggggtgagggtggaagctgggaaacccacaggaggcaaccacactagtttagatcttctggtgaccccacttctcgctgctcatgccgctgggactggggcggcggaaaaaggcgccccctctagtggaaaatgaggaggctgagccaggccgtggagggctgggcgtgggggagccagggcctctgggcggaggtgggtcggggggcccccaaatgggcttgcccccccctcccccagccctgcggccccgcctcgtgttccacacccagctggcccatggcagtcccactggccgcatcgagggcttcaccaacgtcaaggagctgtatggcaagatcgccgaggccttccgcctgccaactgccgaggtgatgttctgcaccctgaacacccacaaagtggacatggacaagctcctggggggccagatcgggctggaggacttcatcttcgcccacgtgaaggggcagcgcaaggaggtggaggtgttcaagtcggaggatgcactcgggctcaccatcacggacaacggggctggctacgccttcatcaagcgcatcaaggagggcagcgtgatcgaccacatccacctcatcagcgtgggcgacatgatcgaggccattaacgggcagagcctgctgggctgccggcactacgaggtggcccggctgctcaaggagctgccccgaggccgtaccttcacgctgaagctcacggagcctcgcaaggccttcgacatgatcagccagcgttcagcgggtggccgccctggctctggcccacaactgggcactggccgagggaccctgcggctccgatcccggggccccgccacggtggaggatctgccctctgcctttgaagagaaggccattgagaaggtggatgacctgctggagagttacatgggtatcagggacacggagctggcggccaccatggtggagctgggaaaggacaaaaggaacccggatgagctggccgaggccctggacgatggtgaggggaggtggggccaggccccctgccccgctccaatcggtaccatcccctccctggttcccagtctggccggggtccccggcccccctgtgccctgttccccacctacctcagctgggtcaggcacagggaggggagggatcagccaaattgggcggccacccccgcctccaccactttccaccatcagctgccaaactggtccctctgtctccctggggccttgggttctgtttgggggtcatgaccttcctagtttcctgacgcagggaatacaggggagagggttgtccttccccccagcaaatgcaataatgccctcacccctcctgagaggagccccctccctgtggagcctgttacctccgcatttgacacgagtctgctgtgaaccccgcaacctcctccccacctcccatctctccttccaggcccatccctggcccagagcaggagggagggagggacgatggcggtgggtttttgtatctgaatttgctgtcttgaacataaagaatctatctgctgttaaaaaaaaaccaacccaacacaccaacaaaaacacacaaggggggccccccaaagaaattccca

SEQ ID NO: 313499 - DNA, 797 bp, Homo sapiens
ggcacgaggctggagtttgcggagggccgagccgggtgcgcacggggaggcggaggcagcggcggcggcggcggcggcggcggcggcggagcagatgaagaaactgaggccctgtgatgtgaagtgacttgccccccagccacacagctggaccattctggctgctgtctggacaagaagtcgtagggggtgagggtggaagctgggaaacccacaggaggcaaccacactagtttagatcttctggtgaccccacttctcgctgctcatgccgctgggactggggcggcggaaaaaggcgccccctctagtggaaaatgaggaggctgagccaggccgtggagggctgggcgtgggggagccagggcctctgggcggaggtgggtcggggggcccccaaatgggcttgcccccccctcccccagccctgcggccccgcctcgtgttccacacccagctggcccatggcagtcccactggccgcatcgagggcttcaccaacgtcaaggagctgtatggcaagatcgccgaggccttccgcctgccaactgccgaggtgatgttctgcaccctgaacacccacaaagtggacatggctgagaggagccccctccctgtggagcctgttacctccgcatttgacacgagtctgctgtgaaccccgcaacctcctccccacctcccatctctccttccaggcccatccctggcccagagcaggagggagggagggacgatggcggtgggtttttgtatctgaatttgctgtcttgaacataaagaatctatctgctgtt

SEQ ID NO: 313500 - DNA, 470 bp, Homo sapiens
tctccgaagccggcgaccgccccacctcctccctccctcccgcccgcttcctctgcccacagcgccggccagagcgagctagacaagggcacgcggggcctcgcctagacccgagaagactgcgggcgcgcgcaagcggcggcgtggaagctgtgagcgcccccatcccggaggtctccgccggctcccggttttttttggcctggaaaccagcagggtgcctccatttgctctctcatcctctggttcttacttgagtgtggaagtcgctccactggtggaccttgcagtggcactgagctgggtcacttcagccgtgaaaggccaactgtactactgtcaaggcttgggacagttaagcgtccgtgaaggtactggatacagcgacagcaggaagtgcagcagtgagaactgaaactaatttcacagactgtggtgttgcctgtgatgtagtctccctccctggctct

SEQ ID NO: 313501 - DNA, 352 bp, Homo sapiens
gtgaagagttgtcccagctcggcccgcgggggagccccgggagccgcacgtgtcctgggtcatgaaacttaatccacagcaagctccctcccgcccgcttcctctgcccacagcgccggccagagcgagctagacaagggcacgcggggcctcgcctagacccgagaagactgcgggcgcgcgcaagcggcggcgtggaagctgtgagcgcccccatcccggaggtctccgccggctcccggttctggagctatttgacagcgaagaccctcgggaacgggactacttaaaaacagtcttacacagaatttatggcaagtttcttggtcttagagcatttatccgaaaaacc

SEQ ID NO: 313502 - DNA, 5706 bp, Homo sapiens
gtgaagagttgtcccagctcggcccgcgggggagccccgggagccgcacgtgtcctgggtcatgaaacttaatccacagcaagctccctcccgcccgcttcctctgcccacagcgccggccagagcgagctagacaagggcacgcggggcctcgcctagacccgagaagactgcgggcgcgcgcaagcggcggcgtggaagctgtgagcgcccccatcccggaggtctccgccggctcccgggtgaatcagctcccggccgactttaggattcttctggattttaaattttttctttttaaaaaaacttggacggataaaagatgtgccatggcaggatagcaccaaagagcacctcagtgtttgccgtggcctccgtgggacatggagtgttccttccgctagtgatcctttgcaccctgcttggagacggacttgcttccgtgtgccccctaccaccggagccagagaatggtggctacatctgccacccccggccctgcagagaccccctgacagcaggcagtgtcatcgaatacctgtgtgctgaaggctacatgttgaagggcgattacaaatacctgacgtgtaagaatggcgagtggaaaccagccatggagattagctgccgtctcaacgaggataaagacacccacacatcacttggggtccccacgctgtctatagtggcttctactgccagctccgtggcgctcattctcctcctcgtggtgctgtttgtgctgctgcagccaaagctgaagtctttccatcatagcaggcgtgaccagggggtatctggggaccaggtctccatcatggtggatggagtccaggttgcactaccatcatacgaggaggctgtatatggcagttctggtcactgtgtgccacctgctgaccccagagtacagattgtgctgtcagaagggtctgggcccagtgggaggagcgtgccaagggagcaacagctgccggaccaaggggcctgctcctctgcaggtggagaagatgaggccccaggccagtctggactatgtgaagcctggggctctcgggcctcagagactgtgatggtgcatcaggcaaccacctcttcctgggtggccggctcagggaaccgccaactggcacacaaagaaactgcagattcagagaacagtgacatacaaagccttttatccctcacgtcagaggagtacacagatgatattccactgttgaaagaagcatgagggcagcggccagcctttcctctctgcgaggttctctcagcccttcctccctctccctgtgggattgagcaccctgtactctccagccaccttacctggatacctgagctgccacctgtgtatctgtgtatctctgagggccctataggcccaccttgctggaaactcaaggaagattctcgccatctgcctgttggacagctggaggagctggctctttgcctggccccgccttcccatctgtcagagacatatttgaatgtgctggatcaaaccctcccttttcctaagcctctgggtcccctccagccagctctttggcggcagcccccaccagctcctgtgggcctgagtgctgctgtgtttacttgtgcctttcccccaccctgtccagtttccctgtcatgcagacttgttgctgtccacaagccttagtggctgcactgctgccccctgccacacagggggccgggcctgggtctgtcctgtttcctttgagggttgcccctactgccctttgcaggaacagatccaggtgtgagagctcttgagtcaagagtggcagaagtggctctaattggggtgagagtgtagtccctgggcttgccctgggttgaccctggtggcatatttccttggccgaggatggaagatttggagaatcatgtccatgctggcccaggacccagccatctggcccaaaggcacaagctcctggccctgttgagttgagagtttccaagaagcatccagaagatcccaagggagagaaggaaaatggctgataatgattgtcttcctaatatgcaagttctcacttcctacttccagcatcggccttcctggccttgtcttttttttgtttccctggagtataatgggaagttgcatgctgcctcctgggttttatcccagatagctctggctttcttgctgcccacaggggcctggggcaggaaggagacttgctgagatgccatggagtgcccatctggtcactggcagtctgggcaggttgcccctttctgggtttgtggtgacggaggggaggccgagaggcacagaccaagtccccgggtggctgcaggcagctccagcccggtcctgaggatcctcctcaccatggtcacgtgccttagtaactgtgcccaggaagtggcctgctgcttgctgtgctgctgcttttcctacttctgcccttccctgccacccctcgcatgtcacagctgacaagcaattccttgtcttccctggccccctgggggaagggctgagaaacagtccatgtgcaccccaaccttaatggcctgaggtgggcagaggggtgtggagcagcctggagtacagggccctgggggaggagcccactgatgaggggcgctctcccatagccatgtgttgaatgctaactaggctggggtggacgaactctgccaactgctgtcatcttagaagatagatgcagcagtaaggaatgtttgttttgcttttttctgaaattttctgaagcactgtggctgggaaacttcgaagcggaccctgtgctgcatgtctgctcctcccctgagcctgtctgcttgggggtggtaaaaataaaaatcccagtttattttcagtaccttacctaacagggttggctccaggcgtgggtggcctagaagatgaggggagtggtcttctcccagccttttaccctcttgcctcctgcctccgcgcttacacacgcactttaccacccggtcattccctggcctcttgctgccacttgtagtcttccttccttcctctcagggtaagggcagtgcctgctgtgcctgttggccactcccacacttcccctcccccaggagccctcatctgctgtgctgagtccaggaaagcatagttaggtagggagctggttggagaaggtgctagaactagaaggcagatgagactagcatgggcccacctggagggctgtccctaatggccccagtcgccttacctcacccacagcagtgcccttgtcttcctccaaaacagaaagcagtgacaaaagggggaggggtggtaatctgaagtctcactgctgagccttcagcttttatttttcactgtttcaaaacccgcattctattctagaatggtttttaaaatggaagatcttacctttttctatcttgttactctggggttttgtccccctaagagattgcactttttgtttggggtttattcagctgcatagatgaccagcttgatccctggtgaaatgaaaagccttccttctcctgaagcctctttccgccctgccctccactaacaacactgaggagcacaagcccaggcttgcccacctggtaggaaaggaagaaattagaacaatgggagccttggctcccctctcgtctcctcccctccttcttgtcactggctttgatgaggcccacttcccagaggctcctgggcctgtgagtgcaggagctcattctcccctcactgctgaagtctgtgacagcttcttcctccagttatgtctttcttccaaagcaatttcttaaccatcagccatgtgctgctatttctagggcttctgggctttgtcccttactgagagattagggactccacagctgccttgaggtagggcctggctgagagacaagggtagcagcaggtggcaggctgttaaaagacaggctgcctgaggagcctggagcaggtggaaacaggtggaagaaaccggccacagccctgctttaccgggctcacctctagggcattccagcaagaggctgatgcaggagaatggccagcaccaaaggacatttaaaagagtttttgggtttttttgtttgtttgttgttggtgtttgtttttttttttttttttttggcacacttgagctgactcagtgcaggtttaatatcctggtgacttgcagtcacattctaatgactttcaagggccagaatatggtgaaaatcacttaaaatatccgtcccttccatgccttagtttagcaggtaggctctatcttttgccatttctgtattttatgtgctgtgttcccgtttcactgggtatgaactgtgaaatggactgaatcctggccactttatgagtttgtttggttttataaggcatttcaatgtacattctataaatacaagcactccatttgcaaacagatcttaagctaatattttctttcccattcatcttgccctccccctcctcccgccagctttaaagttcagtggagaagccagatggcaattcagacaaaggtatactcttcctgcttcatgggtggtggcacgggaatagatagcccttagccctttccctcccagtcccagctgagccctcagaccacttgcttcccacataacaatgtcgcctccatttccgaggaacatccttgcgtagagaatgaaatatgctgcaatcatttctgcatccttactcctcacccccaaagaaaaaaaaaaggcctagcagggaagcagcatgcaggcttcacagcttaatgccaaggacagcgagtgaggctgggagcttctcttgggcctgctgggtctgtcagctctcggaatagggacagtccttactggtgccccaaggtgggacttggagaatattttgcttggcatatgtttggtctgaatggtgtagttgctggttccctagagaggaaaaggtggcaggcccagctttgctgggaaatggctcttaatttccagttgaaaccctagtagaattgtgaatgaaaacctcaaggttgagcccctctgccaagcagcagagctagtagaaggggatgcaggggcaaagcactcagttgccaagcaaggaggagagatgtacgtgggctgtgtggcagtccccacaccctgccctggcttcttcaggttatcgcaccactatggaatcctttgcagaatggtactcatataatggtttaaaacaacacattcataattgactctgtgcaggatgtcactcaatcagtttgggtttgctttattttattttatatatatattttttggtatcctgtacattgcagtgggtgtgaagatagtattttaatatttgtacaaagtttaatttaattttaattgttctatgtatataactgcatttctaaataattaaaaaaaagttcttatgaaggcaaaaaaaaaaaaaaaaaaaaaaaaaaaaaaaaaaataaaaaaaaaaaaaaaaaaaaaaaaaaaaaaaaaaaaaataataaaaataaaaattaaaaaataaaaaaaaataatataaaaatggttaaaaaaaaaaaaaatatataaaaaaaaaaaatttttgggccctttgtgccacatgttctttatatctcgacaatttttttttttggcgcccaaattttgctcctctttgggaaaatcccccctatggggggggttataaaaaaataaggtggcgctttttaaacacactggggttgtgggagggcc

SEQ ID NO: 313503 - DNA, 5348 bp, Homo sapiens
tctccgaagccggcgaccgccccacctcctccctccctcccgcccgcttcctctgcccacagcgccggccagagcgagctagacaagggcacgcggggcctcgcctagacccgagaagactgcgggcgcgcgcaagcggcggcgtggaagctgtgagcgcccccatcccggaggtctccgccggctcccgggtgaatcagctcccggccgactttaggattcttctggattttaaattttttctttttaaaaaaacttggacggataaaagatgtgccatggcaggatagcaccaaagagcacctcagtgtttgccgtggcctccgtgggacatggagtgttccttccgctagtgatcctttgcaccctgcttggagacggacttgcttccgtgtgccccctaccaccggagccagagaatggtggctacatctgccacccccggccctgcagagaccccctgacagcaggcagtgtcatcgaatacctgtgtgctgaaggctacatgttgaagggcgattacaaatacctgacgtgtaagaatggcgagtggaaaccagccatggagattagctgccgtctcaacgaggataaagacacccacacatcacttggggtccccacgctgtctatagtggcttctactgccagctccgtggcgctcattctcctcctcgtggtgctgtttgtgctgctgcagccaaagctgaagtctttccatcatagcaggcgtgaccagggggtatctggggaccaggtctccatcatggtggatggagtccaggttgcactaccatcatacgaggaggctgtatatggcagttctggtcactgtgtgccacctgctgaccccagagtacagattgtgctgtcagaagggtctgggcccagtgggaggagcgtgccaagggagcaacagctgccggaccaaggggcctgctcctctgcaggtggagaagatgaggccccaggccagtctggactatgtgaagcctggggctctcgggcctcagagactgtgatggtgcatcaggcaaccacctcttcctgggtggccggctcagggaaccgccaactggcacacaaagaaactgcagattcagagaacagtgacatacaaagccttttatccctcacgtcagaggagtacacagatgatattccactgttgaaagaagcatgagggcagcggccagcctttcctctctgcgaggttctctcagcccttcctccctctccctgtgggattgagcaccctgtactctccagccaccttacctggatacctgagctgccacctgtgtatctgtgtatctctgagggccctataggcccaccttgctggaaactcaaggaagattctcgccatctgcctgttggacagctggaggagctggctctttgcctggccccgccttcccatctgtcagagacatatttgaatgtgctggatcaaaccctcccttttcctaagcctctgggtcccctccagccagctctttggcggcagcccccaccagctcctgtgggcctgagtgctgctgtgtttacttgtgcctttcccccaccctgtccagtttccctgtcatgcagacttgttgctgtccacaagccttagtggctgcactgctgccccctgccacacagggggccgggcctgggtctgtcctgtttcctttgagggttgcccctactgccctttgcaggaacagatccaggtgtgagagctcttgagtcaagagtggcagaagtggctctaattggggtgagagtgtagtccctgggcttgccctgggttgaccctggtggcatatttccttggccgaggatggaagatttggagaatcatgtccatgctggcccaggacccagccatctggcccaaaggcacaagctcctggccctgttgagttgagagtttccaagaagcatccagaagatcccaagggagagaaggaaaatggctgataatgattgtcttcctaatatgcaagttctcacttcctacttccagcatcggccttcctggccttgtcttttttttgtttccctggagtataatgggaagttgcatgctgcctcctgggttttatcccagatagctctggctttcttgctgcccacaggggcctggggcaggaaggagacttgctgagatgccatggagtgcccatctggtcactggcagtctgggcaggttgcccctttctgggtttgtggtgacggaggggaggccgagaggcacagaccaagtccccgggtggctgcaggcagctccagcccggtcctgaggatcctcctcaccatggtcacgtgccttagtaactgtgcccaggaagtggcctgctgcttgctgtgctgctgcttttcctacttctgcccttccctgccacccctcgcatgtcacagctgacaagcaattccttgtcttccctggccccctgggggaagggctgagaaacagtccatgtgcaccccaaccttaatggcctgaggtgggcagaggggtgtggagcagcctggagtacagggccctgggggaggagcccactgatgaggggcgctctcccatagccatgtgttgaatgctaactaggctggggtggacgaactctgccaactgctgtcatcttagaagatagatgcagcagtaaggaatgtttgttttgcttttttctgaaattttctgaagcactgtggctgggaaacttcgaagcggaccctgtgctgcatgtctgctcctcccctgagcctgtctgcttgggggtggtaaaaataaaaatcccagtttattttcagtaccttacctaacagggttggctccaggcgtgggtggcctagaagatgaggggagtggtcttctcccagccttttaccctcttgcctcctgcctccgcgcttacacacgcactttaccacccggtcattccctggcctcttgctgccacttgtagtcttccttccttcctctcagggtaagggcagtgcctgctgtgcctgttggccactcccacacttcccctcccccaggagccctcatctgctgtgctgagtccaggaaagcatagttaggtagggagctggttggagaaggtgctagaactagaaggcagatgagactagcatgggcccacctggagggctgtccctaatggccccagtcgccttacctcacccacagcagtgcccttgtcttcctccaaaacagaaagcagtgacaaaagggggaggggtggtaatctgaagtctcactgctgagccttcagcttttatttttcactgtttcaaaacccgcattctattctagaatggtttttaaaatggaagatcttacctttttctatcttgttactctggggttttgtccccctaagagattgcactttttgtttggggtttattcagctgcatagatgaccagcttgatccctggtgaaatgaaaagccttccttctcctgaagcctctttccgccctgccctccactaacaacactgaggagcacaagcccaggcttgcccacctggtaggaaaggaagaaattagaacaatgggagccttggctcccctctcgtctcctcccctccttcttgtcactggctttgatgaggcccacttcccagaggctcctgggcctgtgagtgcaggagctcattctcccctcactgctgaagtctgtgacagcttcttcctccagttatgtctttcttccaaagcaatttcttaaccatcagccatgtgctgctatttctagggcttctgggctttgtcccttactgagagattagggactccacagctgccttgaggtagggcctggctgagagacaagggtagcagcaggtggcaggctgttaaaagacaggctgcctgaggagcctggagcaggtggaaacaggtggaagaaaccggccacagccctgctttaccgggctcacctctagggcattccagcaagaggctgatgcaggagaatggccagcaccaaaggacatttaaaagagtttttgggtttttttgtttgtttgttgttggtgtttgtttttttttttttttttttggcacacttgagctgactcagtgcaggtttaatatcctggtgacttgcagtcacattctaatgactttcaagggccagaatatggtgaaaatcacttaaaatatccgtcccttccatgccttagtttagcaggtaggctctatcttttgccatttctgtattttatgtgctgtgttcccgtttcactgggtatgaactgtgaaatggactgaatcctggccactttatgagtttgtttggttttataaggcatttcaatgtacattctataaatacaagcactccatttgcaaacagatcttaagctaatattttctttcccattcatcttgccctccccctcctcccgccagctttaaagttcagtggagaagccagatggcaattcagacaaaggtatactcttcctgcttcatgggtggtggcacgggaatagatagcccttagccctttccctcccagtcccagctgagccctcagaccacttgcttcccacataacaatgtcgcctccatttccgaggaacatccttgcgtagagaatgaaatatgctgcaatcatttctgcatccttactcctcacccccaaagaaaaaaaaaaggcctagcagggaagcagcatgcaggcttcacagcttaatgccaaggacagcgagtgaggctgggagcttctcttgggcctgctgggtctgtcagctctcggaatagggacagtccttactggtgccccaaggtgggacttggagaatattttgcttggcatatgtttggtctgaatggtgtagttgctggttccctagagaggaaaaggtggcaggcccagctttgctgggaaatggctcttaatttccagttgaaaccctagtagaattgtgaatgaaaacctcaaggttgagcccctctgccaagcagcagagctagtagaaggggatgcaggggcaaagcactcagttgccaagcaaggaggagagatgtacgtgggctgtgtggcagtccccacaccctgccctggcttcttcaggttatcgcaccactatggaatcctttgcagaatggtactcatataatggtttaaaacaacacattcataattgactctgtgcaggatgtcactcaatcagtttgggtttgctttattttattttatatatatattttttggtatcctgtacattgcagtgggtgtgaagatagtattttaatatttgtacaaagtttaatttaattttaattgttctatgtatataactgcatttctaaataattaaaaaaaagttcttatgaaggcaa

SEQ ID NO: 313504 - DNA, 4891 bp, Homo sapiens
gtgaagagttgtcccagctcggcccgcgggggagccccgggagccgcacgtgtcctgggtcatgaaacttaatccacagcaagctccctcccgcccgcttcctctgcccacagcgccggccagagcgagctagacaagggcacgcggggcctcgcctagacccgagaagactgcgggcgcgcgcaagcggcggcgtggaagctgtgagcgcccccatcccggaggtctccgccggctcccgggtgaatcagctcccggccgactttaggattcttctggattttaaattttttctttttaaaaaaacttggacggataaaagatgtgccatggcaggatagcaccaaagagcacctcagtgtttgccgtggcctccgtgggacatggagtgttccttccgctagtgatcctttgcaccctgcttggagacggacttgcttccgtgtgccccctaccaccggagccagagaatggtggctacatctgccacccccggccctgcagagaccccctgacagcaggcagtgtcatcgaatacctgtgtgctgaaggctacatgttgaagggcgattacaaatacctgacgtgtaagaatggcgagtggaaaccagccatggagattagctgccgtctcaacgaggataaagacacccacacatcacttggggtccccacgctgtctatagtggcttctactgccagctccgtggcgctcattctcctcctcgtggtgctgtttgtgctgctgcagccaaagctgaagtctttccatcatagcaggcgtgaccagggggtatctggggaccaggtctccatcatggtggatggagtccaggttgcactaccatcatacgaggaggctgtatatggcagttctggtcactgtgtgccacctgctgaccccagagtacagattgtgctgtcagaagggtctgggcccagtgggaggagcgtgccaagggagcaacagctgccggaccaaggggcctgctcctctgcaggtggagaagatgaggccccaggccagtctggactatgtgaagcctggggctctcgggcctcagagactgtgatggtgcatcaggcaaccacctcttcctgggtggccggctcagggaaccgccaactggcacacaaagaaactgcagattcagagaacagtgacatacaaagccttttatccctcacgtcagaggagtacacagatgatattccactgttgaaagaagcatgagggcagcggccagcctttcctctctgcgaggttctctcagcccttcctccctctccctgtgggattgagcaccctgtactctccagccaccttacctggatacctgagctgccacctgtgtatctgtgtatctctgagggccctataggcccaccttgctggaaactcaaggaagattctcgccatctgcctgttggacagctggaggagctggctctttgcctggccccgccttcccatctgtcagagacatatttgaatgtgctggatcaaaccctcccttttcctaagcctctgggtcccctccagccagctctttggcggcagcccccaccagctcctgtgggcctgagtgctgctgtgtttacttgtgcctttcccccaccctgtccagtttccctgtcatgcagacttgttgctgtccacaagccttagtggctgcactgctgccccctgccacacagggggccgggcctgggtctgtcctgtttcctttgagggttgcccctactgccctttgcaggaacagatccaggtgtgagagctcttgagtcaagagtggcagaagtggctctaattggggtgagagtgtagtccctgggcttgccctgggttgaccctggtggcatatttccttggccgaggatggaagatttggagaatcatgtccatgctggcccaggacccagccatctggcccaaaggcacaagctcctggccctgttgagttgagagtttccaagaagcatccagaagatcccaagggagagaaggaaaatggctgataatgattgtcttcctaatatgcaagttctcacttcctacttccagcatcggccttcctggccttgtcttttttttgtttccctggagtataatgggaagttgcatgctgcctcctgggttttatcccagatagctctggctttcttgctgcccacaggggcctggggcaggaaggagacttgctgagatgccatggagtgcccatctggtcactggcagtctgggcaggttgcccctttctgggtttgtggtgacggaggggaggccgagaggcacagaccaagtccccgggtggctgcaggcagctccagcccggtcctgaggatcctcctcaccatggtcacgtgccttagtaactgtgcccaggaagtggcctgctgcttgctgtgctgctgcttttcctacttctgcccttccctgccacccctcgcatgtcacagctgacaagcaattccttgtcttccctggccccctgggggaagggctgagaaacagtccatgtgcaccccaaccttaatggcctgaggtgggcagaggggtgtggagcagccaggagccctcatctgctgtgctgagtccaggaaagcatagttaggtagggagctggttggagaaggtgctagaactagaaggcagatgagactagcatgggcccacctggagggctgtccctaatggccccagtcgccttacctcacccacagcagtgcccttgtcttcctccaaaacagaaagcagtgacaaaagggggaggggtggtaatctgaagtctcactgctgagccttcagcttttatttttcactgtttcaaaacccgcattctattctagaatggtttttaaaatggaagatcttacctttttctatcttgttactctggggttttgtccccctaagagattgcactttttgtttggggtttattcagctgcatagatgaccagcttgatccctggtgaaatgaaaagccttccttctcctgaagcctctttccgccctgccctccactaacaacactgaggagcacaagcccaggcttgcccacctggtaggaaaggaagaaattagaacaatgggagccttggctcccctctcgtctcctcccctccttcttgtcactggctttgatgaggcccacttcccagaggctcctgggcctgtgagtgcaggagctcattctcccctcactgctgaagtctgtgacagcttcttcctccagttatgtctttcttccaaagcaatttcttaaccatcagccatgtgctgctatttctagggcttctgggctttgtcccttactgagagattagggactccacagctgccttgaggtagggcctggctgagagacaagggtagcagcaggtggcaggctgttaaaagacaggctgcctgaggagcctggagcaggtggaaacaggtggaagaaaccggccacagccctgctttaccgggctcacctctagggcattccagcaagaggctgatgcaggagaatggccagcaccaaaggacatttaaaagagtttttgggtttttttgtttgtttgttgttggtgtttgtttttttttttttttttttggcacacttgagctgactcagtgcaggtttaatatcctggtgacttgcagtcacattctaatgactttcaagggccagaatatggtgaaaatcacttaaaatatccgtcccttccatgccttagtttagcaggtaggctctatcttttgccatttctgtattttatgtgctgtgttcccgtttcactgggtatgaactgtgaaatggactgaatcctggccactttatgagtttgtttggttttataaggcatttcaatgtacattctataaatacaagcactccatttgcaaacagatcttaagctaatattttctttcccattcatcttgccctccccctcctcccgccagctttaaagttcagtggagaagccagatggcaattcagacaaaggtatactcttcctgcttcatgggtggtggcacgggaatagatagcccttagccctttccctcccagtcccagctgagccctcagaccacttgcttcccacataacaatgtcgcctccatttccgaggaacatccttgcgtagagaatgaaatatgctgcaatcatttctgcatccttactcctcacccccaaagaaaaaaaaaaggcctagcagggaagcagcatgcaggcttcacagcttaatgccaaggacagcgagtgaggctgggagcttctcttgggcctgctgggtctgtcagctctcggaatagggacagtccttactggtgccccaaggtgggacttggagaatattttgcttggcatatgtttggtctgaatggtgtagttgctggttccctagagaggaaaaggtggcaggcccagctttgctgggaaatggctcttaatttccagttgaaaccctagtagaattgtgaatgaaaacctcaaggttgagcccctctgccaagcagcagagctagtagaaggggatgcaggggcaaagcactcagttgccaagcaaggaggagagatgtacgtgggctgtgtggcagtccccacaccctgccctggcttcttcaggttatcgcaccactatggaatcctttgcagaatggtactcatataatggtttaaaacaacacattcataattgactctgtgcaggatgtcactcaatcagtttgggtttgctttattttattttatatatatattttttggtatcctgtacattgcagtgggtgtgaagatagtattttaatatttgtacaaagtttaatttaattttaattgttctatgtatataactgcatttctaaataattaaaaaaaagttcttatgaaggcaa

SEQ ID NO: 313505 - DNA, 4134 bp, Homo sapiens
ggtgtcagtgggtcgcgggcctacggggcgggggcggggcggcagtgagctcggccggcaaccgagggacccgcgtccagatcttcagtgtctattggatttttccaagagaaagtttgtaaaattccttacactgtagatgtggatcagatacgatgattcagtagaagagcacatgtcaggggcagtggaggctggctgctgaaggatgaacggagaggaagaattctttgatgccgtcacagaggcaaatcagaaagtcacgggaatgattgacttagacaccagcaaaaataataggattgggaaaactggggagaggccctctcaagagaacggaattcagaaacacaggacatcgctgccggctcccatgttcagcagaagcgacttcagcgtgtggaccatcctgaagaagtgtgttggcctggagctgtccaagatcacgatgccaatcgccttcaacgagcctctgagcttcttgcagcggatcacggagtacatggagcacgtgtacctcatccacagggcctcctgccagccccagcccctggagaggatgcagtctgtggctgcttttgctgtttcggctgtggcttcccagtgggagaggaccggcaaaccatttaatccactcttgggagaaacgtatgaattaatcagggaagatttaggattcagatttatatcggaacaggtcagtcaccacccccccatcagtgcgttccactcggaaggtctcaaccatgacttcctgttccatggctccatctaccccaagctcaagttctggggcaaaagcgtggaggcggagccccgaggcaccatcaccctggagctgctcaaacataatgaagcctacacctggaccaaccccacctgctgcgtccacaacgtcatcatcgggaagctgtggatagagcagtatgggacagtggagattttaaaccacagaactggacataagtgtgtgcttcactttaaaccgtgtggattatttggaaaagaacttcacaaggtggaaggacacattcaagacaaaaacaaaaagaagctctttatgatctatggcaaatggacggaatgtttgtggggcatagatcctgtttcgtatgaatccttcaagaagcaggagaggagaggtgaccacctgagaaaggccaagctggatgaagactccgggaaggctgacagcgacgtggctgacgacgtgcctgtggcccaggagaccgtgcaggtcattcctggcagcaagctgctctggaggatcaacacccggccccccaactctgcccagatgtataatttcaccagtttcactgtgagcctcaacgagctggagacaggcatggagaagaccctgccacccacggactgccgcctgcgccctgacatccgcggcatggagaatggcaacatggatctggccagccaggagaaggagcggctggaggagaagcagagagaagcacggagggagcgggccaaggaggaggcagagtggcagacgaggtggttctacccaggcaataacccctacactgggacccccgactggttgtatgcaggggattactttgagcggaatttctccgactgcccagatatctactgagggcctggaggggcctggggcccgggaccggaggctgacgaggctggacttcctcgagtggccactgtgagcctcgtcacagcagaaaccaacttttctaacgactgagttcgcggagatagcatcatccctgatcaaggatgtaattctaattaactgttgattgccaaacatttcactctgctgtgccgtctcttcataaagcttcacttgggatcatcgtcttcattaaggtttcaacagggaaattcttcacggcgcccttttatgtggcagaaatcagctggggcttgtttagcttccagcacactctcagtcatagcatgtgtagctaaaggaagtaatgggaaggggttcatgttctctttataatgcagtggcaaaaggttctgaaagccttttaaactcgaaccagtgggggaaagatggatcttgaagctaatcctgcagagagttttatagaggccagggattgccttctaaattatgataaaacagaagtgaagagtttcagagcatcagattgagtgaaaagttgtcagattctgtattttttaacaatcttcaataatgtaaagattacttttaaaatatttaagttaaaactacttgaatagtattttgctgaagagcaagatatgcattaatcaccggttttatactgtccaaaatgaagcatccccgtgacaaaccagagtgggcagaagcatcgagagcgtgacaggaaatcccaagactgcttccgcctcagaggcgtcccggctgcgattcgctgccctgttgtcagtgaggcctggctgtcaccgcacaccgcgtccgtgtctccagggggttcctttcttctcacacgtcgcgtgtacccatagcactcttgtgtttctgtttttcccagtatgcatgtttaaaatagaagtgacaagaatcacatccggttgtgtcctgtgggagggtcagaggcagaatctacttacagtggtgtaattaaagttatttaaccaaaaataggtatgtgtccatctcagcattcacctttatcaagtgactgatttttttttcttttctttccttttttttttttttttgagacggagtttcactcttgttgcccaggctggagtgcaatggcatgatctcggctcaccgcaacctccgcctcccgggttcaagcgattctcctgcctcagcctcccaagtagctgggattacaggcacgcgccaccacgcctggctgattttgtatttttagtagacacgggttttcaccatgttggtcaggctggtctcaaactcccgacctcaagtagtctgcctgcctcaacctcccaaagtgctgggattacaggcgtgagccactgcgcctggccgtgactgattttttttcatgtagaattgtcaacacgagagatcacagtggagcactttgaaagaccgtcggttgtgtgcacgcacgcacacactcatgcacacgctgacacgcggttgcatggagtccaggttactcaggccggcacttctgagtgacaggtgccacctgcgtgtgtcttggcgtccacatcacacctgtgacggaagcacttctggaagtgaacactcgttttgaaagcttgattttgtagctttggaagctggaagcgatggtgtttggtgccgagtcctgtgtcatcctcggggcctatgagctccgtaccagccactcaaaagtgtctgaacagaaccgctccgtgactggtagctgggtctgaggattcaggattgtggcgttattcaaagaggagactttgaaattccccgatggctggaatgtggagcccaggtgcctctggtggagggtcatctgcttttccagactgtggttgtgaaccggctccttctccaagaaaggttgcaagctgagaacatccagaggtgagactcagacacattgaaagtgactgcatttagggaggtttaacgagttcttactgatcattccacttgttactggttaagataatttgcccacgggtttgtttccaagtcctcttctaggaccaggctcctggtatttcaggggctggttggctgcacagacagcccctcttctgctgtccttgaggacagacaccaaaccagaggtggaggaagaacggtaggaaggctgatggcaaaagcggctgtgtgtcgaggttattttaactttttactactttttgttactgtttctgcaaatgctaacacataaaccatgacctaacttttgtcaccttggatatctattgaatgttaaacatctctaataaagatggccaccacttaatgtgtggaaagtgatggccttctcgtgggccacgcgtttgggtgtgagtatggccttgaccaagggtcttggtgctttattcacttttagagatagggtcaccttgcccaggctcgagtgcagtggtgcagtcatagctcactgcagcctcgacatcctgggctcaagcagtcctccagcctcagcctcccaagtagctaggaccataggcacatgccaccaa

SEQ ID NO: 313506 - DNA, 1878 bp, Homo sapiens
ggtgtcagtgggtcgcgggcctacggggcgggggcggggcggcagtgagctcggccggcaaccgagggacccgcgtccagatcttcagtgtctattggatttttccaagagaaagtttgtaaaattccttacactgtagatgtggatcagatacgatgattcagtagaagagcacatgtcaggggcagtggaggctggctgctgaaggatgaacggagaggaagaattctttgatgccgtcacaggctttgattctgataactcttctggggaattttcagaggcaaatcagaaagtcacgggaatgattgacttagacaccagcaaaaataataggattgggaaaactggggagaggccctctcaagagaacggaattcagaaacacaggacatcgctgccggctcccatgttcagcagaagcgacttcagcgtgtggaccatcctgaagaagtgtgttggcctggagctgtccaagatcacgatgccaatcgccttcaacgagcctctgagcttcttgcagcggatcacggagtacatggagcacgtgtacctcatccacagggcctcctgccagccccagcccctggagaggatgcagtctgtggctgcttttgctgtttcggctgtggcttcccagtgggagaggaccggcaaaccatttaatccactcttgggagaaacgtatgaattaatcagggaagatttaggattcagatttatatcggaacaggtcagtcaccacccccccatcagtgcgttccactcggaaggtctcaaccatgacttcctgttccatggctccatctaccccaagctcaagttctggggcaaaagcgtggaggcggagccccgaggcaccatcaccctggagctgctcaaacataatgaagcctacacctggaccaaccccacctgctgcgtccacaacgtcatcatcgggaagctgtggatagagcagtatgggacagtggagattttaaaccacagaactggacataagtgtgtgcttcactttaaaccgtgtggattatttggaaaagaacttcacaaggtggaaggacacattcaagacaaaaacaaaaagaagctctttatgatctatggcaaatggacggaatgtttgtggggcatagatcctgtttcgtatgaatccttcaagaagcaggagaggagaggtgaccacctgagaaaggccaagctggatgaagactccgggaaggctgacagcgacgtggctgacgacgtgcctgtggcccaggagaccgtgcaggtcattcctggcagcaagctgctctggaggatcaacacccggccccccaactctgcccagatgtataatttcaccagtttcactgtgagcctcaacgagctggagacaggcatggagaagaccctgccacccacggactgccgcctgcgccctgacatccgcggcatggagaatggcaacatggatctggccagccaggagaaggagcggctggaggagaagcagagagaagcacggagggagcgggccaaggaggaggcagagtggcagacgaggtggttctacccaggcaataacccctacactgggacccccgactggttgtatgcaggggattactttgagcggaatttctccgactgcccagatatctactgagggcctggaggggcctggggcccgggaccggaggctgacgaggctggacttcctcgagtggccactgtgagcctcgtcacagcagaaaccaacttttctaacgactgagttcgcggagatagcatcatccctgatcaaggatgtaattctaattaactgttgattgccaaacatttcactctgctgtgccgtctcttcataaagcttcacttgggatcatcgtcttc

SEQ ID NO: 313507 - DNA, 373 bp, Homo sapiens
ggtgtcagtgggtcgcgggcctacggggcgggggcggggcggcagtgagctcggccggcaaccgagggacccgcgtccagatcttcagtgtctattggatttttccaagagaaagtttgtaaaattccttacactgtagatgtggatcagatacgatgattcagtagaagagcacatgtcaggggcagtggaggctggctgctgaaggatgaacggagaggaagaattctttgatgccgtcacaggtgagtcaaaagagaaccaactggggacgtactggaagggtgaacgtccctggattcagatgttggacctggcgtttggggtgtaaagatgctcagtaaagcagtgtgtgggtgagcgttcacgatcc

SEQ ID NO: 313508 - DNA, 4115 bp, Homo sapiens
ggtgtcagtgggtcgcgggcctacggggcgggggcggggcggcagtgagctcggccggcaaccgagggacccgcgtccagatcttcagtgtctattggatttttccaagagaaagtttgtaaaattccttacactgtagatgtggatcagatacgatgattcagtagaagagcacatgtcaggggcagtggaggctggctgctgaaggatgaacggagaggaagaattctttgatgccgtcacaggctttgattctgataactcttctggggaattttcagaggcaaatcagaaagtcacgggaatgattgacttagacaccagcaaaaataataggattgggaaaactggggagaggccctctcaagagaacggaattcagaaacacaggacatcgctgccggctcccatgttcagcagaagcgacttcagcgtgtggaccatcctgaagaagtgtgttggcctggagctgtccaagatcacgatgccaatcgccttcaacgagcctctgagcttcttgcagcggatcacggagtacatggagcacgtgtacctcatccacagggcctcctgccagccccagcccctggagaggatgcagtctgtggctgcttttgctgtttcggctgtggcttcccagtgggagaggaccggcaaaccatttaatccactcttgggagaaacgtatgaattaatcagggaagatttaggattcagatttatatcggaacaggtcagtcaccacccccccatcagtgcgttccactcggaaggtctcaaccatgacttcctgttccatggctccatctaccccaagctcaagttctggggcaaaagcgtggaggcggagccccgaggcaccatcaccctggagctgctcaaacataatgaagcctacacctggaccaaccccacctgctgcgtccacaacgtcatcatcgggaagctgtggatagagcagtatgggacagtggagattttaaaccacagaactggacataagtgtgtgcttcactttaaaccgtgtggattatttggaaaagaacttcacaaggtggaaggacacattcaagacaaaaacaaaaagaagctctttatgatctatggcaaatggacggaatgtttgtggggcatagatcctgtttcgtatgaatccttcaagaagcaggagaggagaggtgaccacctgagaaaggccaagctggatgaagactccgggaaggctgacagcgacgtggctgacgacgtgcctgtggcccaggagaccgtgcaggtcattcctggcagcaagctgctctggaggatcaacacccggccccccaactctgcccagatgtataatttcaccagtttcactgtgagcctcaacgagctggagacaggcatggagaagaccctgccacccacggactgccgcctgcgccctgacatccgcggcatggagaatggcaacatggatctggccagccaggagaaggagcggctggaggagaagcagagagaagcacggagggagcgggccaaggaggaggcagagtggcagacgaggtggttctacccaggcaataacccctacactgggacccccgactggttgtatgcaggggattactttgagcggaatttctccgactgcccagatatctactgagggcctggaggggcctggggcccgggaccggaggctgacgaggctggacttcctcgagtggccactgtgagcctcgtcacagcagaaaccaacttttctaacgactgagttcgcggagatagcatcatccctgatcaaggatgtaattctaattaactgttgattgccaaacatttcactctgctgtgccgtctcttcataaagcttcacttgggatcatcgtcttcattaaggtttcaacagggaaattcttcacggcgcccttttatgtggcagaaatcagctggggcttgtttagcttccagcacactctcagtcatagcatgtgtagctaaaggaagtaatgggaaggggttcatgttctctttataatgcagtggcaaaaggttctgaaagccttttaaactcgaaccagtgggggaaagatggatcttgaagctaatcctgcagagagttttatagaggccagggattgccttctaaattatgataaaacagaagtgaagagtttcagagcatcagattgagtgaaaagttgtcagattctgtattttttaacaatcttcaataatgtaaagattacttttaaaatatttaagttaaaactacttgaatagtattttgctgaagagcaagatatgcattaatcaccggttttatactgtccaaaatgaagcatccccgtgacaaaccagagtgggcagaagcatcgagagcgtgacaggaaatcccaagactgcttccgcctcagaggcgtcccggctgcgattcgctgccctgttgtcagtgaggcctggctgtcaccgcacaccgcgtccgtgtctccagggggttcctttcttctcacacgtcgcgtgtacccatagcactcttgtgtttctgtttttcccagtatgcatgtttaaaatagaagtgacaagaatcacatccggttgtgtcctgtgggagggtcagaggcagaatctacttacagtggtgtaattaaagttatttaaccaaaaataggtatgtgtccatctcagcattcacctttatcaagtgactgatttttttttcttttctttccttttttttttttttttgagacggagtttcactcttgttgcccaggctggagtgcaatggcatgatctcggctcaccgcaacctccgcctcccgggttcaagcgattctcctgcctcagcctcccaagtagctgggattacaggcacgcgccaccacgcctggctgattttgtatttttagtagacacgggttttcaccatgttggtcaggctggtctcaaactcccgacctcaagtagtctgcctgcctcaacctcccaaagtgctgggattacaggcgtgagccactgcgcctggccgtgactgattttttttcatgtagaattgtcaacacgagagatcacagtggagcactttgaaagaccgtcggttgtgtgcacgcacgcacacactcatgcacacgctgacacgcggttgcatggagtccaggttactcaggccggcacttctgagtgacaggtgccacctgcgtgtgtcttggcgtccacatcacacctgtgacggaagcacttctggaagtgaacactcgttttgaaagcttgattttgtagctttggaagctggaagcgatggtgtttggtgccgagtcctgtgtcatcctcggggcctatgagctccgtaccagccactcaaaagtgtctgaacagaaccgctccgtgactggtagctgggtctgaggattcaggattgtggcgttattcaaagaggagactttgaaattccccgactgtggttgtgaaccggctccttctccaagaaaggttgcaagctgagaacatccagaggtgagactcagacacattgaaagtgactgcatttagggaggtttaacgagttcttactgatcattccacttgttactggttaagataatttgcccacgggtttgtttccaagtcctcttctaggaccaggctcctggtatttcaggggctggttggctgcacagacagcccctcttctgctgtccttgaggacagacaccaaaccagaggtggaggaagaacggtaggaaggctgatggcaaaagcggctgtgtgtcgaggttattttaactttttactactttttgttactgtttctgcaaatgctaacacataaaccatgacctaacttttgtcaccttggatatctattgaatgttaaacatctctaataaagatggccaccacttaatgtgtggaaagtgatggccttctcgtgggccacgcgtttgggtgtgagtatggccttgaccaagggtcttggtgctttattcacttttagagatagggtcaccttgcccaggctcgagtgcagtggtgcagtcatagctcactgcagcctcgacatcctgggctcaagcagtcctccagcctcagcctcccaagtagctaggaccataggcacatgccaccaa

SEQ ID NO: 313509 - DNA, 4176 bp, Homo sapiens
ccccgttctctcttcaggagaggctcagccagctccttcctggtcccggcacgtctctagtggcgccgactgacagtggcccaccaatcttcagtgtctattggatttttccaagagaaagtttgtaaaattccttacactgtagatgtggatcagatacgatgattcagtagaagagcacatgtcaggggcagtggaggctggctgctgaaggatgaacggagaggaagaattctttgatgccgtcacaggctttgattctgataactcttctggggaattttcagaggcaaatcagaaagtcacgggaatgattgacttagacaccagcaaaaataataggattgggaaaactggggagaggccctctcaagagaacggaattcagaaacacaggacatcgctgccggctcccatgttcagcagaagcgacttcagcgtgtggaccatcctgaagaagtgtgttggcctggagctgtccaagatcacgatgccaatcgccttcaacgagcctctgagcttcttgcagcggatcacggagtacatggagcacgtgtacctcatccacagggcctcctgccagccccagcccctggagaggatgcagtctgtggctgcttttgctgtttcggctgtggcttcccagtgggagaggaccggcaaaccatttaatccactcttgggagaaacgtatgaattaatcagggaagatttaggattcagatttatatcggaacaggtcagtcaccacccccccatcagtgcgttccactcggaaggtctcaaccatgacttcctgttccatggctccatctaccccaagctcaagttctggggcaaaagcgtggaggcggagccccgaggcaccatcaccctggagctgctcaaacataatgaagcctacacctggaccaaccccacctgctgcgtccacaacgtcatcatcgggaagctgtggatagagcagtatgggacagtggagattttaaaccacagaactggacataagtgtgtgcttcactttaaaccgtgtggattatttggaaaagaacttcacaaggtggaaggacacattcaagacaaaaacaaaaagaagctctttatgatctatggcaaatggacggaatgtttgtggggcatagatcctgtttcgtatgaatccttcaagaagcaggagaggagaggtgaccacctgagaaaggccaagctggatgaagactccgggaaggctgacagcgacgtggctgacgacgtgcctgtggcccaggagaccgtgcaggtcattcctggcagcaagctgctctggaggatcaacacccggccccccaactctgcccagatgtataatttcaccagtttcactgtgagcctcaacgagctggagacaggcatggagaagaccctgccacccacggactgccgcctgcgccctgacatccgcggcatggagaatggcaacatggatctggccagccaggagaaggagcggctggaggagaagcagagagaagcacggagggagcgggccaaggaggaggcagagtggcagacgaggtggttctacccaggcaataacccctacactgggacccccgactggttgtatgcaggggattactttgagcggaatttctccgactgcccagatatctactgagggcctggaggggcctggggcccgggaccggaggctgacgaggctggacttcctcgagtggccactgtgagcctcgtcacagcagaaaccaacttttctaacgactgagttcgcggagatagcatcatccctgatcaaggatgtaattctaattaactgttgattgccaaacatttcactctgctgtgccgtctcttcataaagcttcacttgggatcatcgtcttcattaaggtttcaacagggaaattcttcacggcgcccttttatgtggcagaaatcagctggggcttgtttagcttccagcacactctcagtcatagcatgtgtagctaaaggaagtaatgggaaggggttcatgttctctttataatgcagtggcaaaaggttctgaaagccttttaaactcgaaccagtgggggaaagatggatcttgaagctaatcctgcagagagttttatagaggccagggattgccttctaaattatgataaaacagaagtgaagagtttcagagcatcagattgagtgaaaagttgtcagattctgtattttttaacaatcttcaataatgtaaagattacttttaaaatatttaagttaaaactacttgaatagtattttgctgaagagcaagatatgcattaatcaccggttttatactgtccaaaatgaagcatccccgtgacaaaccagagtgggcagaagcatcgagagcgtgacaggaaatcccaagactgcttccgcctcagaggcgtcccggctgcgattcgctgccctgttgtcagtgaggcctggctgtcaccgcacaccgcgtccgtgtctccagggggttcctttcttctcacacgtcgcgtgtacccatagcactcttgtgtttctgtttttcccagtatgcatgtttaaaatagaagtgacaagaatcacatccggttgtgtcctgtgggagggtcagaggcagaatctacttacagtggtgtaattaaagttatttaaccaaaaataggtatgtgtccatctcagcattcacctttatcaagtgactgatttttttttcttttctttccttttttttttttttttgagacggagtttcactcttgttgcccaggctggagtgcaatggcatgatctcggctcaccgcaacctccgcctcccgggttcaagcgattctcctgcctcagcctcccaagtagctgggattacaggcacgcgccaccacgcctggctgattttgtatttttagtagacacgggttttcaccatgttggtcaggctggtctcaaactcccgacctcaagtagtctgcctgcctcaacctcccaaagtgctgggattacaggcgtgagccactgcgcctggccgtgactgattttttttcatgtagaattgtcaacacgagagatcacagtggagcactttgaaagaccgtcggttgtgtgcacgcacgcacacactcatgcacacgctgacacgcggttgcatggagtccaggttactcaggccggcacttctgagtgacaggtgccacctgcgtgtgtcttggcgtccacatcacacctgtgacggaagcacttctggaagtgaacactcgttttgaaagcttgattttgtagctttggaagctggaagcgatggtgtttggtgccgagtcctgtgtcatcctcggggcctatgagctccgtaccagccactcaaaagtgtctgaacagaaccgctccgtgactggtagctgggtctgaggattcaggattgtggcgttattcaaagaggagactttgaaattccccgatggctggaatgtggagcccaggtgcctctggtggagggtcatctgcttttccagactgtggttgtgaaccggctccttctccaagaaaggttgcaagctgagaacatccagaggtgagactcagacacattgaaagtgactgcatttagggaggtttaacgagttcttactgatcattccacttgttactggttaagataatttgcccacgggtttgtttccaagtcctcttctaggaccaggctcctggtatttcaggggctggttggctgcacagacagcccctcttctgctgtccttgaggacagacaccaaaccagaggtggaggaagaacggtaggaaggctgatggcaaaagcggctgtgtgtcgaggttattttaactttttactactttttgttactgtttctgcaaatgctaacacataaaccatgacctaacttttgtcaccttggatatctattgaatgttaaacatctctaataaagatggccaccacttaatgtgtggaaagtgatggccttctcgtgggccacgcgtttgggtgtgagtatggccttgaccaagggtcttggtgctttattcacttttagagatagggtcaccttgcccaggctcgagtgcagtggtgcagtcatagctcactgcagcctcgacatcctgggctcaagcagtcctccagcctcagcctcccaagtagctaggaccataggcacatgccaccaa

SEQ ID NO: 313510 - DNA, 3389 bp, Homo sapiens
ttaagtgatttttagtaaattgaccgaatcatggagccgtccccacagcccatttcaaacacttccatcgccccaaaggcccaccacacccatttgcagtcaccccccgcctgccccaggggcctccaccgcgcttctcctgttacagagttaccctttccggctgtttgctgtcttgcagcagaaacctgtgtttgtttttctcacagaactggacataagtgtgtgcttcactttaaaccgtgtggattatttggaaaagaacttcacaaggtggaaggacacattcaagacaaaaacaaaaagaagctctttatgatctatggcaaatggacggaatgtttgtggggcatagatcctgtttcgtatgaatccttcaagaagcaggagaggagaggtgaccacctgagaaaggccaagctggatgaagactccgggaaggctgacagcgacgtggctgacgacgtgcctgtggcccaggagaccgtgcaggtcattcctggcagcaagctgctctggaggatcaacacccggccccccaactctgcccagatgtataatttcaccagtttcactgtgagcctcaacgagctggagacaggcatggagaagaccctgccacccacggactgccgcctgcgccctgacatccgcggcatggagaatggcaacatggatctggccagccaggagaaggagcggctggaggagaagcagagagaagcacggagggagcgggccaaggaggaggcagagtggcagacgaggtggttctacccaggcaataacccctacactgggacccccgactggttgtatgcaggggattactttgagcggaatttctccgactgcccagatatctactgagggcctggaggggcctggggcccgggaccggaggctgacgaggctggacttcctcgagtggccactgtgagcctcgtcacagcagaaaccaacttttctaacgactgagttcgcggagatagcatcatccctgatcaaggatgtaattctaattaactgttgattgccaaacatttcactctgctgtgccgtctcttcataaagcttcacttgggatcatcgtcttcattaaggtttcaacagggaaattcttcacggcgcccttttatgtggcagaaatcagctggggcttgtttagcttccagcacactctcagtcatagcatgtgtagctaaaggaagtaatgggaaggggttcatgttctctttataatgcagtggcaaaaggttctgaaagccttttaaactcgaaccagtgggggaaagatggatcttgaagctaatcctgcagagagttttatagaggccagggattgccttctaaattatgataaaacagaagtgaagagtttcagagcatcagattgagtgaaaagttgtcagattctgtattttttaacaatcttcaataatgtaaagattacttttaaaatatttaagttaaaactacttgaatagtattttgctgaagagcaagatatgcattaatcaccggttttatactgtccaaaatgaagcatccccgtgacaaaccagagtgggcagaagcatcgagagcgtgacaggaaatcccaagactgcttccgcctcagaggcgtcccggctgcgattcgctgccctgttgtcagtgaggcctggctgtcaccgcacaccgcgtccgtgtctccagggggttcctttcttctcacacgtcgcgtgtacccatagcactcttgtgtttctgtttttcccagtatgcatgtttaaaatagaagtgacaagaatcacatccggttgtgtcctgtgggagggtcagaggcagaatctacttacagtggtgtaattaaagttatttaaccaaaaataggtatgtgtccatctcagcattcacctttatcaagtgactgatttttttttcttttctttccttttttttttttttttgagacggagtttcactcttgttgcccaggctggagtgcaatggcatgatctcggctcaccgcaacctccgcctcccgggttcaagcgattctcctgcctcagcctcccaagtagctgggattacaggcacgcgccaccacgcctggctgattttgtatttttagtagacacgggttttcaccatgttggtcaggctggtctcaaactcccgacctcaagtagtctgcctgcctcaacctcccaaagtgctgggattacaggcgtgagccactgcgcctggccgtgactgattttttttcatgtagaattgtcaacacgagagatcacagtggagcactttgaaagaccgtcggttgtgtgcacgcacgcacacactcatgcacacgctgacacgcggttgcatggagtccaggttactcaggccggcacttctgagtgacaggtgccacctgcgtgtgtcttggcgtccacatcacacctgtgacggaagcacttctggaagtgaacactcgttttgaaagcttgattttgtagctttggaagctggaagcgatggtgtttggtgccgagtcctgtgtcatcctcggggcctatgagctccgtaccagccactcaaaagtgtctgaacagaaccgctccgtgactggtagctgggtctgaggattcaggattgtggcgttattcaaagaggagactttgaaattccccgatggctggaatgtggagcccaggtgcctctggtggagggtcatctgcttttccagactgtggttgtgaaccggctccttctccaagaaaggttgcaagctgagaacatccagaggtgagactcagacacattgaaagtgactgcatttagggaggtttaacgagttcttactgatcattccacttgttactggttaagataatttgcccacgggtttgtttccaagtcctcttctaggaccaggctcctggtatttcaggggctggttggctgcacagacagcccctcttctgctgtccttgaggacagacaccaaaccagaggtggaggaagaacggtaggaaggctgatggcaaaagcggctgtgtgtcgaggttattttaactttttactactttttgttactgtttctgcaaatgctaacacataaaccatgacctaacttttgtcaccttggatatctattgaatgttaaacatctctaataaagatggccaccacttaatgtgtggaaagtgatggccttctcgtgggccacgcgtttgggtgtgagtatggccttgaccaagggtcttggtgctttattcacttttagagatagggtcaccttgcccaggctcgagtgcagtggtgcagtcatagctcactgcagcctcgacatcctgggctcaagcagtcctccagcctcagcctcccaagtagctaggaccataggcacatgccaccaa

SEQ ID NO: 313511 - DNA, 2854 bp, Homo sapiens
tggtctcccgatcacagaacctgttgtctgtggcattccagccacagtgagacatgccaactagagatctaggtgcatagggggtggcggggtgcggttctaaggtctctgtctgacctaaactgtttgcttggatcctagatctggccagccaggagaaggagcggctggaggagaagcagagagaagcacggagggagcgggccaaggaggaggcagagtggcagacgaggtggttctacccaggcaataacccctacactgggacccccgactggttgtatgcaggggattactttgagcggaatttctccgactgcccagatatctactgagggcctggaggggcctggggcccgggaccggaggctgacgaggctggacttcctcgagtggccactgtgagcctcgtcacagcagaaaccaacttttctaacgactgagttcgcggagatagcatcatccctgatcaaggatgtaattctaattaactgttgattgccaaacatttcactctgctgtgccgtctcttcataaagcttcacttgggatcatcgtcttcattaaggtttcaacagggaaattcttcacggcgcccttttatgtggcagaaatcagctggggcttgtttagcttccagcacactctcagtcatagcatgtgtagctaaaggaagtaatgggaaggggttcatgttctctttataatgcagtggcaaaaggttctgaaagccttttaaactcgaaccagtgggggaaagatggatcttgaagctaatcctgcagagagttttatagaggccagggattgccttctaaattatgataaaacagaagtgaagagtttcagagcatcagattgagtgaaaagttgtcagattctgtattttttaacaatcttcaataatgtaaagattacttttaaaatatttaagttaaaactacttgaatagtattttgctgaagagcaagatatgcattaatcaccggttttatactgtccaaaatgaagcatccccgtgacaaaccagagtgggcagaagcatcgagagcgtgacaggaaatcccaagactgcttccgcctcagaggcgtcccggctgcgattcgctgccctgttgtcagtgaggcctggctgtcaccgcacaccgcgtccgtgtctccagggggttcctttcttctcacacgtcgcgtgtacccatagcactcttgtgtttctgtttttcccagtatgcatgtttaaaatagaagtgacaagaatcacatccggttgtgtcctgtgggagggtcagaggcagaatctacttacagtggtgtaattaaagttatttaaccaaaaataggtatgtgtccatctcagcattcacctttatcaagtgactgatttttttttcttttctttccttttttttttttttttgagacggagtttcactcttgttgcccaggctggagtgcaatggcatgatctcggctcaccgcaacctccgcctcccgggttcaagcgattctcctgcctcagcctcccaagtagctgggattacaggcacgcgccaccacgcctggctgattttgtatttttagtagacacgggttttcaccatgttggtcaggctggtctcaaactcccgacctcaagtagtctgcctgcctcaacctcccaaagtgctgggattacaggcgtgagccactgcgcctggccgtgactgattttttttcatgtagaattgtcaacacgagagatcacagtggagcactttgaaagaccgtcggttgtgtgcacgcacgcacacactcatgcacacgctgacacgcggttgcatggagtccaggttactcaggccggcacttctgagtgacaggtgccacctgcgtgtgtcttggcgtccacatcacacctgtgacggaagcacttctggaagtgaacactcgttttgaaagcttgattttgtagctttggaagctggaagcgatggtgtttggtgccgagtcctgtgtcatcctcggggcctatgagctccgtaccagccactcaaaagtgtctgaacagaaccgctccgtgactggtagctgggtctgaggattcaggattgtggcgttattcaaagaggagactttgaaattccccgatggctggaatgtggagcccaggtgcctctggtggagggtcatctgcttttccagactgtggttgtgaaccggctccttctccaagaaaggttgcaagctgagaacatccagaggtgagactcagacacattgaaagtgactgcatttagggaggtttaacgagttcttactgatcattccacttgttactggttaagataatttgcccacgggtttgtttccaagtcctcttctaggaccaggctcctggtatttcaggggctggttggctgcacagacagcccctcttctgctgtccttgaggacagacaccaaaccagaggtggaggaagaacggtaggaaggctgatggcaaaagcggctgtgtgtcgaggttattttaactttttactactttttgttactgtttctgcaaatgctaacacataaaccatgacctaacttttgtcaccttggatatctattgaatgttaaacatctctaataaagatggccaccacttaatgtgtggaaagtgatggccttctcgtgggccacgcgtttgggtgtgagtatggccttgaccaagggtcttggtgctttattcacttttagagatagggtcaccttgcccaggctcgagtgcagtggtgcagtcatagctcactgcagcctcgacatcctgggctcaagcagtcctccagcctcagcctcccaagtagctaggaccataggcacatgccaccaa

SEQ ID NO: 313512 - DNA, 2787 bp, Homo sapiens
agccgggcgtggtggcgggtgcctgtaatcccagctactcgggaggctgaggctggagaatcacttgaacctggatctggccagccaggagaaggagcggctggaggagaagcagagagaagcacggagggagcgggccaaggaggaggcagagtggcagacgaggtggttctacccaggcaataacccctacactgggacccccgactggttgtatgcaggggattactttgagcggaatttctccgactgcccagatatctactgagggcctggaggggcctggggcccgggaccggaggctgacgaggctggacttcctcgagtggccactgtgagcctcgtcacagcagaaaccaacttttctaacgactgagttcgcggagatagcatcatccctgatcaaggatgtaattctaattaactgttgattgccaaacatttcactctgctgtgccgtctcttcataaagcttcacttgggatcatcgtcttcattaaggtttcaacagggaaattcttcacggcgcccttttatgtggcagaaatcagctggggcttgtttagcttccagcacactctcagtcatagcatgtgtagctaaaggaagtaatgggaaggggttcatgttctctttataatgcagtggcaaaaggttctgaaagccttttaaactcgaaccagtgggggaaagatggatcttgaagctaatcctgcagagagttttatagaggccagggattgccttctaaattatgataaaacagaagtgaagagtttcagagcatcagattgagtgaaaagttgtcagattctgtattttttaacaatcttcaataatgtaaagattacttttaaaatatttaagttaaaactacttgaatagtattttgctgaagagcaagatatgcattaatcaccggttttatactgtccaaaatgaagcatccccgtgacaaaccagagtgggcagaagcatcgagagcgtgacaggaaatcccaagactgcttccgcctcagaggcgtcccggctgcgattcgctgccctgttgtcagtgaggcctggctgtcaccgcacaccgcgtccgtgtctccagggggttcctttcttctcacacgtcgcgtgtacccatagcactcttgtgtttctgtttttcccagtatgcatgtttaaaatagaagtgacaagaatcacatccggttgtgtcctgtgggagggtcagaggcagaatctacttacagtggtgtaattaaagttatttaaccaaaaataggtatgtgtccatctcagcattcacctttatcaagtgactgatttttttttcttttctttccttttttttttttttttgagacggagtttcactcttgttgcccaggctggagtgcaatggcatgatctcggctcaccgcaacctccgcctcccgggttcaagcgattctcctgcctcagcctcccaagtagctgggattacaggcacgcgccaccacgcctggctgattttgtatttttagtagacacgggttttcaccatgttggtcaggctggtctcaaactcccgacctcaagtagtctgcctgcctcaacctcccaaagtgctgggattacaggcgtgagccactgcgcctggccgtgactgattttttttcatgtagaattgtcaacacgagagatcacagtggagcactttgaaagaccgtcggttgtgtgcacgcacgcacacactcatgcacacgctgacacgcggttgcatggagtccaggttactcaggccggcacttctgagtgacaggtgccacctgcgtgtgtcttggcgtccacatcacacctgtgacggaagcacttctggaagtgaacactcgttttgaaagcttgattttgtagctttggaagctggaagcgatggtgtttggtgccgagtcctgtgtcatcctcggggcctatgagctccgtaccagccactcaaaagtgtctgaacagaaccgctccgtgactggtagctgggtctgaggattcaggattgtggcgttattcaaagaggagactttgaaattccccgatggctggaatgtggagcccaggtgcctctggtggagggtcatctgcttttccagactgtggttgtgaaccggctccttctccaagaaaggttgcaagctgagaacatccagaggtgagactcagacacattgaaagtgactgcatttagggaggtttaacgagttcttactgatcattccacttgttactggttaagataatttgcccacgggtttgtttccaagtcctcttctaggaccaggctcctggtatttcaggggctggttggctgcacagacagcccctcttctgctgtccttgaggacagacaccaaaccagaggtggaggaagaacggtaggaaggctgatggcaaaagcggctgtgtgtcgaggttattttaactttttactactttttgttactgtttctgcaaatgctaacacataaaccatgacctaacttttgtcaccttggatatctattgaatgttaaacatctctaataaagatggccaccacttaatgtgtggaaagtgatggccttctcgtgggccacgcgtttgggtgtgagtatggccttgaccaagggtcttggtgctttattcacttttagagatagggtcaccttgcccaggctcgagtgcagtggtgcagtcatagctcactgcagcctcgacatcctgggctcaagcagtcctccagcctcagcctcccaagtagctaggaccataggcacatgccaccaa

SEQ ID NO: 313513 - DNA, 792 bp, Homo sapiens
ggtgtcagtgggtcgcgggcctacggggcgggggcggggcggcagtgagctcggccggcaaccgagggacccgcgtccagatcttcagtgtctattggatttttccaagagaaagtttgtaaaattccttacactgtagatgtggatcagatacgatgattcagtagaagagcacatgtcaggggcagtggaggctggctgctgaaggatgaacggagaggaagaattctttgatgccgtcacaggctttgattctgataactcttctggggaattttcagaggcaaatcagaaagtcacgggaatgattgacttagacaccagcaaaaataataggattgggaaaactggggagaggccctctcaagagaacggaattcagaaacacaggacatcgctgccggctcccatgttcagcagaagcgacttcagcgtgtggaccatcctgaagaagtgtgttggcctggagctgtccaagatcacgatgccaatcgccatcaagccatgaaaagacacagaggaacctaaattgcacattgctgagtgaaagaagccaactgaaaaggtaatacagtgtatagttccaacttcataccattctggaaaaggcaaaattatggggacagcaaaaagatcagggattcaggggaggggattattaaggcaatgaaatgattctatctgatattgtaatggtggatgcatcatatgtacaacaccaacagtgaatgctaatgtaaacgatggactttgagatggtaacgatgcgtctaatgtacggtttaccagttc

SEQ ID NO: 313514 - DNA, 400 bp, Homo sapiens
ggtgcccaccgccctccacaagaggccatcttctccagcgcgtttcctaactgaagctgtgcctgtcccccccgtggattatttacagtctgtggctgcttttgctgtttcggctgtggcttcccagtgggagaggaccggcaaaccatttaatccactcttgggagaaacgtatgaattaatcaggtaaggggggaaaggcccatcataaatatcttgtaaatggaattccttggatgacagataagtttgattctttcactagcattgattcctctgctctgagaataaactgtttgaattaagagctcacgaaagcgtttggatgctgtaggcgagatgtttcacacacacggggtgttgtgctagcgtgccacggcgtctgagtgagtgtaaagcg

SEQ ID NO: 313515 - DNA, 2649 bp, Homo sapiens
ggtgtcagtgggtcgcgggcctacggggcgggggcggggcggcagtgagctcggccggcaaccgagggacccgcgtccagatcttcagtgtctattggatttttccaagagaaagtttgtaaaattccttacactgtagatgtggatcagatacgatgattcagtagaagagcacatgtcaggggcagtggaggctggctgctgaaggatgaacggagaggaagaattctttgatgccgtcacaggctttgattctgataactcttctggggaattttcagaggcaaatcagaaagtcacgggaatgattgacttagacaccagcaaaaataataggattgggaaaactggggagaggccctctcaagagaacggaattcagaaacacaggacatcgctgccggctcccatgttcagcagaagcgacttcagcgtgtggaccatcctgaagaagtgtgttggcctggagctgtccaagatcacgatgccaatcgccttcaacgagcctctgagcttcttgcagcggatcacggagtacatggagcacgtgtacctcatccacagggcctcctgccagccccagcccctggagaggatgcagtctgtggctgcttttgctgtttcggctgtggcttcccagtgggagaggaccggcaaaccatttaatccactcttgggagaaacgtatgaattaatcagggaagatttaggattcagatttatatcggaacaggtcagtcaccacccccccatcagtgcgttccactcggaaggtctcaaccatgacttcctgttccatggctccatctaccccaagctcaagttctggggcaaaagcgtggaggcggagccccgaggcaccatcaccctggagctgctcaaacataatgaagcctacacctggaccaaccccacctgctgcgtccacaacgtcatcatcgggaagctgtggatagagcagtatgggacagtggagattttaaaccacagaactggacataagtgtgtgcttcactttaaaccgtgtggattatttggaaaagaacttcacaaggtggaaggacacattcaagacaaaaacaaaaagaagctctttatgatctatggcaaatggacggaatgtttgtggggcatagatcctgtttcgtatgaatccttcaagaagcaggagaggagaggtgaccacctgagaaaggccaagctggatgaagactccgggaaggctgacagcgacgtggctgacgacgtgcctgtggcccaggagaccgtgcaggtcattcctggcagcaagctgctctggaggatcaacacccggccccccaactctgcccagatgtataatttcaccagtttcactgtgagcctcaacgagctggagacaggcatggagaagaccctgccacccacggactgccgcctgcgccctgacatccgcggcatggagaatggcaacatggatctggccagccaggagaaggagcggctggaggagaagcagagagaagcacggagggagcgggccaaggaggaggcagagtggcagacgaggtggttctacccaggcaataacccctacactgggacccccgactggttgtatgcaggggattactttgagcggaatttctccgactgcccagatatctactgagggcctggaggggcctggggcccgggaccggaggctgacgaggctggacttcctcgagtggccactgtgagcctcgtcacagcagaaaccaacttttctaacgactgagttcgcggagatagcatcatccctgatcaaggatgtaattctaattaactgttgattgccaaacatttcactctgctgtgccgtctcttcataaagcttcacttgggatcatcgtcttcattaaggtttcaacagggaaattcttcacggcgcccttttatgtggcagaaatcagctggggcttgtttagcttccagcacactctcagtcatagcatgtgtagctaaaggaagtaatgggaaggggttcatgttctctttataatgcagtggcaaaaggttctgaaagccttttaaactcgaaccagtgggggaaagatggatcttgaagctaatcctgcagagagttttatagaggccagggattgccttctaaattatgataaaacagaagtgaagagtttcagagcatcagattgagtgaaaagttgtcagattctgtattttttaacaatcttcaataatgtaaagattacttttaaaatatttaagttaaaactacttgaatagtattttgctgaagagcaagatatgcattaatcaccggttttatactgtccaaaatgaagcatccccgtgacaaaccagagtgggcagaagcatcgagagcgtgacaggaaatcccaagactgcttccgcctcagaggcgtcccggctgcgattcgctgccctgttgtcagtgaggcctggctgtcaccgcacaccgcgtccgtgtctccagggggttcctttcttctcacacgtcgcgtgtacccatagcactcttgtgtttctgtttttcccagtatgcatgtttaaaatagaagtgacaagaatcacatccggttgtgtcctgtgggagggtcagaggcagaatctacttacagtggtgtaattaaagttatttaacca

SEQ ID NO: 313516 - DNA, 3946 bp, Homo sapiens
ggtgtcagtgggtcgcgggcctacggggcgggggcggggcggcagtgagctcggccggcaaccgagggacccgcgtccagatcttcagtgtctattggatttttccaagagaaagtttgtaaaattccttacactgtagatgtggatcagatacgatgattcagtagaagagcacatgtcaggggcagtggaggctggctgctgaaggatgaacggagaggaagaattctttgatgccgtcacaggctttgattctgataactcttctggggaattttcagaggcaaatcagaaagtcacgggaatgattgacttagacaccagcaaaaataataggattgggaaaactggggagaggccctctcaagagaacggaattcagaaacacaggacatcgctgccggctcccatgttcagcagaagcgacttcagcgtgtggaccatcctgaagaagtgtgttggcctggagctgtccaagatcacgatgccaatcgccttcaacgagcctctgagcttcttgcagcggatcacggagtacatggagcacgtgtacctcatccacagggcctcctgccagccccagcccctggagaggatgcagtctgtggctgcttttgctgtttcggctgtggcttcccagtgggagaggaccggcaaaccatttaatccactcttgggagaaacgtatgaattaatcagggaagatttaggattcagatttatatcggaacaggtcagtcaccacccccccatcagtgcgttccactcggaaggtctcaaccatgacttcctgttccatggctccatctaccccaagctcaagttctggggcaaaagcgtggaggcggagccccgaggcaccatcaccctggagctgctcaaacataatgaagcctacacctggaccaaccccacctgctgcgtccacaacgtcatcatcgggaagctgtggatagagcagtatgggacagtggagattttaaaccacagaactggacataagtgtgtgcttcactttaaaccgtgtggattatttggaaaagaacttcacaaggtggaaggacacattcaagacaaaaacaaaaagaagctctttatgatctatggcaaatggacggaatgtttgtggggcatagatcctgtttcgtatgaatccttcaagaagcaggagaggagaggtgaccacctgagaaaggccaagctggatgaagactccgggaaggctgacagcgacgtggctgacgacgtgcctgtggcccaggagaccgtgcaggtcattcctggcagcaagctgctctggaggatcaacacccggccccccaactctgcccagatgtataatttcaccagtttcactgtgagcctcaacgagctggagacaggcatggagaagaccctgccacccacggactgccgcctgcgccctgacatccgcggcatggagaatggcaacatggatctggccagccaggagaaggagcggctggaggagaagcagagagaagcacggagggagcgggccaaggaggaggcagagtggcagacgaggtggttctacccaggcaataacccctacactgggacccccgactggttgtatgcaggggattactttgagcggaatttctccgactgcccagatatctactgagggcctggaggggcctggggcccgggaccggaggctgacgaggctggacttcctcgagtggccactgtgagcctcgtcacagcagaaaccaacttttctaacgactgagttcgcggagatagcatcatccctgatcaaggatgtaattctaattaactgttgattgccaaacatttcactctgctgtgccgtctcttcataaagcttcacttgggatcatcgtcttcattaaggtttcaacagggaaattcttcacggcgcccttttatgtggcagaaatcagctggggcttgtttagcttccagcacactctcagtcatagcatgtgtagctaaaggaagtaatgggaaggggttcatgttctctttataatgcagtggcaaaaggttctgaaagccttttaaactcgaaccagtgggggaaagatggatcttgaagctaatcctgcagagagttttatagaggccagggattgccttctaaattatgataaaacagaagtgaagagtttcagagcatcagattgagtgaaaagttgtcagattctgtattttttaacaatcttcaataatgtaaagattacttttaaaatatttaagttaaaactacttgaatagtattttgctgaagagcaagatatgcattaatcaccggttttatactgtccaaaatgaagcatccccgtgacaaaccagagtgggcagaagcatcgagagcgtgacaggaaatcccaagactgcttccgcctcagaggcgtcccggctgcgattcgctgccctgttgtcagtgaggcctggctgtcaccgcacaccgcgtccgtgtctccagggggttcctttcttctcacacgtcgcgtgtacccatagcactcttgtgtttctgtttttcccagtatgcatgtttaaaatagaagtgacaagaatcacatccggttgtgtcctgtgggagggtcagaggcagaatctacttacagtggtgtaattaaagttatttaaccaaaaataggtatgtgtccatctcagcattcacctttatcaagtgactgatttttttttcttttctttccttttttttttttttttgagacggagtttcactcttgttgcccaggctggagtgcaatggcatgatctcggctcaccgcaacctccgcctcccgggttcaagcgattctcctgcctcagcctcccaagtagctgggattacaggcacgcgccaccacgcctggctgattttgtatttttagtagacacgggttttcaccatgttggtcaggctggtctcaaactcccgacctcaagtagtctgcctgcctcaacctcccaaagtgctgggattacaggcgtgagccactgcgcctggccgtgactgattttttttcatgtagaattgtcaacacgagagatcacagtggagcactttgaaagaccgtcggttgtgtgcacgcacgcacacactcatgcacacgctgacacgcggttgcatggagtccaggttactcaggccggcacttctgagtgacaggtgccacctgcgtgtgtcttggcgtccacatcacacctgtgacggaagcacttctggaagtgaacactcgttttgaaagcttgattttgtagctttggaagctggaagcgatggtgtttggtgccgagtcctgtgtcatcctcggggcctatgagctccgtaccagccactcaaaagtgtctgaacagaaccgctccgtgactggtagctgggtctgaggattcaggattgtggcgttattcaaagaggagactttgaaattccccgatggctggaatgtggagcccaggtgcctctggtggagggtcatctgcttttccagactgtggttgtgaaccggctccttctccaagaaaggttgcaagctgagaacatccagaggtgagactcagacacattgaaagtgactgcatttagggaggtttaacgagttcttactgatcattccacttgttactggttaagataatttgcccacgggtttgtttccaagtcctcttctaggaccaggctcctggtatttcaggggctggttggctgcacagacagcccctcttctgctgtccttgaggacagacaccaaaccagaggtggaggaagaacggtaggaaggctgatggcaaaagcggctgtgtgtcgaggttattttaactttttactactttttgttactgtttctgcaaatgctaacacataaaccatgacctaacttttgtcaccttggatatctattgaatgttaaacatctctaataaagatggccaccactta

SEQ ID NO: 313517 - DNA, 3916 bp, Homo sapiens
  misc_feature (3909)..(3909): n is a, c, g, or t
  misc_feature (3912)..(3912): n is a, c, g, or t
ggtgtcagtgggtcgcgggcctacggggcgggggcggggcggcagtgagctcggccggcaaccgagggacccgcgtccagatcttcagtgtctattggatttttccaagagaaagtttgtaaaattccttacactgtagatgtggatcagatacgatgattcagtagaagagcacatgtcaggggcagtggaggctggctgctgaaggatgaacggagaggaagaattctttgatgccgtcacaggctttgattctgataactcttctggggaattttcagaggcaaatcagaaagtcacgggaatgattgacttagacaccagcaaaaataataggattgggaaaactggggagaggccctctcaagagaacggaattcagaaacacaggacatcgctgccggctcccatgttcagcagaagcgacttcagcgtgtggaccatcctgaagaagtgtgttggcctggagctgtccaagatcacgatgccaatcgccttcaacgagcctctgagcttcttgcagcggatcacggagtacatggagcacgtgtacctcatccacagggcctcctgccagccccagcccctggagaggatgcagtctgtggctgcttttgctgtttcggctgtggcttcccagtgggagaggaccggcaaaccatttaatccactcttgggagaaacgtatgaattaatcagggaagatttaggattcagatttatatcggaacaggtcagtcaccacccccccatcagtgcgttccactcggaaggtctcaaccatgacttcctgttccatggctccatctaccccaagctcaagttctggggcaaaagcgtggaggcggagccccgaggcaccatcaccctggagctgctcaaacataatgaagcctacacctggaccaaccccacctgctgcgtccacaacgtcatcatcgggaagctgtggatagagcagtatgggacagtggagattttaaaccacagaactggacataagtgtgtgcttcactttaaaccgtgtggattatttggaaaagaacttcacaaggtggaaggacacattcaagacaaaaacaaaaagaagctctttatgatctatggcaaatggacggaatgtttgtggggcatagatcctgtttcgtatgaatccttcaagaagcaggagaggagaggtgaccacctgagaaaggccaagctggatgaagactccgggaaggctgacagcgacgtggctgacgacgtgcctgtggcccaggagaccgtgcaggtcattcctggcagcaagctgctctggaggatcaacacccggccccccaactctgcccagatgtataatttcaccagtttcactgtgagcctcaacgagctggagacaggcatggagaagaccctgccacccacggactgccgcctgcgccctgacatccgcggcatggagaatggcaacatggatctggccagccaggagaaggagcggctggaggagaagcagagagaagcacggagggagcgggccaaggaggaggcagagtggcagacgaggtggttctacccaggcaataacccctacactgggacccccgactggttgtatgcaggggattactttgagcggaatttctccgactgcccagatatctactgagggcctggaggggcctggggcccgggaccggaggctgacgaggctggacttcctcgagtggccactgtgagcctcgtcacagcagaaaccaacttttctaacgactgagttcgcggagatagcatcatccctgatcaaggatgtaattctaattaactgttgattgccaaacatttcactctgctgtgccgtctcttcataaagcttcacttgggatcatcgtcttcattaaggtttcaacagggaaattcttcacggcgcccttttatgtggcagaaatcagctggggcttgtttagcttccagcacactctcagtcatagcatgtgtagctaaaggaagtaatgggaaggggttcatgttctctttataatgcagtggcaaaaggttctgaaagccttttaaactcgaaccagtgggggaaagatggatcttgaagctaatcctgcagagagttttatagaggccagggattgccttctaaattatgataaaacagaagtgaagagtttcagagcatcagattgagtgaaaagttgtcagattctgtattttttaacaatcttcaataatgtaaagattacttttaaaatatttaagttaaaactacttgaatagtattttgctgaagagcaagatatgcattaatcaccggttttatactgtccaaaatgaagcatccccgtgacaaaccagagtgggcagaagcatcgagagcgtgacaggaaatcccaagactgcttccgcctcagaggcgtcccggctgcgattcgctgccctgttgtcagtgaggcctggctgtcaccgcacaccgcgtccgtgtctccagggggttcctttcttctcacacgtcgcgtgtacccatagcactcttgtgtttctgtttttcccagtatgcatgtttaaaatagaagtgacaagaatcacatccggttgtgtcctgtgggagggtcagaggcagaatctacttacagtggtgtaattaaagttatttaaccaaaaataggtatgtgtccatctcagcattcacctttatcaagtgactgatttttttttcttttctttccttttttttttttttttgagacggagtttcactcttgttgcccaggctggagtgcaatggcatgatctcggctcaccgcaacctccgcctcccgggttcaagcgattctcctgcctcagcctcccaagtagctgggattacaggcacgcgccaccacgcctggctgattttgtatttttagtagacacgggttttcaccatgttggtcaggctggtctcaaactcccgacctcaagtagtctgcctgcctcaacctcccaaagtgctgggattacaggcgtgagccactgcgcctggccgtgactgattttttttcatgtagaattgtcaacacgagagatcacagtggagcactttgaaagaccgtcggttgtgtgcacgcacgcacacactcatgcacacgctgacacgcggttgcatggagtccaggttactcaggccggcacttctgagtgacaggtgccacctgcgtgtgtcttggcgtccacatcacacctgtgacggaagcacttctggaagtgaacactcgttttgaaagcttgattttgtagctttggaagctggaagcgatggtgtttggtgccgagtcctgtgtcatcctcggggcctatgagctccgtaccagccactcaaaagtgtctgaacagaaccgctccgtgactggtagctgggtctgaggattcaggattgtggcgttattcaaagaggagactttgaaattccccgatggctggaatgtggagcccaggtgcctctggtggagggtcatctgcttttccagactgtggttgtgaaccggctccttctccaagaaaggttgcaagctgagaacatccagaggtgagactcagacacattgaaagtgactgcatttagggaggtttaacgagttcttactgatcattccacttgttactggttaagataatttgcccacgggtttgtttccaagtcctcttctaggaccaggctcctggtatttcaggggctggttggctgcacagacagcccctcttctgctgtccttgaggacagacaccaaaccagaggtggaggaagaacggtaggaaggctgatggcaaaagcggctgtgtgtcgaggttattttaactttttactactttttgttactgtttctgcaaatgctaacacaggcccaagatgaggggatcctctagagcgaccgcaggcancanaagc

SEQ ID NO: 313518 - DNA, 3758 bp, Homo sapiens
tgcggccgctccaacatcagaatggtccacacgctgaagaagtgtgttggcctggagctgtccaagatcacgatgccaatcgccttcaacgagcctctgagcttcttgcagcggatcacggagtacatggagcacgtgtacctcatccacagggcctcctgccagccccagcccctggagaggatgcagtctgtggctgcttttgctgtttcggctgtggcttcccagtgggagaggaccggcaaaccatttaatccactcttgggagaaacgtatgaattaatcagggaagatttaggattcagatttatatcggaacaggtcagtcaccacccccccatcagtgcgttccactcggaaggtctcaaccatgacttcctgttccatggctccatctaccccaagctcaagttctggggcaaaagcgtggaggcggagccccgaggcaccatcaccctggagctgctcaaacataatgaagcctacacctggaccaaccccacctgctgcgtccacaacgtcatcatcgggaagctgtggatagagcagtatgggacagtggagattttaaaccacagaactggacataagtgtgtgcttcactttaaaccgtgtggattatttggaaaagaacttcacaaggtggaaggacacattcaagacaaaaacaaaaagaagctctttatgatctatggcaaatggacggaatgtttgtggggcatagatcctgtttcgtatgaatccttcaagaagcaggagaggagaggtgaccacctgagaaaggccaagctggatgaagactccgggaaggctgacagcgacgtggctgacgacgtgcctgtggcccaggagaccgtgcaggtcattcctggcagcaagctgctctggaggatcaacacccggccccccaactctgcccagatgtataatttcaccagtttcactgtgagcctcaacgagctggagacaggcatggagaagaccctgccacccacggactgccgcctgcgccctgacatccgcggcatggagaatggcaacatggatctggccagccaggagaaggagcggctggaggagaagcagagagaagcacggagggagcgggccaaggaggaggcagagtggcagacgaggtggttctacccaggcaataacccctacactgggacccccgactggttgtatgcaggggattactttgagcggaatttctccgactgcccagatatctactgagggcctggaggggcctggggcccgggaccggaggctgacgaggctggacttcctcgagtggccactgtgagcctcgtcacagcagaaaccaacttttctaacgactgagttcgcggagatagcatcatccctgatcaaggatgtaattctaattaactgttgattgccaaacatttcactctgctgtgccgtctcttcataaagcttcacttgggatcatcgtcttcattaaggtttcaacagggaaattcttcacggcgcccttttatgtggcagaaatcagctggggcttgtttagcttccagcacactctcagtcatagcatgtgtagctaaaggaagtaatgggaaggggttcatgttctctttataatgcagtggcaaaaggttctgaaagccttttaaactcgaaccagtgggggaaagatggatcttgaagctaatcctgcagagagttttatagaggccagggattgccttctaaattatgataaaacagaagtgaagagtttcagagcatcagattgagtgaaaagttgtcagattctgtattttttaacaatcttcaataatgtaaagattacttttaaaatatttaagttaaaactacttgaatagtattttgctgaagagcaagatatgcattaatcaccggttttatactgtccaaaatgaagcatccccgtgacaaaccagagtgggcagaagcatcgagagcgtgacaggaaatcccaagactgcttccgcctcagaggcgtcccggctgcgattcgctgccctgttgtcagtgaggcctggctgtcaccgcacaccgcgtccgtgtctccagggggttcctttcttctcacacgtcgcgtgtacccatagcactcttgtgtttctgtttttcccagtatgcatgtttaaaatagaagtgacaagaatcacatccggttgtgtcctgtgggagggtcagaggcagaatctacttacagtggtgtaattaaagttatttaaccaaaaataggtatgtgtccatctcagcattcacctttatcaagtgactgatttttttttcttttctttccttttttttttttttttgagacggagtttcactcttgttgcccaggctggagtgcaatggcatgatctcggctcaccgcaacctccgcctcccgggttcaagcgattctcctgcctcagcctcccaagtagctgggattacaggcacgcgccaccacgcctggctgattttgtatttttagtagacacgggttttcaccatgttggtcaggctggtctcaaactcccgacctcaagtagtctgcctgcctcaacctcccaaagtgctgggattacaggcgtgagccactgcgcctggccgtgactgattttttttcatgtagaattgtcaacacgagagatcacagtggagcactttgaaagaccgtcggttgtgtgcacgcacgcacacactcatgcacacgctgacacgcggttgcatggagtccaggttactcaggccggcacttctgagtgacaggtgccacctgcgtgtgtcttggcgtccacatcacacctgtgacggaagcacttctggaagtgaacactcgttttgaaagcttgattttgtagctttggaagctggaagcgatggtgtttggtgccgagtcctgtgtcatcctcggggcctatgagctccgtaccagccactcaaaagtgtctgaacagaaccgctccgtgactggtagctgggtctgaggattcaggattgtggcgttattcaaagaggagactttgaaattccccgatggctggaatgtggagcccaggtgcctctggtggagggtcatctgcttttccagactgtggttgtgaaccggctccttctccaagaaaggttgcaagctgagaacatccagaggtgagactcagacacattgaaagtgactgcatttagggaggtttaacgagttcttactgatcattccacttgttactggttaagataatttgcccacgggtttgtttccaagtcctcttctaggaccaggctcctggtatttcaggggctggttggctgcacagacagcccctcttctgctgtccttgaggacagacaccaaaccagaggtggaggaagaacggtaggaaggctgatggcaaaagcggctgtgtgtcgaggttattttaactttttactactttttgttactgtttctgcaaatgctaacacataaaccatgacctaacttttgtcaccttggatatctattgaatgttaaacatctctaataaagatggccaccacttaatgtgtggaaagtgatggccttctcgtgggccacgcgtttgggtgtgagtatggccttgaccaagggtcttggtgctttattcacttttagagatagggtcaccttgcccaggctcgagtgcagtggtgcagtcatagctcactgcagcctcgacatcctgggctcaagcagtcctccagcctcagcctcccaagtagctaggaccataggcacatgccaccaa

SEQ ID NO: 313519 - DNA, 1255 bp, Homo sapiens
ggtgtcagtgggtcgcgggcctacggggcgggggcggggcggcagtgagctcggccggcaaccgagggacccgcgtccagatcttcagtgtctattggatttttccaagagaaagtttgtaaaattccttacactgtagatgtggatcagatacgatgattcagtagaagagcacatgtcaggggcagtggaggctggctgctgaaggatgaacggagaggaagaattctttgatgccgtcacaggctttgattctgataactcttctggggaattttcagaggcaaatcagaaagtcacgggaatgattgacttagacaccagcaaaaataataggattgggaaaactggggagaggccctctcaagagaacggaattcagaaacacaggacatcgctgccggctcccatgttcagcagaagcgacttcagcgtgtggaccatcctgaagaagtgtgttggcctggagctgtccaagatcacgatgccaatcgccttcaacgagcctctgagcttcttgcagcggatcacggagtacatggagcacgtgtacctcatccacagggcctcctgccagccccagcccctggagaggatgcagtctgtggctgcttttgctgtttcggctgtggcttcccagtgggagaggaccggcaaaccatttaatccactcttgggagaaacgtatgaattaatcagggaagatttaggattcagatttatatcggaacaggtcagtcaccacccccccatcagtgcgttccactcggaaggtctcaaccatgacttcctgttccatggctccatctaccccaagctcaagttctggggcaaaagcgtggaggcggagccccgaggcaccatcaccctggagctgctcaatgtcaaccaaagacacctcagagcaaaacacaagtctccaacaaatgccggccgctaagacccgacagacacagaccggatgctggcgtcctcctgggccaccagttctgagacgtgagtcttgccaagccactgcctgcagtcttgttgtaggcagcaggtcctaacaaatacatacagaaataagtaataaacgacaccttgcctgatgaagcatttgatttgggttttgcttcacattggccctgcctggatggtggctagaaggttccacaaggacctggagaagcccctgagagtgtgtcctggggctggtatggccgagtgcctgttgtgcagtggccttgcttaattaagaggcatgcagaaatga

SEQ ID NO: 313520 - DNA, 956 bp, Homo sapiens
tcggggtcgcctttggagcagagaggaggcaatggccaccatggagaacaaggtgatctgcgccctggtcctggtgtccatgctggccctcggcaccctggccgaggcccagacagagacgtgtacagtggccccccgtgaaagacagaattgtggttttcctggtgtcacgccctcccagtgtgcaaataagggctgctgtttcgacgacaccgttcgtggggtcccctggtgcttctatcctaataccatcgacgtccctccagaagaggagtgtgaattttagacacttctgcagggatctgcctgcatcctgacgcggtgccgtccccagcacggtgattagtcccagagctcggctgccacctccaccggacacctcagacacgcttctgcagctgtgcctcggctcacaacacagattgactgctctgactttgactactcaaaattggcctaaaaattaaaagagatcgatattaagaacaaaacccttgacatgtggaacctggccaccctgacgaggaagctgaagctcaatgccagaactccctgatctgatgatcattcgactggccgagacagccagactactggatctgatgggacccagggaatgtcctcacaaggccaagtattgaggtcatcgggcaggtccttgagcaacactcaaagtccgaagatgtccccaaacaccagttgtgactcacagcggtccgacaattcaagggtgtgccccgttgattgttagaacagagttgtccccataagggcgagggggacgacagttttgtaacaaaaaacccgcccagggataagctagtgaattccggtcgcgtcgtagttgaactcatcagcgaagaccaggaatcgcgggataccacggtctggaactccaatgactcatatagtaaggttatataggacaaaatatgtatatcctgaaataccctcag

SEQ ID NO: 313521 - DNA, 452 bp, Homo sapiens
tatcgatctcttttaatttttaggccaattttgagtagtcaaagtcagagcagtcaatctgtgttgtgagccgaggcccagacagagacgtgtacagtggccccccgtgaaagacagaattgtggttttcctggtgtcacgccctcccagtgtgcaaataagggctgctgtttcgacgacaccgttcgtggggtcccctggtgcttctatcctaataccatcgacgtccctccagaagaggagtgtgaattttagacacttctgcagggatctgcctgcatcctgacgcggtgccgtccccagcacggtgattagtcccagagctcggctgccacctccaccggacacctcagacacgcttctgcagctgtgcctcggctcacaacacagattgactgctctgactttgactactcaaaattggcctaaaaattaaaagagatcgatattaa

SEQ ID NO: 313522 - DNA, 445 bp, Homo sapiens
tcggggtcgcctttggagcagagaggaggcaatggccaccatggagaacaaggtgatctgcgccctggtcctggtgtccatgctggccctcggcaccctggccgaggcccagacagagacgtgtacagtggccccccgtgaaagacagaattgtggttttcctggtgtcacgccctcccagtgtgcaaataagggctgctgtttcgacgacaccgttcgtggggtcccctggtgcttctatcctaataccatcgacgtccctccagaagaggagtgtgaattttagacacttctgcagggatctgcctgcatcctgacgcggtgccgtccccagcacggtgattagtcccagagctcggctgccacctccgggccattcaacgcctccgggccattcaacgcctccgggccattcaacgcctccggggcattcaacgcctccggg

SEQ ID NO: 313523 - DNA, 483 bp, Homo sapiens
tcggggtcgcctttggagcagagaggaggcaatggccaccatggagaacaaggtgatctgcgccctggtcctggtgtccatgctggccctcggcaccctggccgaggcccagacagagacgtgtacagtggccccccgtgaaagacagaattgtggttttcctggtgtcacgccctcccagtgtgcaaataagggctgctgtttcgacgacaccgttcgtggggtcccctggtgcttctatcctaataccatcgacgtccctccagaagaggagtgtgaattttagacacttctgcagggatctgcctgcatcctgacgcggtgccgtccccagcacggtgattagtcccagagctcggctgccacctccaccggacacctcagacacgcttctgcagctgtgcctcggctcacaacacagattgactgctctgactttgactactcaaaattggcctaaaaattaaaagagatcgatattaa

SEQ ID NO: 313524 - DNA, 448 bp, Homo sapiens
ttgtggctgattacaggaccttattcgccgacttgggactggtgtcatgctggccctcggcacctggcgaggcccagacagagacgtgtacagtggccccccgtgaaagacagaattgtggttttcctggtgtcacgccctcccagtgtgcaaataagggctgctgtttcgacgacaccgttcgtggggtcccctggtgcttctatcctaataccatcgacgtccctccagaagaggagtgtgaattttagacacttctgcagggatctgcctgcatcctgacgcggtgccgtccccagcacggtgattagtcccagagctcggctgccacctccaccggacacctcagacacgcttctgcagctgtgcctcggctcacaacacagattgactgctctgactttgactactcaaaattggcctaaaaattaaaagagatcgatattaa

SEQ ID NO: 313525 - DNA, 206 bp, Homo sapiens
aagagcttaagagtagttaagaaacttatcaaagaatcacagataacagataataaagtcagagttcacttccagatcagtctggctcccaagtacaagcctatttattaattttattttgctttattatattttttctaatcaagggaacactttcattattcccctaaaggttattatatgctggaatatattttgctaaaaaa

SEQ ID NO: 313526 - DNA, 878 bp, Homo sapiens
cggacgcgtgggtcgacccacgcgtcggggaggaggccaaggtgcaacttccttcggtcgtcccgaatccgggttcatccgacaccagccgcctccaccatgccgccgaagttcgaccccaacgagatcaaagtcgtcggtgcgtgctctggttgtggccggggctgcgggatggagcatccctcggccccgccgcgcgtgcaaagctttccccgtatggggctcttaaagccgctgcctcccagagaccttcccggtgttgcgccgccccggccaagcctcagcctttctgggccttagcttcttcacgtgtaggtggggagggaggactggaccacctgtggcggcttgggagcccgcacgccctaggtatacctgaggtgcaccggaggtgaagtcggtgccacttctgccctggcccccaagatcggccccctgggtctgtctccaaaaaaagttggtgatgacattgccaaggcaacgggtgactggaagggcctgaggattacagtgaaactgaccattcagaacagacaggcccagattgaggtggtgccttctgcctctgccctgatcatcaaagccctcaaggaaccaccaagagacagaaagaaacagaaaaacattaaacacagtgggaatatcacttttgatgagattgtcaacattgctcgacagatgcggcaccgatccttagccagagaactctctggaaccattaaagagatcctggggactgcccagtcagtgggctgtaatgttgatggccgccatcctcatgacatcatcgatgacatcaacagtggtgctgtggaatgcccagccagttaagcacaaaggaaaacatttcaataaaggatcatttgacaactggtgga

SEQ ID NO: 313527 - DNA, 162 bp, Homo sapiens
gcggccgcctactactactactactgctcgaattcaagcttctaacgatgtacggggacctcatgacatcatcgatgacatcaacagtggtgctgtggaatgcccagccagttaagcacaaaggaaaacatttcaataaaggatcatttgacaactggtgga

SEQ ID NO: 313528 - DNA, 257 bp, Homo sapiens
ttatcatcggcacctcgctattcatcggcacctcgctattcatcggcaccgatccttagccagagaactctctggaaccattaaagagatcctggggactgcccagtcagtgggctgtaatgttgatggccgccatcctcatgacatcatcgatgacatcaacagtggtgctgtggaatgcccagcccgatgaatagcgaggtgccgatgaatagcgcggtgccgatgcaatagcgaggtgccgatgaatagcgggg

SEQ ID NO: 313529 - DNA, 555 bp, Homo sapiens
gctactactactaaattccccccctacgaccaacgagatcaaagtcgtatacctgaggtgcaccggaggtgaagtcggtgccacttctgccctggcccccaagatcggccccctgggtctgtctccaaaaaaagttggtgatgacattgccaaggcaacgggtgactggaagggcctgaggattacagtgaaactgaccattcagaacagacaggcccagattgaggtggtgccttctgcctctgccctgatcatcaaagccctcaaggaaccaccaagagacagaaagaaacagaaaaacattaaacacagtgggaatatcacttttgatgagattgtcaacattgctcgacagatgcggcaccgatccttagccagagaactctctggaaccattaaagagatcctggggactgcccagtcagtgggctgtaatgttgatggccgccatcctcatgacatcatcgatgacatcaacagtggtgctgtggaatgcccagccagttaagcacaaaggaaaacatttcaataaaggatcatttgacaactggtgga

SEQ ID NO: 313530 - DNA, 505 bp, Homo sapiens
tctgtcacagtctcggatggcagcatttggcttctgtaatttgacgaagacactggccctcttggcatacaaaatggccaagcgaggattcagcttgatggcatctgtgaataagtcaatggctttctggagttcaccatcatttagggcttcaatagcagccacttttttatcatttgcctgatccatcatctcctccgttatctccgcattttcatctcccatttcttgaggagcatcagtgtctggttcaatcacaccttctttatcaatttctagatcactttcctcacttgatggttcgtctgcctttaagtcttcctccaccttcttactatcaggtttttcttccttggtattttcttctgatttagctttctgagtagcaggtggtactttaccctcatgacatcatcgatgacatcaacagtggtgctgtggaatgcccagccagttaagcacaaaggaaaacatttcaataaaggatcatttgacaactggtgga

SEQ ID NO: 313531 - DNA, 817 bp, Homo sapiens
tctcatttaacttttttaatgggtctcaaaattctgtgacaaatttttggtcaagttgtttccattaaaaagtactgattttaaaaactaataacttaaaactgccacacgcaaaaaagaaaaccaaagtggtccacaaaacattctcctttccttctgaaggttttacgatgcattgttatcattaaccagtcttttactactagaggccaaggtgcaacttccttcggtcgtcccgaatccgggttcatccgacaccagccgcctccaccatgccgccgaagttcgaccccaacgagatcaaagtcgtatacctgaggtgcaccggaggtgaagtcggtgccacttctgccctggcccccaagatcggccccctgggtctgtctccaaaaaaagttggtgatgacattgccaaggcaacgggtgactggaagggcctgaggattacagtgaaactgaccattcagaacagacaggcccagattgaggtggtgccttctgcctctgccctgatcatcaaagccctcaaggaaccaccaagagacagaaagaaacagaaaaacattaaacacagtgggaatatcacttttgatgagattgtcaacattgctcgacagatgcggcaccgatccttagccagagaactctctggaaccattaaagagatcctggggactgcccagtcagtgggctgtaatgttgatggccgccatcctcatgacatcatcgatgacatcaacagtggtgctgtggaatgcccagccagttaagcacaaaggaaaacatttcaataaaggatcatttgacaactggtgga

SEQ ID NO: 313532 - DNA, 1631 bp, Homo sapiens
  misc_feature (1458)..(1458): n is a, c, g, or t
ctcctaggttataaacctgttgggctcccccatttgggggggacccggggcgtatccttcatatgtccctgagtctctcctatccaaagggccctatattccccgcaggctgtatacaccgttccccgggtaactttggtttgaccgcaggttaaattaaacctgggcccacaaatcaattgcacatgctctcctggtacacaggccgggcattttttctcacttacaatacctgacgaacggcatgacctttatgacacggccgcccacaattgttgccaaacttcgaaagagtgtgcccccacctgcagattttcttgacgcacaagagtgttgagattcccccatggatacacgggagttcatggacgaggatcttcttgttggaaccttgctggccatcgtgtttgatggtaagagtttctcaccaaagccgcgaaatgtagctgaagatccaaaaaatctcaccagaaggggagggagaagagattcgattctgaggtctcctactcccgggtttctgcgtagagaaaccgactctgctggaggtcggcaaccggccacaaccgctcagcgaggccaaggtgcaacttccttcggtcgtcccgaatccgggttcatccgacaccagccgcctccaccatgccgccgaagttcgaccccaacgagatcaaagtcgtatacctgaggtgcaccggaggtgaagtcggtgccacttctgccctggcccccaagatcggccccctgggtctgtctccaaaaaaagttggtgatgacattgccaaggcaacgggtgactggaagggcctgaggattacagtgaaactgaccattcagaacagacaggcccagattgaggtggtgccttctgcctctgccctgatcatcaaagccctcaaggaaccaccaagagacagaaagaaacagaaaaacattaaacacagtgggaatatcacttttgatgagattgtcaacattgctcgacagatgcggcaccgatccttagccagagaactctctggaaccattaaagagatcctggggactgcccagtcagtgggctgtaatgttgatggccgccatcctcatgacatcatcgatgacatcaacagtggtgctgtggaatgcccagccagttaagcacaaaggaaaacatttcaataaaggatcatttgacaactggtggaaaaaaaaaacaaaagaaaaaaaaaaaaaaaacagaaaaaacaaaaacaaaacacaaagaaaaaaaaaaacaccccgggggcccaaattgggggggggggcaacaaaaggggtgaacaaacagggcccgcgggggccacaaagaggtgtccgcgcgcccccgatttgttgtagcagacggaggggggaaaagtcgcgggggggccccccaaaaagaggggacgcgcagaaacaacacttcaggcaagcgccccgggtgaccccagataaatnagccagagcgacaaggaaggccccgcgagcgacgtactcgccgccacgaagcgggcggccgaacagaggaggagcacacagcactgatcgctagaaaccctctgctacaacgaactacctgcgttgaaagaccaacgaacaacacgagccaagtggtgggacgacagcggcgc

SEQ ID NO: 313533 - DNA, 1742 bp, Homo sapiens
  misc_feature (1188)..(1188): n is a, c, g, or t
ctcctaggttataaacctgttgggctcccccatttgggggggacccggggcgtatccttcatatgtccctgagtctctcctatccaaagggccctatattccccgcaggctgtatacaccgttccccgggtaactttggtttgaccgcaggttaaattaaacctgggcccacaaatcaattgcacatgctctcctggtacacaggccgggcattttttctcacttacaatacctgacgaacggcatgacctttatgacacggccgcccacaattgttgccaaacttcgaaagagtgtgcccccacctgcagattttcttgacgcacaagagtgttgagattcccccatggatacacgggagttcatggacgaggatcttcttgttggaaccttgctggccatcgtgtttgatggtaagagtttctcaccaaagccgcgaaatgtagctgaagatccaaaaaatctcaccagaaggggagggagaagagattcgattctgaggtctcctactcccgggtttctgcgtagagaaaccgactctgctggaggtcggcaaccggccacaaccgctcagcgaggccaaggtgcaacttccttcggtcgtcccgaatccgggttcatccgacaccagccgcctccaccatgccgccgaagttcgaccccaacgagatcaaagtcgtatacctgaggtgcaccggaggtgaagtcggtgccacttctgccctggcccccaagatcggccccctgggtctgtctccaaaaaaagttggtgatgacattgccaaggcaacgggtgactggaagggcctgaggattacagtgaaactgaccattcagaacagacaggcccagattgaggtggtgccttctgcctctgccctgatcatcaaagccctcaaggaaccaccaagagacagaaagaaacagaaaaacattaaacacagtgggaatatcacttttgatgagattgtcaacattgctcgacagatgcggcaccgatccttagccagagaactctctggaaccattaaagagatcctggggactgcccagtcagtgggctgtaatgttgatggccgccatcctcatgacatcatcgatgacatcaacagtggtgctgtggaatgcccagccagttaagcacaaaggaaaacatttcaataaaggatcatttgacaactggtgganaaaaaaaaaaaaaaaaaaaaaaaaaaaaaaaaaaaaaaaaaaaaaaaaaaaaacaaaagaaaaaaaaaaaaaaaaaaaaaaagagaggggggggggcaaattattctctccggaggggggacaaattagccccaccattttttttataaaaagagaggggacgaactaatgagaggggtttattatatataaagaagagaggcagggaggggcgattgtattataaaaaggagaggtagggaggtagggggaaaagagagactgagagtgagtacatatatggagagaagagcaaacatagtatgtggagagagatgaaaaaaataaagagagagaaataaataagaatgagaaagaagaattagagaagctcagtagagagaagaaaaataataaaaaaagaggaagaaggagagagaataggaagggtggaaagaacagaaagcaacgaagagaatatatagtcgtgcgggaggaaagaagaaatagtgggacagtaggagaagatataggtgttaaggaagatagtatattaagggagaggaggtagtgtg

SEQ ID NO: 313534 - DNA, 1384 bp, Homo sapiens
ctcctaggttataaacctgttgggctcccccatttgggggggacccggggcgtatccttcatatgtccctgagtctctcctatccaaagggccctatattccccgcaggctgtatacaccgttccccgggtaactttggtttgaccgcaggttaaattaaacctgggcccacaaatcaattgcacatgctctcctggtacacaggccgggcattttttctcacttacaatacctgacgaacggcatgacctttatgacacggccgcccacaattgttgccaaacttcgaaagagtgtgcccccacctgcagattttcttgacgcacaagagtgttgagattcccccatggatacacgggagttcatggacgaggatcttcttgttggaaccttgctggccatcgtgtttgatggtaagagtttctcaccaaagccgcgaaatgtagctgaagatccaaaaaatctcaccagaaggggagggagaagagattcgattctgaggtctcctactcccgggtttctgcgtagagaaaccgactctgctggaggtcggcaaccggccacaaccgctcagcgaggccaaggtgcaacttccttcggtcgtcccgaatccgggttcatccgacaccagccgcctccaccatgccgccgaagttcgaccccaacgagatcaaagtcgtatacctgaggtgcaccggaggtgaagtcggtgccacttctgccctggcccccaagatcggccccctgggtctgtctccaaaaaaagttggtgatgacattgccaaggcaacgggtgactggaagggcctgaggattacagtgaaactgaccattcagaacagacaggcccagattgaggtggtgccttctgcctctgccctgatcatcaaagccctcaaggaaccaccaagagacagaaagaaacagaaaaacattaaacacagtgggaatatcacttttgatgagattgtcaacattgctcgacagatgcggcaccgatccttagccagagaactctctggaaccattaaagagatcctggggactgcccagtcagtgggctgtaatgttgatggccgccatcctcatgacatcatcgatgacatcaacagtggtgctgtggaatgcccagccagttaagcacaaaggaaaacatttcaataaaggatcatttgacaactggtggaaaaaaaaaaaaaaaaaccccgagtttttttttctttttcggggacaccagagtctggcttggtgccccccgggtgggggtccccgggggccccctcctcagtctccttgggaccctgggccttctcggggcacccccatttttggggccaaagccccccagaaacctcgggacacaacggggcgttcgcccccgggc

SEQ ID NO: 313535 - DNA, 1170 bp, Homo sapiens
ctcctaggttataaacctgttgggctcccccatttgggggggacccggggcgtatccttcatatgtccctgagtctctcctatccaaagggccctatattccccgcaggctgtatacaccgttccccgggtaactttggtttgaccgcaggttaaattaaacctgggcccacaaatcaattgcacatgctctcctggtacacaggccgggcattttttctcacttacaatacctgacgaacggcatgacctttatgacacggccgcccacaattgttgccaaacttcgaaagagtgtgcccccacctgcagattttcttgacgcacaagagtgttgagattcccccatggatacacgggagttcatggacgaggatcttcttgttggaaccttgctggccatcgtgtttgatggtaagagtttctcaccaaagccgcgaaatgtagctgaagatccaaaaaatctcaccagaaggggagggagaagagattcgattctgaggtctcctactcccgggtttctgcgtagagaaaccgactctgctggaggtcggcaaccggccacaaccgctcagcgaggccaaggtgcaacttccttcggtcgtcccgaatccgggttcatccgacaccagccgcctccaccatgccgccgaagttcgaccccaacgagatcaaagtcgtatacctgaggtgcaccggaggtgaagtcggtgccacttctgccctggcccccaagatcggccccctgggtctgtctccaaaaaaagttggtgatgacattgccaaggcaacgggtgactggaagggcctgaggattacagtgaaactgaccattcagaacagacaggcccagattgaggtggtgccttctgcctctgccctgatcatcaaagccctcaaggaaccaccaagagacagaaagaaacagaaaaacattaaacacagtgggaatatcacttttgatgagattgtcaacattgctcgacagatgcggcaccgatccttagccagagaactctctggaaccattaaagagatcctggggactgcccagtcagtgggctgtaatgttgatggccgccatcctcatgacatcatcgatgacatcaacagtggtgctgtggaatgcccagccttaatctgggcccagcctgctggtccggctgtttgg

SEQ ID NO: 313536 - DNA, 1314 bp, Homo sapiens
ctcctaggttataaacctgttgggctcccccatttgggggggacccggggcgtatccttcatatgtccctgagtctctcctatccaaagggccctatattccccgcaggctgtatacaccgttccccgggtaactttggtttgaccgcaggttaaattaaacctgggcccacaaatcaattgcacatgctctcctggtacacaggccgggcattttttctcacttacaatacctgacgaacggcatgacctttatgacacggccgcccacaattgttgccaaacttcgaaagagtgtgcccccacctgcagattttcttgacgcacaagagtgttgagattcccccatggatacacgggagttcatggacgaggatcttcttgttggaaccttgctggccatcgtgtttgatggtaagagtttctcaccaaagccgcgaaatgtagctgaagatccaaaaaatctcaccagaaggggagggagaagagattcgattctgaggtctcctactcccgggtttctgcgtagagaaaccgactctgctggaggtcggcaaccggccacaaccgctcagcgaggccaaggtgcaacttccttcggtcgtcccgaatccgggttcatccgacaccagccgcctccaccatgccgccgaagttcgaccccaacgagatcaaagtcgtatacctgaggtgcaccggaggtgaagtcggtgccacttctgccctggcccccaagatcggccccctgggtctgtctccaaaaaaagttggtgatgacattgccaaggcaacgggtgactggaagggcctgaggattacagtgaaactgaccattcagaacagacaggcccagattgaggtggtgccttctgcctctgccctgatcatcaaagccctcaaggaaccaccaagagacagaaagaaacagaaaaacattaaacacagtgggaatatcacttttgatgagattgtcaacattgctcgacagatgcggcaccgatccttagccagagaactctctggaaccattaaagagatcctggggactgcccagtcagtgggctgtaatgttgatggccgccatcctcatgacatcatcgatgacatcaacagtggtgctgtggaatgcccagccagttaagcacatagttcagcgtctgacgtcagacgctgaactatgtggggagcgggccgatgtccagcctcagaacttctggaactgcttcttggtgccggcagccttggtgaccttgagcacgttgaagcgcactgtcttgctcagaggccggcactcgcccactgtgacgatgtcacc

SEQ ID NO: 313537 - DNA, 1125 bp, Homo sapiens
cggacgcgtgggtcgacccacgcgtcggggaggaggccaaggtgcaacttccttcggtcgtcccgaatccgggttcatccgacaccagccgcctccaccatgccgccgaagttcgaccccaacgagatcaaagtcgtcggtgcgtgctctggttgtggccggggctgcgggatggagcatccctcggccccgccgcgcgtgcaaagctttccccgtatggggctcttaaagccgctgcctcccagagaccttcccggtgttgcgccgccccggccaagcctcagcctttctgggccttagcttcttcacgtgtaggtggggagggaggactggaccacctgtggcggcttgggagcccgcacgccctagggtaaggcttgtctccgggcgtttcgccccattggcctgggttagcgggcgacggggctctctccacgcctccccggtgtgagtttcggagctgcccacacccgagggaggagcgggtggcccgcctcgcgctctgtgctgtttcgagaagaggcagagggtggcgtgtccaaccccggaaagacgctgagagggctgtggctcggggctccctctgcacagacactaactcttcttttcccccagtatatacctgaggtgcaccggaggtgaagtcggtgccacttctgccctggcccccaagatcggccccctgggtctgtctccaaaaaaagttggtgatgacattgccaaggcaacgggtgactggaagggcctgaggattacagtgaaactgaccattcagaacagacaggcccagattgaggtggtgccttctgcctctgccctgatcatcaaagccctcaaggaaccaccaagagacagaaagaaacagaaaaacattaaacacagtgggaatatcacttttgatgagattgtcaacattgctcgacagatgcggcaccgatccttagccagagaactctctggaaccattaaagagatcctggggactgcccagtcagtgggctgtaatgttgatggccgccatcctcatgacatcatcgatgacatcaacagtggtgctgtggaatgcccagccagttaagcacaaaggaaaacatttcaataaaggatcatttgacaactggtgga

SEQ ID NO: 313538 - DNA, 2047 bp, Homo sapiens
ctcctaggttataaacctgttgggctcccccatttgggggggacccggggcgtatccttcatatgtccctgagtctctcctatccaaagggccctatattccccgcaggctgtatacaccgttccccgggtaactttggtttgaccgcaggttaaattaaacctgggcccacaaatcaattgcacatgctctcctggtacacaggccgggcattttttctcacttacaatacctgacgaacggcatgacctttatgacacggccgcccacaattgttgccaaacttcgaaagagtgtgcccccacctgcagattttcttgacgcacaagagtgttgagattcccccatggatacacgggagttcatggacgaggatcttcttgttggaaccttgctggccatcgtgtttgatggtaagagtttctcaccaaagccgcgaaatgtagctgaagatccaaaaaatctcaccagaaggggagggagaagagattcgattctgaggtctcctactcccgggtttctgcgtagagaaaccgactctgctggaggtcggcaaccggccacaaccgctcagcgaggccaaggtgcaacttccttcggtcgtcccgaatccgggttcatccgacaccagccgcctccaccatgccgccgaagttcgaccccaacgagatcaaagtcgtatacctgaggtgcaccggaggtgaagtcggtgccacttctgccctggcccccaagatcggccccctgggtctgtctccaaaaaaagttggtgatgacattgccaaggcaacgggtgactggaagggcctgaggattacagtgaaactgaccattcagaacagacaggcccagattgaggtggtgccttctgcctctgccctgatcatcaaagccctcaaggaaccaccaagagacagaaagaaacagaaaaacagtaagttgtcttttccctagtttggttttggtaatggtttgtgagatgtttgatatatgtggctgtgttttcccttaaaggaaacctggggttgacatgggtattgggtgttgatatggttagggctgctagagccaggtagtatgaaaaagtgccacgtatgctgggtggctcacacctgtaatcccagcactgggaggctgaggcgggtggatcagttgagatcaggagttcgagaccagcctggccaacatggtgaaaccccatctccaccaaaaaatacaaaattagcctggtggtgctcgcctgtagacctggctactcagacggctgaggcaggagaatcactcgaacccaggaggtggaggttgtagcagtgagccaagattgtgccactgcactccagcctgggtaacagtgagactccgtctcaaaaaaaaaaaaaaaagtgccatgtagtccctgtgtggggcaggccccaatcagtgcatgtgggaggaagatgtcagcaataatgacctataatcaggagaccacatacaggtggcaggtactgggcagtttaactccctggcaatttaagcttgtcatttctctaaaacagtttctgccatgtcagatttgtgaaggcttggttttgccctcagccacccgccactgcacctgaccaggtctctgttggctggtgcaatccagtggtgagctgatagtaaaccccagcttaggaaacagggttgttcttcatgtggatgactctgtgccgaaagcatgggaacagcctagaaatgaaatgaaggacacatgatctgctttggcttcagactttaaaagagcttttgctgtttcctcttctgcagttattaaacacagtgggaatatcacttttgatgagattgtcaacattgctcgacagatgcggcaccgatccttagccagagaactctctggaaccattaaagagatcctggggactgcccagtcagtgggctgtaatgttgatggccgccatcctcatgacatcatcgatgacatcaacagtggtgctgtggaatgcccagccagttaagcacaaaggaaaacatttcaataaaggatcatttgacaactggtgga

SEQ ID NO: 313539 - DNA, 1688 bp, Homo sapiens
ctcctaggttataaacctgttgggctcccccatttgggggggacccggggcgtatccttcatatgtccctgagtctctcctatccaaagggccctatattccccgcaggctgtatacaccgttccccgggtaactttggtttgaccgcaggttaaattaaacctgggcccacaaatcaattgcacatgctctcctggtacacaggccgggcattttttctcacttacaatacctgacgaacggcatgacctttatgacacggccgcccacaattgttgccaaacttcgaaagagtgtgcccccacctgcagattttcttgacgcacaagagtgttgagattcccccatggatacacgggagttcatggacgaggatcttcttgttggaaccttgctggccatcgtgtttgatggtaagagtttctcaccaaagccgcgaaatgtagctgaagatccaaaaaatctcaccagaaggggagggagaagagattcgattctgaggtctcctactcccgggtttctgcgtagagaaaccgactctgctggaggtcggcaaccggccacaaccgctcagcgaggccaaggtgcaacttccttcggtcgtcccgaatccgggttcatccgacaccagccgcctccaccatgccgccgaagttcgaccccaacgagatcaaagtcgtatacctgaggtgcaccggaggtgaagtcggtgccacttctgccctggcccccaagatcggccccctgggtctgtctccaaaaaaagttggtgatgacattgccaaggcaacgggtgactggaagggcctgaggattacagtgaaactgaccattcagaacagacaggcccagattgaggtggtgccttctgcctctgccctgatcatcaaagccctcaaggaaccaccaagagacagaaagaaacagaaaaacattaaacacagtgggaatatcacttttgatgagattgtcaacattgctcgacagatgcggcaccgatccttagccagagaactctctggtaagagcaggacaacatgtaaccgccataactgtagttgtgtttttcactgagtgataacattcttcttacttgaagggtgctcagtgagacccaagatggggtgcagttttctgggactgaaaggatggatcgtaaattggatgtgtttaatctgggcatcaaggacccatggaagctttgcattccgggttatggaactagatggaactctatattctatattaggggagcaggaacctcattccttccattgcctgctatgaaccccttcagtattccccagtatctgcagattgtgagggactgagccagcacctccaatgccaccatttctttacttaaaggaaccattaaagagatcctggggactgcccagtcagtgggctgtaatgttgatggccgccatcctcatgacatcatcgatgacatcaacagtggtgctgtggaatgcccagccagccgtaagtgacattttcattgttacagtaggggtgaaaggggggccacccagtgtattcacagagataagctgggaagttttggaaatggttactggtggggtgggataatccttttaaactttttactgattttttttttctttcccacagagttaagcacaaaggaaaacatttcaataaaggatcatttgacaactggtgga

SEQ ID NO: 313540 - DNA, 1466 bp, Homo sapiens
ctcctaggttataaacctgttgggctcccccatttgggggggacccggggcgtatccttcatatgtccctgagtctctcctatccaaagggccctatattccccgcaggctgtatacaccgttccccgggtaactttggtttgaccgcaggttaaattaaacctgggcccacaaatcaattgcacatgctctcctggtacacaggccgggcattttttctcacttacaatacctgacgaacggcatgacctttatgacacggccgcccacaattgttgccaaacttcgaaagagtgtgcccccacctgcagattttcttgacgcacaagagtgttgagattcccccatggatacacgggagttcatggacgaggatcttcttgttggaaccttgctggccatcgtgtttgatggtaagagtttctcaccaaagccgcgaaatgtagctgaagatccaaaaaatctcaccagaaggggagggagaagagattcgattctgaggtctcctactcccgggtttctgcgtagagaaaccgactctgctggaggtcggcaaccggccacaaccgctcagcgaggccaaggtgcaacttccttcggtcgtcccgaatccgggttcatccgacaccagccgcctccaccatgccgccgaagttcgaccccaacgagatcaaagtcgtatacctgaggtgcaccggaggtgaagtcggtgccacttctgccctggcccccaagatcggccccctgggtctgtctccaaaaaaagttggtgatgacattgccaaggcaacgggtgactggaagggcctgaggattacagtgaaactgaccattcagaacagacaggcccagattgaggtggtgccttctgcctctgccctgatcatcaaagccctcaaggaaccaccaagagacagaaagaaacagaaaaacattaaacacagtgggaatatcacttttgatgagattgtcaacattgctcgacagatgcggcaccgatccttagccagagaactctctggtaagagcaggacaacatgtaaccgccataactgtagttgtgtttttcactgagtgataacattcttcttacttgaagggtgctcagtgagacccaagatggggtgcagttttctgggactgaaaggatggatcgtaaattggatgtgtttaatctgggcatcaaggacccatggaagctttgcattccgggttatggaactagatggaactctatattctatattaggggagcaggaacctcattccttccattgcctgctatgaaccccttcagtattccccagtatctgcagattgtgagggactgagccagcacctccaatgccaccatttctttacttaaagaaccaccaagagacagaaagaaactagaaaaacattaaacacagtgggaatatcacttttgatgagacagcatatagaggatcctgctagagtcacct

SEQ ID NO: 313541 - DNA, 1923 bp, Homo sapiens
tctcatttaacttttttaatgggtctcaaaattctgtgacaaatttttggtcaagttgtttccattaaaaagtactgattttaaaaactaataacttaaaactgccacacgcaaaaaagaaaaccaaagtggtccacaaaacattctcctttccttctgaaggttttacgatgcattgttatcattaaccagtcttttactactagaggccaaggtgcaacttccttcggtcgtcccgaatccgggttcatccgacaccagccgcctccaccatgccgccgaagttcgaccccaacgagatcaaagtcgtatacctgaggtgcaccggaggtgaagtcggtgccacttctgccctggcccccaagatcggccccctgggtctgtctccaaaaaaagttggtgatgacattgccaaggcaacgggtgactggaagggcctgaggattacagtgaaactgaccattcagaacagacaggcccaggtatttgcttgtgcttggtttcgggagaggagggtggggggacaggtagcaaccctctgggattcctgaagagtatttctgccaccagtggtgagccgagagtgatttcaccttgttggggaggctttgtcaagagtacggacctagggcaaagacttggacagtgtgtggccatgatttttgagagccagcgtgcatggcagtattcactggaggtggagtattcactcaggaatctcttctgcaattgaggtggtgccttctgcctctgccctgatcatcaaagccctcaaggaaccaccaagagacagaaagaaacagaaaaacagtaagttgtcttttccctagtttggttttggtaatggtttgtgagatgtttgatatatgtggctgtgttttcccttaaaggaaacctggggttgacatgggtattgggtgttgatatggttagggctgctagagccaggtagtatgaaaaagtgccacgtatgctgggtggctcacacctgtaatcccagcactgggaggctgaggcgggtggatcagttgagatcaggagttcgagaccagcctggccaacatggtgaaaccccatctccaccaaaaaatacaaaattagcctggtggtgctcgcctgtagacctggctactcagacggctgaggcaggagaatcactcgaacccaggaggtggaggttgtagcagtgagccaagattgtgccactgcactccagcctgggtaacagtgagactccgtctcaaaaaaaaaaaaaaaagtgccatgtagtccctgtgtggggcaggccccaatcagtgcatgtgggaggaagatgtcagcaataatgacctataatcaggagaccacatacaggtggcaggtactgggcagtttaactccctggcaatttaagcttgtcatttctctaaaacagtttctgccatgtcagatttgtgaaggcttggttttgccctcagccacccgccactgcacctgaccaggtctctgttggctggtgcaatccagtggtgagctgatagtaaaccccagcttaggaaacagggttgttcttcatgtggatgactctgtgccgaaagcatgggaacagcctagaaatgaaatgaaggacacatgatctgctttggcttcagactttaaaagagcttttgctgtttcctcttctgcagttattaaacacagtgggaatatcacttttgatgagattgtcaacattgctcgacagatgcggcaccgatccttagccagagaactctctggaaccattaaagagatcctggggactgcccagtcagtgggctgtaatgttgatggccgccatcctcatgacatcatcgatgacatcaacagtggtgctgtggaatgcccagccagttaagcacaaaggaaaacatttcaataaaggatcatttgacaactggtgga

SEQ ID NO: 313542 - DNA, 3252 bp, Homo sapiens
cggacgcgtgggtcgacccacgcgtcggggaggaggccaaggtgcaacttccttcggtcgtcccgaatccgggttcatccgacaccagccgcctccaccatgccgccgaagttcgaccccaacgagatcaaagtcgtcggtgcgtgctctggttgtggccggggctgcgggatggagcatccctcggccccgccgcgcgtgcaaagctttccccgtatggggctcttaaagccgctgcctcccagagaccttcccggtgttgcgccgccccggccaagcctcagcctttctgggccttagcttcttcacgtgtaggtggggagggaggactggaccacctgtggcggcttgggagcccgcacgccctagggtaaggcttgtctccgggcgtttcgccccattggcctgggttagcgggcgacggggctctctccacgcctccccggtgtgagtttcggagctgcccacacccgagggaggagcgggtggcccgcctcgcgctctgtgctgtttcgagaagaggcagagggtggcgtgtccaaccccggaaagacgctgagagggctgtggctcggggctccctctgcacagacactaactcttcttttcccccagtatatacctgaggtgcaccggaggtgaagtcggtgccacttctgccctggcccccaagatcggccccctgggtctggtacgttatcccctccaaggggcatttttttcacatttgtttcactttaagcgccggctcgtggagtcacgcctgtgccagaggtgccctcgtggcttggactgtcaccctcagtaggcctgagccactgaactagtactaggtaccttaggaaggtcgtgtgtgaaaaatcgaacctggtgcctttaaattgtaattagctccatgtgtctccactgctgctttagtgtacctgaggggtgggcccaagggggagttttgaagttaggactggcttagagacattgggcagccaacatctgtatttcctcgtcaggaagtgggcatggcgttgttgggagattaaacggggtgtgggtgaagatccagtgagcgtttccagctgtgttgtagatgtaaacctagcagttaatgtggcaggctgtgtctcatgcctgctgagcaactgctggcttccccgtcattctgtcctcttggatttctctgaatttcattaggcctttatttaatccttgcacagtgctcccctgccccaaatgctcttccccattggtcttttttaacctgtatcttaactattcttccttggccgttagctggcacttaagggacacttagcctcctgttgaggctaaggattactagaggaggagaacttcagagtagcaaataatcagacctccatccaggaagatggacgtgggtggtctgacatgggagcctagtattttgaaagctccttaggtgattctaatgtcagcagggctgaaaatccccctccttaagcacatgggcacttaggagggggtctaggttacattgtggccaagtctgcagtttacagttctggacaagaaccccaaccccaatttatgctatggtgatagctgtgctctgattgagaaggtgcccttaggtacttgagatagcttcctttgttgccaagtgagaagtggtgggcaggtttcaaggctgtggttcacctctggacaccatgttgattacatgcctttatttctagtctccaaaaaaagttggtgatgacattgccaaggcaacgggtgactggaagggcctgaggattacagtgaaactgaccattcagaacagacaggcccaggtatttgcttgtgcttggtttcgggagaggagggtggggggacaggtagcaaccctctgggattcctgaagagtatttctgccaccagtggtgagccgagagtgatttcaccttgttggggaggctttgtcaagagtacggacctagggcaaagacttggacagtgtgtggccatgatttttgagagccagcgtgcatggcagtattcactggaggtggagtattcactcaggaatctcttctgcaattgaggtggtgccttctgcctctgccctgatcatcaaagccctcaaggaaccaccaagagacagaaagaaacagaaaaacagtaagttgtcttttccctagtttggttttggtaatggtttgtgagatgtttgatatatgtggctgtgttttcccttaaaggaaacctggggttgacatgggtattgggtgttgatatggttagggctgctagagccaggtagtatgaaaaagtgccacgtatgctgggtggctcacacctgtaatcccagcactgggaggctgaggcgggtggatcagttgagatcaggagttcgagaccagcctggccaacatggtgaaaccccatctccaccaaaaaatacaaaattagcctggtggtgctcgcctgtagacctggctactcagacggctgaggcaggagaatcactcgaacccaggaggtggaggttgtagcagtgagccaagattgtgccactgcactccagcctgggtaacagtgagactccgtctcaaaaaaaaaaaaaaaagtgccatgtagtccctgtgtggggcaggccccaatcagtgcatgtgggaggaagatgtcagcaataatgacctataatcaggagaccacatacaggtggcaggtactgggcagtttaactccctggcaatttaagcttgtcatttctctaaaacagtttctgccatgtcagatttgtgaaggcttggttttgccctcagccacccgccactgcacctgaccaggtctctgttggctggtgcaatccagtggtgagctgatagtaaaccccagcttaggaaacagggttgttcttcatgtggatgactctgtgccgaaagcatgggaacagcctagaaatgaaatgaaggacacatgatctgctttggcttcagactttaaaagagcttttgctgtttcctcttctgcagttattaaacacagtgggaatatcacttttgatgagattgtcaacattgctcgacagatgcggcaccgatccttagccagagaactctctggaaccattaaagagatcctggggactgcccagtcagtgggctgtaatgttgatggccgccatcctcatgacatcatcgatgacatcaacagtggtgctgtggaatgcccagccagttaagcacaaaggaaaacatttcaataaaggatcatttgacaactggtgga

SEQ ID NO: 313543 - DNA, 545 bp, Homo sapiens
cggacgcgtgggtcgacccacgcgtcggggaggaggccaaggtgcaacttccttcggtcgtcccgaatccgggttcatccgacaccagccgcctccaccatgccgccgaagttcgaccccaacgagatcaaagtcgtatacctgaggtgcaccggaggtgaagtcggtgccacttctgccctggcccccaagatcggccccctgggtctgattgaggtggtgccttctgcctctgccctgatcatcaaagccctcaaggaaccaccaagagacagaaagaaacagaaaaacattaaacacagtgggaatatcacttttgatgagattgtcaacattgctcgacagatgcggcaccgatccttagccagagaactctctggaaccattaaagagatcctggggactgcccagtcagtgggctgtaatgttgatggccgccatcctcatgacatcatcgatgacatcaacagtggtgctgtggaatgcccagccagttaagcacaaaggaaaacatttcaataaaggatcatttgacaactggtgga

SEQ ID NO: 313544 - DNA, 1322 bp, Homo sapiens
  misc_feature (1149)..(1149): n is a, c, g, or t
cggacgcgtgggtcgacccacgcgtcggggaggaggccaaggtgcaacttccttcggtcgtcccgaatccgggttcatccgacaccagccgcctccaccatgccgccgaagttcgaccccaacgagatcaaagtcgtcggtgcgtgctctggttgtggccggggctgcgggatggagcatccctcggccccgccgcgcgtgcaaagctttccccgtatggggctcttaaagccgctgcctcccagagaccttcccggtgttgcgccgccccggccaagcctcagcctttctgggccttagcttcttcacgtgtaggtggggagggaggactggaccacctgtggcggcttgggagcccgcacgccctaggtatacctgaggtgcaccggaggtgaagtcggtgccacttctgccctggcccccaagatcggccccctgggtctgtctccaaaaaaagttggtgatgacattgccaaggcaacgggtgactggaagggcctgaggattacagtgaaactgaccattcagaacagacaggcccagattgaggtggtgccttctgcctctgccctgatcatcaaagccctcaaggaaccaccaagagacagaaagaaacagaaaaacattaaacacagtgggaatatcacttttgatgagattgtcaacattgctcgacagatgcggcaccgatccttagccagagaactctctggaaccattaaagagatcctggggactgcccagtcagtgggctgtaatgttgatggccgccatcctcatgacatcatcgatgacatcaacagtggtgctgtggaatgcccagccagttaagcacaaaggaaaacatttcaataaaggatcatttgacaactggtggaaaaaaaaaacaaaagaaaaaaaaaaaaaaaacagaaaaaacaaaaacaaaacacaaagaaaaaaaaaaacaccccgggggcccaaattgggggggggggcaacaaaaggggtgaacaaacagggcccgcgggggccacaaagaggtgtccgcgcgcccccgatttgttgtagcagacggaggggggaaaagtcgcgggggggccccccaaaaagaggggacgcgcagaaacaacacttcaggcaagcgccccgggtgaccccagataaatnagccagagcgacaaggaaggccccgcgagcgacgtactcgccgccacgaagcgggcggccgaacagaggaggagcacacagcactgatcgctagaaaccctctgctacaacgaactacctgcgttgaaagaccaacgaacaacacgagccaagtggtgggacgacagcggcgc

SEQ ID NO: 313545 - DNA, 708 bp, Homo sapiens
tctcatttaacttttttaatgggtctcaaaattctgtgacaaatttttggtcaagttgtttccattaaaaagtactgattttaaaaactaataacttaaaactgccacacgcaaaaaagaaaaccaaagtggtccacaaaacattctcctttccttctgaaggttttacgatgcattgttatcattaaccagtcttttactactagaggccaaggtgcaacttccttcggtcgtcccgaatccgggttcatccgacaccagccgcctccaccatgccgccgaagttcgaccccaacgagatcaaagtcgtatacctgaggtgcaccggaggtgaagtcggtgccacttctgccctggcccccaagatcggccccctgggtctgtctccaaaaaaagttggtgatgacattgccaaggcaacgggtgactggaagggcctgaggattacagtgaaattaaacacagtgggaatatcacttttgatgagattgtcaacattgctcgacagatgcggcaccgatccttagccagagaactctctggaaccattaaagagatcctggggactgcccagtcagtgggctgtaatgttgatggccgccatcctcatgacatcatcgatgacatcaacagtggtgctgtggaatgcccagccagttaagcacaaaggaaaacatttcaataaaggatcatttgacaactggtgga

SEQ ID NO: 313546 - DNA, 1065 bp, Homo sapiens
cggacgcgtgggtcgacccacgcgtcggggaggaggccaaggtgcaacttccttcggtcgtcccgaatccgggttcatccgacaccagccgcctccaccatgccgccgaagttcgaccccaacgagatcaaagtcgcacttctgccctggcccccaagatcggccccctgggtctgtctccaaaaaaagttggtgatgacattgccaaggcaacgggtgactggaagggcctgaggattacagtgaaactgaccattcagaacagacaggcccagattgaggtggtgccttctgcctctgccctgatcatcaaagccctcaaggaaccaccaagagacagaaagaaacagaaaaacattaaacacagtgggaatatcacttttgatgagattgtcaacattgctcgacagatgcggcaccgatccttagccagagaactctctggaaccattaaagagatcctggggactgcccagtcagtgggctgtaatgttgatggccgccatcctcatgacatcatcgatgacatcaacagtggtgctgtggaatgcccagccagttaagcacaaaggaaaacatttcaataaaggatcatttgacaactggtggaaaaccagcacacaaaaaaccaaaaacaagcaaacaacacaacacacacaaaaacaaacaagcgcgggcgcgcccacaaaaaagttcccccccaggagggcccacagtctcaacgcacacccgctttttctcgacaccacaggggacccccacatatgaggagagcagcactaataaaaaccgacacgcgacaggcgaccgaacatataacaacacagtagagacagtgggaaaacgctggcatagcggggaaaactcgagcaaaaggacaccagacactgcacgggggagccaggccacaaagggggggcacgaaccaccgcccgacgacatattaaggccgtacagaggccgcaaatcaaacacatgcacacggccctaacaggcgcaaacacaaggccgacacagggacggaaaaaacacacgcgggcacacggaaatagatgccccgaaact

SEQ ID NO: 313547 - DNA, 1187 bp, Homo sapiens
ctcctaggttataaacctgttgggctcccccatttgggggggacccggggcgtatccttcatatgtccctgagtctctcctatccaaagggccctatattccccgcaggctgtatacaccgttccccgggtaactttggtttgaccgcaggttaaattaaacctgggcccacaaatcaattgcacatgctctcctggtacacaggccgggcattttttctcacttacaatacctgacgaacggcatgacctttatgacacggccgcccacaattgttgccaaacttcgaaagagtgtgcccccacctgcagattttcttgacgcacaagagtgttgagattcccccatggatacacgggagttcatggacgaggatcttcttgttggaaccttgctggccatcgtgtttgatggtaagagtttctcaccaaagccgcgaaatgtagctgaagatccaaaaaatctcaccagaaggggagggagaagagattcgattctgaggtctcctactcccgggtttctgcgtagagaaaccgactctgctggaggtcggcaaccggccacaaccgctcagcgaggccaaggtgcaacttccttcggtcgtcccgaatccgggttcatccgacaccagccgcctccaccatgccgccgaagttcgaccccaacgagatcaaagtcgtatacctgaggtgcaccggaggtgaagtcggtgccacttctgccctggcccccaagatcggccccctgggtctgtctccaaaaaaagttggtgatgacattgccaaggcaacgggtgactggaagggcctgaggattacagtgaaactgaccattcagaacagacaggcccagattgaggtggtgccttctgcctctgccctgatcatcaaagccctcaaggaaccaccaagagacagaaagaaacagaaaaacattaaacacagtgggaatatcacttttgatgagattgtcaacattgctcgacagatgcggcaccgatccttagccagagaactctctggaaccattaaagagatcctggggactgcccagtcagtgggctgtaatgttgatggccgccatcctcatgacatcatcgatgacatcaacagtggtgctgtggaatgcccagccagttaagcacaaaggaaaacatttcaataaaggatcatttgacaactggtgga

SEQ ID NO: 313548 - DNA, 1163 bp, Homo sapiens
  misc_feature (649)..(649): n is a, c, g, or t
cggacgcgtgggtcgacccacgcgtcggggaggaggccaaggtgcaacttccttcggtcgtcccgaatccgggttcatccgacaccagccgcctccaccatgccgccgaagttcgaccccaacgagatcaaagtcgtatacctgaggtgcaccggaggtgaagtcggtgccacttctgccctggcccccaagatcggccccctgggtctgtctccaaaaaaagttggtgatgacattgccaaggcaacgggtgactggaagggcctgaggattacagtgaaactgaccattcagaacagacaggcccagattgaggtggtgccttctgcctctgccctgatcatcaaagccctcaaggaaccaccaagagacagaaagaaacagaaaaacattaaacacagtgggaatatcacttttgatgagattgtcaacattgctcgacagatgcggcaccgatccttagccagagaactctctggaaccattaaagagatcctggggactgcccagtcagtgggctgtaatgttgatggccgccatcctcatgacatcatcgatgacatcaacagtggtgctgtggaatgcccagccagttaagcacaaaggaaaaccattttcactaaaggattcattttgacaactgggttgnacaacacacacaaaacaagcaaacaaccaaaacagcacccgcaaacaagaaacaacaaggacacacacacagaccacacaagccaacaacaaggacgcacaagaaaacacaaaacaacaaacacaaacagccacaccccacaaaaaaagacaccaagcaaaaaaacgaacagtaaacacccaacccaacctacaagcagaacacaaacacaacatcaaccagacacacctgacaaactaactcaacgcactcaacaccgaaacgaaacccaacagcagaccaccaaaacaacgaacaagagcgatacaacacccgcaaaacaccaggaacggacccaaagacacacccaacaccaacaccacacaccccaccgtcacaccctgaaaaaaacagaacgagcaagagagaccaaacacaaaataatcaaccgatgcagcataacatgacaaaccaaaacaagaaccaagaacgaaaaaagaaacacacacagaaactacaccactcaacgcaaacc

SEQ ID NO: 313549 - DNA, 1361 bp, Homo sapiens
ctcctaggttataaacctgttgggctcccccatttgggggggacccggggcgtatccttcatatgtccctgagtctctcctatccaaagggccctatattccccgcaggctgtatacaccgttccccgggtaactttggtttgaccgcaggttaaattaaacctgggcccacaaatcaattgcacatgctctcctggtacacaggccgggcattttttctcacttacaatacctgacgaacggcatgacctttatgacacggccgcccacaattgttgccaaacttcgaaagagtgtgcccccacctgcagattttcttgacgcacaagagtgttgagattcccccatggatacacgggagttcatggacgaggatcttcttgttggaaccttgctggccatcgtgtttgatggtaagagtttctcaccaaagccgcgaaatgtagctgaagatccaaaaaatctcaccagaaggggagggagaagagattcgattctgaggtctcctactcccgggtttctgcgtagagaaaccgactctgctggaggtcggcaaccggccacaaccgctcagcgaggccaaggtgcaacttccttcggtcgtcccgaatccgggttcatccgacaccagccgcctccaccatgccgccgaagttcgaccccaacgagatcaaagtcgtatacctgaggtgcaccggaggtgaagtcggtgccacttctgccctggcccccaagatcggccccctgggtctgtctccaaaaaaagttggtgatgacattgccaaggcaacgggtgactggaagggcctgaggattacagtgaaactgaccattcagaacagacaggcccagattgaggtggtgccttctgcctctgccctgatcatcaaagccctcaaggaaccaccaagagacagaaagaaacagaaaaacattaaacacagtgggaatatcacttttgatgagattgtcaacattgctcgacagatgcggcaccgatccttagccagagaactctctggaaccattaaagagatcctggggactgcccagtcagtgggctgtaatgttgatggccgccatcctcatgacatcatcgatgacatcaacagtggtgctgtggaatgcccagccagttaagcacaaaggaaaacatttcaataaaggatcatttgacaactggtggaaaaaaaaaacaaaagaaaaaaaaaaaaaaaacccgggggccctaaaggggggggggaaaaaaggcgcactgcaaggggcacgtggccaaacgggtgtctccggccccgagtttctgtggcacaaggggggaacacgggggggccccaataggggagcccggcataaatgcgaag

SEQ ID NO: 313550 - DNA, 1341 bp, Homo sapiens
ctcctaggttataaacctgttgggctcccccatttgggggggacccggggcgtatccttcatatgtccctgagtctctcctatccaaagggccctatattccccgcaggctgtatacaccgttccccgggtaactttggtttgaccgcaggttaaattaaacctgggcccacaaatcaattgcacatgctctcctggtacacaggccgggcattttttctcacttacaatacctgacgaacggcatgacctttatgacacggccgcccacaattgttgccaaacttcgaaagagtgtgcccccacctgcagattttcttgacgcacaagagtgttgagattcccccatggatacacgggagttcatggacgaggatcttcttgttggaaccttgctggccatcgtgtttgatggtaagagtttctcaccaaagccgcgaaatgtagctgaagatccaaaaaatctcaccagaaggggagggagaagagattcgattctgaggtctcctactcccgggtttctgcgtagagaaaccgactctgctggaggtcggcaaccggccacaaccgctcagcgaggccaaggtgcaacttccttcggtcgtcccgaatccgggttcatccgacaccagccgcctccaccatgccgccgaagttcgaccccaacgagatcaaagtcgtatacctgaggtgcaccggaggtgaagtcggtgccacttctgccctggcccccaagatcggccccctgggtctgtctccaaaaaaagttggtgatgacattgccaaggcaacgggtgactggaagggcctgaggattacagtgaaactgaccattcagaacagacaggcccagattgaggtggtgccttctgcctctgccctgatcatcaaagccctcaaggaaccaccaagagacagaaagaaacagaaaaacattaaacacagtgggaatatcacttttgatgagattgtcaacattgctcgacagatgcggcaccgatccttagccagagaactctctggaaccattaaagagatcctggggactgcccagtcagtgggctgtaatgttgatggccgccatcctcatgacatcatcgatgacatcaacagtggtgctgtggaatgcccagccagccgtaagtgacattttcattgttacagtaggggtgaaaggggggccacccagtgtattcacagagataagctgggaagttttggaaatggttactggtggggtgggataatccttttaaactttttactgattttttttttctttcccacagagttaagcacaaaggaaaacatttcaataaaggatcatttgacaactggtgga

SEQ ID NO: 313551 - DNA, 1177 bp, Homo sapiens
ctcctaggttataaacctgttgggctcccccatttgggggggacccggggcgtatccttcatatgtccctgagtctctcctatccaaagggccctatattccccgcaggctgtatacaccgttccccgggtaactttggtttgaccgcaggttaaattaaacctgggcccacaaatcaattgcacatgctctcctggtacacaggccgggcattttttctcacttacaatacctgacgaacggcatgacctttatgacacggccgcccacaattgttgccaaacttcgaaagagtgtgcccccacctgcagattttcttgacgcacaagagtgttgagattcccccatggatacacgggagttcatggacgaggatcttcttgttggaaccttgctggccatcgtgtttgatggtaagagtttctcaccaaagccgcgaaatgtagctgaagatccaaaaaatctcaccagaaggggagggagaagagattcgattctgaggtctcctactcccgggtttctgcgtagagaaaccgactctgctggaggtcggcaaccggccacaaccgctcagcgaggccaaggtgcaacttccttcggtcgtcccgaatccgggttcatccgacaccagccgcctccaccatgccgccgaagttcgaccccaacgagatcaaagtcgtatacctgaggtgcaccggaggtgaagtcggtgccacttctgccctggcccccaagatcggccccctgggtctgtctccaaaaaaagttggtgatgacattgccaaggcaacgggtgactggaagggcctgaggattacagtgaaactgaccattcagaacagacaggcccagattgaggtggtgccttctgcctctgccctgatcatcaaagccctcaaggaaccaccaagagacagaaagaaacagaaaaacattaaacacagtgggaatatcacttttgatgagattgtcaacattgctcgacagatgcggcaccgatccttagccagagaactctctggaaccattaaagagatcctggggactgcccagtcagtgggctgtaatgttgatggccgccatcctcatgacatcatcgatgacatcaacagtggtgctgtggaatgcccagccagttaagcaaaaatgatcctttattgaaatgttttcctttgtg

SEQ ID NO: 313552 - DNA, 1204 bp, Homo sapiens
ctcctaggttataaacctgttgggctcccccatttgggggggacccggggcgtatccttcatatgtccctgagtctctcctatccaaagggccctatattccccgcaggctgtatacaccgttccccgggtaactttggtttgaccgcaggttaaattaaacctgggcccacaaatcaattgcacatgctctcctggtacacaggccgggcattttttctcacttacaatacctgacgaacggcatgacctttatgacacggccgcccacaattgttgccaaacttcgaaagagtgtgcccccacctgcagattttcttgacgcacaagagtgttgagattcccccatggatacacgggagttcatggacgaggatcttcttgttggaaccttgctggccatcgtgtttgatggtaagagtttctcaccaaagccgcgaaatgtagctgaagatccaaaaaatctcaccagaaggggagggagaagagattcgattctgaggtctcctactcccgggtttctgcgtagagaaaccgactctgctggaggtcggcaaccggccacaaccgctcagcgaggccaaggtgcaacttccttcggtcgtcccgaatccgggttcatccgacaccagccgcctccaccatgccgccgaagttcgaccccaacgagatcaaagtcgtatacctgaggtgcaccggaggtgaagtcggtgccacttctgccctggcccccaagatcggccccctgggtctgtctccaaaaaaagttggtgatgacattgccaaggcaacgggtgactggaagggcctgaggattacagtgaaactgaccattcagaacagacaggcccagattgaggtggtgccttctgcctctgccctgatcatcaaagccctcaaggaaccaccaagagacagaaagaaacagaaaaacattaaacacagtgggaatatcacttttgatgagattgtcaacattgctcgacagatgcggcaccgatccttagccagagaactctctggaaccattaaagagatcctggggactgcccagtcagtgggctgtaatgttgatggccgccatcctcatgacatcatcgatgacatcaacagtggtgctgtggaatgcccagcccgatgaatagcgaggtgccgatgaatagcgcggtgccgatgcaatagcgaggtgccgatgaatagcgggg

SEQ ID NO: 313553 - DNA, 2548 bp, Homo sapiens
ctcctaggttataaacctgttgggctcccccatttgggggggacccggggcgtatccttcatatgtccctgagtctctcctatccaaagggccctatattccccgcaggctgtatacaccgttccccgggtaactttggtttgaccgcaggttaaattaaacctgggcccacaaatcaattgcacatgctctcctggtacacaggccgggcattttttctcacttacaatacctgacgaacggcatgacctttatgacacggccgcccacaattgttgccaaacttcgaaagagtgtgcccccacctgcagattttcttgacgcacaagagtgttgagattcccccatggatacacgggagttcatggacgaggatcttcttgttggaaccttgctggccatcgtgtttgatggtaagagtttctcaccaaagccgcgaaatgtagctgaagatccaaaaaatctcaccagaaggggagggagaagagattcgattctgaggtctcctactcccgggtttctgcgtagagaaaccgactctgctggaggtcggcaaccggccacaaccgctcagcgaggccaaggtgcaacttccttcggtcgtcccgaatccgggttcatccgacaccagccgcctccaccatgccgccgaagttcgaccccaacgagatcaaagtcgtatacctgaggtgcaccggaggtgaagtcggtgccacttctgccctggcccccaagatcggccccctgggtctgtctccaaaaaaagttggtgatgacattgccaaggcaacgggtgactggaagggcctgaggattacagtgaaactgaccattcagaacagacaggcccagattgaggtggtgccttctgcctctgccctgatcatcaaagccctcaaggaaccaccaagagacagaaagaaacagaaaaacagtaagttgtcttttccctagtttggttttggtaatggtttgtgagatgtttgatatatgtggctgtgttttcccttaaaggaaacctggggttgacatgggtattgggtgttgatatggttagggctgctagagccaggtagtatgaaaaagtgccacgtatgctgggtggctcacacctgtaatcccagcactgggaggctgaggcgggtggatcagttgagatcaggagttcgagaccagcctggccaacatggtgaaaccccatctccaccaaaaaatacaaaattagcctggtggtgctcgcctgtagacctggctactcagacggctgaggcaggagaatcactcgaacccaggaggtggaggttgtagcagtgagccaagattgtgccactgcactccagcctgggtaacagtgagactccgtctcaaaaaaaaaaaaaaaagtgccatgtagtccctgtgtggggcaggccccaatcagtgcatgtgggaggaagatgtcagcaataatgacctataatcaggagaccacatacaggtggcaggtactgggcagtttaactccctggcaatttaagcttgtcatttctctaaaacagtttctgccatgtcagatttgtgaaggcttggttttgccctcagccacccgccactgcacctgaccaggtctctgttggctggtgcaatccagtggtgagctgatagtaaaccccagcttaggaaacagggttgttcttcatgtggatgactctgtgccgaaagcatgggaacagcctagaaatgaaatgaaggacacatgatctgctttggcttcagactttaaaagagcttttgctgtttcctcttctgcagttattaaacacagtgggaatatcacttttgatgagattgtcaacattgctcgacagatgcggcaccgatccttagccagagaactctctggtaagagcaggacaacatgtaaccgccataactgtagttgtgtttttcactgagtgataacattcttcttacttgaagggtgctcagtgagacccaagatggggtgcagttttctgggactgaaaggatggatcgtaaattggatgtgtttaatctgggcatcaaggacccatggaagctttgcattccgggttatggaactagatggaactctatattctatattaggggagcaggaacctcattccttccattgcctgctatgaaccccttcagtattccccagtatctgcagattgtgagggactgagccagcacctccaatgccaccatttctttacttaaaggaaccattaaagagatcctggggactgcccagtcagtgggctgtaatgttgatggccgccatcctcatgacatcatcgatgacatcaacagtggtgctgtggaatgcccagccagccgtaagtgacattttcattgttacagtaggggtgaaaggggggccacccagtgtattcacagagataagctgggaagttttggaaatggttactggtggggtgggataatccttttaaactttttactgattttttttttctttcccacagagttaagcacaaaggaaaacatttcaataaaggatcatttgacaactggtgga

SEQ ID NO: 313554 - DNA, 2146 bp, Homo sapiens
cggacgcgtgggtcgacccacgcgtcggggaggaggccaaggtgcaacttccttcggtcgtcccgaatccgggttcatccgacaccagccgcctccaccatgccgccgaagttcgaccccaacgagatcaaagtcgtcggtgcgtgctctggttgtggccggggctgcgggatggagcatccctcggccccgccgcgcgtgcaaagctttccccgtatggggctcttaaagccgctgcctcccagagaccttcccggtgttgcgccgccccggccaagcctcagcctttctgggccttagcttcttcacgtgtaggtggggagggaggactggaccacctgtggcggcttgggagcccgcacgccctagggtaaggcttgtctccgggcgtttcgccccattggcctgggttagcgggcgacggggctctctccacgcctccccggtgtgagtttcggagctgcccacacccgagggaggagcgggtggcccgcctcgcgctctgtgctgtttcgagaagaggcagagggtggcgtgtccaaccccggaaagacgctgagagggctgtggctcggggctccctctgcacagacactaactcttcttttcccccagtatatacctgaggtgcaccggaggtgaagtcggtgccacttctgccctggcccccaagatcggccccctgggtctggtacgttatcccctccaaggggcatttttttcacatttgtttcactttaagcgccggctcgtggagtcacgcctgtgccagaggtgccctcgtggcttggactgtcaccctcagtaggcctgagccactgaactagtactaggtaccttaggaaggtcgtgtgtgaaaaatcgaacctggtgcctttaaattgtaattagctccatgtgtctccactgctgctttagtgtacctgaggggtgggcccaagggggagttttgaagttaggactggcttagagacattgggcagccaacatctgtatttcctcgtcaggaagtgggcatggcgttgttgggagattaaacggggtgtgggtgaagatccagtgagcgtttccagctgtgttgtagatgtaaacctagcagttaatgtggcaggctgtgtctcatgcctgctgagcaactgctggcttccccgtcattctgtcctcttggatttctctgaatttcattaggcctttatttaatccttgcacagtgctcccctgccccaaatgctcttccccattggtcttttttaacctgtatcttaactattcttccttggccgttagctggcacttaagggacacttagcctcctgttgaggctaaggattactagaggaggagaacttcagagtagcaaataatcagacctccatccaggaagatggacgtgggtggtctgacatgggagcctagtattttgaaagctccttaggtgattctaatgtcagcagggctgaaaatccccctccttaagcacatgggcacttaggagggggtctaggttacattgtggccaagtctgcagtttacagttctggacaagaaccccaaccccaatttatgctatggtgatagctgtgctctgattgagaaggtgcccttaggtacttgagatagcttcctttgttgccaagtgagaagtggtgggcaggtttcaaggctgtggttcacctctggacaccatgttgattacatgcctttatttctagtctccaaaaaaagttggtgatgacattgccaaggcaacgggtgactggaagggcctgaggattacagtgaaactgaccattcagaacagacaggcccagattgaggtggtgccttctgcctctgccctgatcatcaaagccctcaaggaaccaccaagagacagaaagaaacagaaaaacattaaacacagtgggaatatcacttttgatgagattgtcaacattgctcgacagatgcggcaccgatccttagccagagaactctctggaaccattaaagagatcctggggactgcccagtcagtgggctgtaatgttgatggccgccatcctcatgacatcatcgatgacatcaacagtggtgctgtggaatgcccagccagttaagcacaaaggaaaacatttcaataaaggatcatttgacaactggtgga

SEQ ID NO: 313555 - DNA, 2392 bp, Homo sapiens
cggacgcgtgggtcgacccacgcgtcggggaggaggccaaggtgcaacttccttcggtcgtcccgaatccgggttcatccgacaccagccgcctccaccatgccgccgaagttcgaccccaacgagatcaaagtcgtcggtgcgtgctctggttgtggccggggctgcgggatggagcatccctcggccccgccgcgcgtgcaaagctttccccgtatggggctcttaaagccgctgcctcccagagaccttcccggtgttgcgccgccccggccaagcctcagcctttctgggccttagcttcttcacgtgtaggtggggagggaggactggaccacctgtggcggcttgggagcccgcacgccctagggtaaggcttgtctccgggcgtttcgccccattggcctgggttagcgggcgacggggctctctccacgcctccccggtgtgagtttcggagctgcccacacccgagggaggagcgggtggcccgcctcgcgctctgtgctgtttcgagaagaggcagagggtggcgtgtccaaccccggaaagacgctgagagggctgtggctcggggctccctctgcacagacactaactcttcttttcccccagtatatacctgaggtgcaccggaggtgaagtcggtgccacttctgccctggcccccaagatcggccccctgggtctggtacgttatcccctccaaggggcatttttttcacatttgtttcactttaagcgccggctcgtggagtcacgcctgtgccagaggtgccctcgtggcttggactgtcaccctcagtaggcctgagccactgaactagtactaggtaccttaggaaggtcgtgtgtgaaaaatcgaacctggtgcctttaaattgtaattagctccatgtgtctccactgctgctttagtgtacctgaggggtgggcccaagggggagttttgaagttaggactggcttagagacattgggcagccaacatctgtatttcctcgtcaggaagtgggcatggcgttgttgggagattaaacggggtgtgggtgaagatccagtgagcgtttccagctgtgttgtagatgtaaacctagcagttaatgtggcaggctgtgtctcatgcctgctgagcaactgctggcttccccgtcattctgtcctcttggatttctctgaatttcattaggcctttatttaatccttgcacagtgctcccctgccccaaatgctcttccccattggtcttttttaacctgtatcttaactattcttccttggccgttagctggcacttaagggacacttagcctcctgttgaggctaaggattactagaggaggagaacttcagagtagcaaataatcagacctccatccaggaagatggacgtgggtggtctgacatgggagcctagtattttgaaagctccttaggtgattctaatgtcagcagggctgaaaatccccctccttaagcacatgggcacttaggagggggtctaggttacattgtggccaagtctgcagtttacagttctggacaagaaccccaaccccaatttatgctatggtgatagctgtgctctgattgagaaggtgcccttaggtacttgagatagcttcctttgttgccaagtgagaagtggtgggcaggtttcaaggctgtggttcacctctggacaccatgttgattacatgcctttatttctagtctccaaaaaaagttggtgatgacattgccaaggcaacgggtgactggaagggcctgaggattacagtgaaactgaccattcagaacagacaggcccaggtatttgcttgtgcttggtttcgggagaggagggtggggggacaggtagcaaccctctgggattcctgaagagtatttctgccaccagtggtgagccgagagtgatttcaccttgttggggaggctttgtcaagagtacggacctagggcaaagacttggacagtgtgtggccatgatttttgagagccagcgtgcatggcagtattcactggaggtggagtattcactcaggaatctcttctgcaattgaggtggtgccttctgcctctgccctgatcatcaaagccctcaaggaaccaccaagagacagaaagaaacagaaaaacattaaacacagtgggaatatcacttttgatgagattgtcaacattgctcgacagatgcggcaccgatccttagccagagaactctctggaaccattaaagagatcctggggactgcccagtcagtgggctgtaatgttgatggccgccatcctcatgacatcatcgatgacatcaacagtggtgctgtggaatgcccagccagttaagcacaaaggaaaacatttcaataaaggatcatttgacaactggtgga

SEQ ID NO: 313556 - DNA, 471 bp, Homo sapiens
cggacgcgtgggtcgacccacgcgtcggggaggaggccaaggtgcaacttccttcggtcgtcccgaatccgggttcatccgacaccagccgcctccaccatgccgccgaagttcgaccccaacgagatcaaagtcgattgaggtggtgccttctgcctctgccctgatcatcaaagccctcaaggaaccaccaagagacagaaagaaacagaaaaacattaaacacagtgggaatatcacttttgatgagattgtcaacattgctcgacagatgcggcaccgatccttagccagagaactctctggaaccattaaagagatcctggggactgcccagtcagtgggctgtaatgttgatggccgccatcctcatgacatcatcgatgacatcaacagtggtgctgtggaatgcccagccagttaagcacaaaggaaaacatttcaataaaggatcatttgacaactggtgga

SEQ ID NO: 313557 - DNA, 2191 bp, Homo sapiens
cggacgcgtgggtcgacccacgcgtcggggaggaggccaaggtgcaacttccttcggtcgtcccgaatccgggttcatccgacaccagccgcctccaccatgccgccgaagttcgaccccaacgagatcaaagtcgtcggtgcgtgctctggttgtggccggggctgcgggatggagcatccctcggccccgccgcgcgtgcaaagctttccccgtatggggctcttaaagccgctgcctcccagagaccttcccggtgttgcgccgccccggccaagcctcagcctttctgggccttagcttcttcacgtgtaggtggggagggaggactggaccacctgtggcggcttgggagcccgcacgccctagggtaaggcttgtctccgggcgtttcgccccattggcctgggttagcgggcgacggggctctctccacgcctccccggtgtgagtttcggagctgcccacacccgagggaggagcgggtggcccgcctcgcgctctgtgctgtttcgagaagaggcagagggtggcgtgtccaaccccggaaagacgctgagagggctgtggctcggggctccctctgcacagacactaactcttcttttcccccagtatatacctgaggtgcaccggaggtgaagtcggtgccacttctgccctggcccccaagatcggccccctgggtctggtacgttatcccctccaaggggcatttttttcacatttgtttcactttaagcgccggctcgtggagtcacgcctgtgccagaggtgccctcgtggcttggactgtcaccctcagtaggcctgagccactgaactagtactaggtaccttaggaaggtcgtgtgtgaaaaatcgaacctggtgcctttaaattgtaattagctccatgtgtctccactgctgctttagtgtacctgaggggtgggcccaagggggagttttgaagttaggactggcttagagacattgggcagccaacatctgtatttcctcgtcaggaagtgggcatggcgttgttgggagattaaacggggtgtgggtgaagatccagtgagcgtttccagctgtgttgtagatgtaaacctagcagttaatgtggcaggctgtgtctcatgcctgctgagcaactgctggcttccccgtcattctgtcctcttggatttctctgaatttcattaggcctttatttaatccttgcacagtgctcccctgccccaaatgctcttccccattggtcttttttaacctgtatcttaactattcttccttggccgttagctggcacttaagggacacttagcctcctgttgaggctaaggattactagaggaggagaacttcagagtagcaaataatcagacctccatccaggaagatggacgtgggtggtctgacatgggagcctagtattttgaaagctccttaggtgattctaatgtcagcagggctgaaaatccccctccttaagcacatgggcacttaggagggggtctaggttacattgtggccaagtctgcagtttacagttctggacaagaaccccaaccccaatttatgctatggtgatagctgtgctctgattgagaaggtgcccttaggtacttgagatagcttcctttgttgccaagtgagaagtggtgggcaggtttcaaggctgtggttcacctctggacaccatgttgattacatgcctttatttctagtctccaaaaaaagttggtgatgacattgccaaggcaacgggtgactggaagggcctgaggattacagtgaaattaaacacagtgggaatatcacttttgatgagattgtcaacattgctcgacagatgcggcaccgatccttagccagagaactctctggaaccattaaagagatcctggggactgcccagtcagtgggctgtaatgttgatggccgccatcctcatgacatcatcgatgacatcaacagtggtgctgtggaatgcccagccagccgtaagtgacattttcattgttacagtaggggtgaaaggggggccacccagtgtattcacagagataagctgggaagttttggaaatggttactggtggggtgggataatccttttaaactttttactgattttttttttctttcccacagagttaagcacaaaggaaaacatttcaataaaggatcatttgacaactggtgga

SEQ ID NO: 313558 - DNA, 4245 bp, Homo sapiens
cccaacctcccgggctcacgtcccccgccggctccgcgctcgcgccccccgcccgaacggggctgggcggggccggcgctggttagctccggagtgtgaaaccgcgtgttaatgtaagcggcgcgagaggcgcgggcggcggcggcggtgggagcggcggctgcagaagcagcagcagcagaaacagcggcgggtactctgtgccccgcgtcccggaggcagccgactgcgccaccccaccctcgcacggccgggcgggacccgcgccaccagcccggacctccgtcgtcccgcggcgaccaaaacccccgctggccccaccgctgtgactactctggactcgcccgcagagtttgcccgccggggagggtggccgattggcggagcgcactcctgctgttttccccaccatctcgtggatgtcgtccctcgggtggtgagagaactttgcagtgggctggagcgccctttgcggagaagcacacgaaggtgaaggaaggaaagaaagaagaccgaggaagaaggagctcggaagaagggtccggagcggccggtccggccgtgcagggcgagtgcgcccgaggcgcggcgccctgatgctccccgggctcgaggagcattgggcacttgcgggactgctctcggtggagtagccccgtcgggcccggagggtttgtgcaaccgcggagaacaccgagtgctggtcgcacggggcgtgccgagccgcctcccggcgcgccctccgcactttccccgcctcgtcatccgtcgctccccggccaggagcctccgctgcgtcttcaacctcgctcccctttgcgtcccgggagcctgcgagcacccggccgaaggcgcagccgaatcttgcgggagtcgccccgaaagcgtcgggtttgtgtggggttagcgggggccgccgcgccacctgcacctcgcccgccgccgcctcggggaaagcccgaagaggaggcggaccaggagaagagcaaagaaaagcagtccgtctggatttgtttgcccaggactggcgccgcgcacgcggatcgccgaggggagtgcggtcggagtcaccgcgcccccgcctccccgcccgggcagctgaggccgggggttggagcgctgcccccgcgcacagtccccgagcgcccgacgtctccgcgcaggttcttgaagcagctgggcctggggcgcccactaatgtggccctgagggccggagcccgcaccgacgggagcgggagccggagcagctgcgggcgccgagtggccggtgcgcccggcggagcgcgcgtgcgtggccagcgcgctccccgcttctgcttggctttccggcttaattttcctcggcgggattaaagttggaaattgaccggagaattgagttgccggggaacagagccccggccgccgccagagcgatgttcccgcagagccggcacccgacgccgcaccaggctgcaggccagcccttcaagttcactatcccggagtccctggaccggattaaagaggaattccagttcctgcaggcgcagtatcacagccttaaattggaatgtgagaaactggcaagtgaaaagacagaaatgcagaggcactatgtgatgtattatgaaatgtcatatggattaaacattgaaatgcacaaacagactgaaatcgccaagagattgaatacgatttgtgcacaagtcatcccatttctgtctcaggaacatcaacaacaggtggcccaggctgttgaacgtgccaaacaggtgaccatggcagagttgaatgccatcatcgggcagcagcagttgcaagctcagcatctttctcatggccacggacccccagttccccttacgcctcacccttcgggacttcagcctcctggaatcccgcccctcgggggcagtgccggccttcttgcgctgtctagtgctctgagtgggcagtctcacttggcaataaaagatgacaagaagcaccacgatgcagagcaccacagagacagagagccgggcacaagtaattccctcctggtcccagacagtctaagaggcacagataaacgcagaaatggacctgaattttccaatgacatcaagaaaaggaaggtggatgataaggactccagccactatgacagtgatggtgacaaaagcgatgacaacttagttgtggatgtgtctaatgaggacccttcttctccgcgagcaagccctgcccactcgccccgggaaaatggaatcgacaaaaatcgcctgctaaagaaggatgcttctagcagtccagcttccacggcctcctcggcaagttccacttctttgaaatccaaagaaatgagcttgcatgaaaaagccagcacgcctgttctgaaatccagcacaccaacgcctcggagcgacatgccaacgccgggcaccagcgccactccaggcctccgtccaggtctcggcaagcctccagccatagaccccctcgttaaccaagcggcagctggcttgaggacacccctggcagtgcccggcccatatcctgctccttttgggatggtcccccacgctggcatgaacggcgagctgaccagcccaggcgctgcctacgccagtttacacaacatgtcgccccagatgagcgccgcagccgccgcggccgccgtggtggcctacgggcgctcccccatggtggggtttgatcctccccctcacatgagagtacctaccattcctccaaacctggcaggaatccctggggggaaacctgcatactccttccacgttactgcagacggtcagatgcagcctgtcccttttccccccgacgccctcatcggacccggaatcccccggcatgctcgccagatcaacaccctcaaccacggggaggtggtgtgcgctgtgaccatcagcaaccccacgagacacgtgtacacaggcgggaagggctgcgtcaaggtctgggacatcagccaccctggcaataagagccctgtctcccagctcgactgtctgaacagagacaattatatccgttcctgtaaattgctacccgatggctgcactctcatagtgggaggggaagccagtactttgtccatttgggacctggcggctccaaccccgcgcatcaaggcggagctgacgtcctcggcccccgcctgctacgccctggccatcagccccgattccaaggtctgcttctcatgctgcagcgacggcaacatcgctgtgtgggatctgcacaaccagacactagtgaggcaattccagggccacacagacggagccagctgtattgacatttctaatgatggcaccaagctctggacgggtggtttggacaacacagtcaggtcctgggacctgcgcgaggggcggcagctgcagcagcacgacttcacctcccagatcttctccctggggtactgccccaccggggagtggctggcagtgggcatggagagcagcaatgtggaggtgctgcacgtgaacaagcctgacaagtaccagctgcacctgcatgagagctgcgtgctgtccctgaaatttgcttactgtggtaaatggtttgtgagtactggaaaagataacctcctcaatgcttggcggaccccctatggagccagcatattccagtccaaagagtcctcgtcagtgcttagctgtgacatctctgtggatgataagtacatagtcactggctcgggggacaagaaggctacagtctatgaagtcatctactgaaaacattatgtggtttaacgtttatagttgaattgggccaaaatgtttcgaatttatagaaatagaaaagttgtaactttaaaagagaaaaaaaattacaaacacctgtttccaaaccttgacagaaaactactttgagtctacaaagaggaggcgacaagtccatcagcagaaagtcacctgtctacatagaccaaatggagcaccaaggccaagcggacagaggggccatgggttgtaggattgaggaacggaatctgccgactcacatgacagcccattctttctttctgggtgatctggggatcacgccttgcccaagtgtgagattacctttctgttccttgcagttcacctcactttccgtcctttgtagagcagtggtgtctccaatgaacttgtttcctggttttgcatcttgtgaaatgtttttttgtatttttgttgaaggttaaacatttgtataaattgtaaatatatttggtttattacagtaaaggctttagtaccaataa

SEQ ID NO: 313559 - DNA, 4546 bp, Homo sapiens
cccaacctcccgggctcacgtcccccgccggctccgcgctcgcgccccccgcccgaacggggctgggcggggccggcgctggttagctccggagtgtgaaaccgcgtgttaatgtaagcggcgcgagaggcgcgggcggcggcggcggtgggagcggcggctgcagaagcagcagcagcagaaacagcggcgggtactctgtgccccgcgtcccggaggcagccgactgcgccaccccaccctcgcacggccgggcgggacccgcgccaccagcccggacctccgtcgtcccgcggcgaccaaaacccccgctggccccaccgctgtgactactctggactcgcccgcagagtttgcccgccggggagggtggccgattggcggagcgcactcctgctgttttccccaccatctcgtggatgtcgtccctcgggtggtgagagaactttgcagtgggctggagcgccctttgcggagaagcacacgaaggtgaaggaaggaaagaaagaagaccgaggaagaaggagctcggaagaagggtccggagcggccggtccggccgtgcagggcgagtgcgcccgaggcgcggcgccctgatgctccccgggctcgaggagcattgggcacttgcgggactgctctcggtggagtagccccgtcgggcccggagggtttgtgcaaccgcggagaacaccgagtgctggtcgcacggggcgtgccgagccgcctcccggcgcgccctccgcactttccccgcctcgtcatccgtcgctccccggccaggagcctccgctgcgtcttcaacctcgctcccctttgcgtcccgggagcctgcgagcacccggccgaaggcgcagccgaatcttgcgggagtcgccccgaaagcgtcgggtttgtgtggggttagcgggggccgccgcgccacctgcacctcgcccgccgccgcctcggggaaagcccgaagaggaggcggaccaggagaagagcaaagaaaagcagtccgtctggatttgtttgcccaggactggcgccgcgcacgcggatcgccgaggggagtgcggtcggagtcaccgcgcccccgcctccccgcccgggcagctgaggccgggggttggagcgctgcccccgcgcacagtccccgagcgcccgacgtctccgcgcaggttcttgaagcagctgggcctggggcgcccactaatgtggccctgagggccggagcccgcaccgacgggagcgggagccggagcagctgcgggcgccgagtggccggtgcgcccggcggagcgcgcgtgcgtggccagcgcgctccccgcttctgcttggctttccggcttaattttcctcggcgggattaaagttggaaattgaccggagaattgagttgccggggaacagagccccggccgccgccagagcgatgttcccgcagagccggcacccgacgccgcaccaggctgcaggccagcccttcaagttcactatcccggagtccctggaccggattaaagaggaattccagttcctgcaggcgcagtatcacagccttaaattggaatgtgagaaactggcaagtgaaaagacagaaatgcagaggcactatgtgatgtattatgaaatgtcatatggattaaacattgaaatgcacaaacagactgaaatcgccaagagattgaatacgatttgtgcacaagtcatcccatttctgtctcaggaacatcaacaacaggtggcccaggctgttgaacgtgccaaacaggtgaccatggcagagttgaatgccatcatcggggtacgtggcctaccaggtctacctcctacacagcagcagttgcaagctcagcatctttctcatggccacggacccccagttccccttacgcctcacccttcgggacttcagcctcctggaatcccgcccctcgggggcagtgccggccttcttgcgctgtctagtgctctgagtgggcagtctcacttggcaataaaagatgacaagaagcaccacgatgcagagcaccacagagacagagagccgggcacaagtaattccctcctggtcccagacagtctaagaggcacagataaacgcagaaatggacctgaattttccaatgacatcaagaaaaggaaggtggatgataaggactccagccactatgacagtgatggtgacaaaagcgatgacaacttagttgtggatgtgtctaatgaggacccttcttctccgcgagcaagccctgcccactcgccccgggaaaatggaatcgacaaaaatcgcctgctaaagaaggatgcttctagcagtccagcttccacggcctcctcggcaagttccacttctttgaaatccaaagaaatgagcttgcatgaaaaagccagcacgcctgttctgaaatccagcacaccaacgcctcggagcgacatgccaacgccgggcaccagcgccactccaggcctccgtccaggtctcggcaagcctccagccatagaccccctcgttaaccaagcggcagctggcttgaggacacccctggcagtgcccggcccatatcctgctccttttgggatggtcccccacgctggcatgaacggcgagctgaccagcccaggcgctgcctacgccagtttacacaacatgtcgccccagatgagcgccgcagccgccgcggccgccgtggtggcctacgggcgctcccccatggtggggtttgatcctccccctcacatgagagtacctaccattcctccaaacctggcaggaatccctggggggaaacctgcatactccttccacgttactgcagacggtcagatgcagcctgtcccttttccccccgacgccctcatcggacccggaatcccccggcatgctcgccagatcaacaccctcaaccacggggaggtggtgtgcgctgtgaccatcagcaaccccacgagacacgtgtacacaggcgggaagggctgcgtcaaggtctgggacatcagccaccctggcaataagagccctgtctcccagctcgactgtctgaacagagacaattatatccgttcctgtaaattgctacccgatggctgcactctcatagtgggaggggaagccagtactttgtccatttgggacctggcggctccaaccccgcgcatcaaggcggagctgacgtcctcggcccccgcctgctacgccctggccatcagccccgattccaaggtctgcttctcatgctgcagcgacggcaacatcgctgtgtgggatctgcacaaccagacactagtgaggcaattccagggccacacagacggagccagctgtattgacatttctaatgatggcaccaagctctggacgggtggtttggacaacacagtcaggtcctgggacctgcgcgaggggcggcagctgcagcagcacgacttcacctcccagatcttctccctggggtactgccccaccggggagtggctggcagtgggcatggagagcagcaatgtggaggtgctgcacgtgaacaagcctgacaagtaccagctgcacctgcatgagagctgcgtgctgtccctgaaatttgcttactgtggtaaatggtttgtgagtactggaaaagataacctcctcaatgcttggcggaccccctatggagccagcatattccagtccaaagagtcctcgtcagtgcttagctgtgacatctctgtggatgataagtacatagtcactggctcgggggacaagaaggctacagtctatgaagtcatctactgaaaacattatgtggtttaacgtttatagttgaattgggccaaaatgtttcgaatttatagaaatagaaaagttgtaactttaaaaatgcagcgcaagtaggtctacaagacgctacttcccctatcatagaagagcttatcacctttcatgatcacgccctcataatcattttccttatctgcttcctagtcctgtatgcccttttcctaacactcacaacaaaactaactaatactaacatctcagacgctcaggaaatagaaaccgtctgaactatcctgcccgccatcatcctagtcctcatcgccctcccatccctacgcatcctttacataacagacgaggtcaacgatccctcccttaccatcaaatcaattggccaccaatggtactgaacctacgagtacaccgactacggcggactaatcttcaactcctacatacttcccccattattcctagaaccaggcgacctgcgactccttgacgttgacaatcgagtagtactcccgattgaagcccccattcgtataataattacatcacaagacgtcttgcactcatgagctgtccccacattaggcttaaaaacagatgcaattcccggacgtctaaaccaaaccactttcaccgctacacgaccgggggtatactacggtcaatgctctgaaatctgtggagcaaaccacagtttcatgcccatcgtcctagaattaattcccctaaaaatctttgaaatagggcccgtatttaccctatagcaccccctctaccccctctagagcc

SEQ ID NO: 313560 - DNA, 415 bp, Homo sapiens
tatttttagtagagacggggtttcaccatgttggccaggctggtctcaaactcctgacctcaggtgatctgcccatctcggcctcccaaagtgctgggattacaggcgtgagctaccttgcccagccttcttttagttttaaataattcaaatcctagggacttcagtaaagtttctgataattattttgaacacaagcctccccacctaactagcattgtgcgtctgactttgctaatactggctgaaacagcggtttggctggcccaaccgtgctccttgcagactatagtttgctggttttctgctaggggaggcttcaggaatcagtggtctctcctgcagtagaaattaggagggtttctctgcgactccagcccttaaaaaactcataatttgcaacctgatattcccc

SEQ ID NO: 313561 - DNA, 4275 bp, Homo sapiens
cccaacctcccgggctcacgtcccccgccggctccgcgctcgcgccccccgcccgaacggggctgggcggggccggcgctggttagctccggagtgtgaaaccgcgtgttaatgtaagcggcgcgagaggcgcgggcggcggcggcggtgggagcggcggctgcagaagcagcagcagcagaaacagcggcgggtactctgtgccccgcgtcccggaggcagccgactgcgccaccccaccctcgcacggccgggcgggacccgcgccaccagcccggacctccgtcgtcccgcggcgaccaaaacccccgctggccccaccgctgtgactactctggactcgcccgcagagtttgcccgccggggagggtggccgattggcggagcgcactcctgctgttttccccaccatctcgtggatgtcgtccctcgggtggtgagagaactttgcagtgggctggagcgccctttgcggagaagcacacgaaggtgaaggaaggaaagaaagaagaccgaggaagaaggagctcggaagaagggtccggagcggccggtccggccgtgcagggcgagtgcgcccgaggcgcggcgccctgatgctccccgggctcgaggagcattgggcacttgcgggactgctctcggtggagtagccccgtcgggcccggagggtttgtgcaaccgcggagaacaccgagtgctggtcgcacggggcgtgccgagccgcctcccggcgcgccctccgcactttccccgcctcgtcatccgtcgctccccggccaggagcctccgctgcgtcttcaacctcgctcccctttgcgtcccgggagcctgcgagcacccggccgaaggcgcagccgaatcttgcgggagtcgccccgaaagcgtcgggtttgtgtggggttagcgggggccgccgcgccacctgcacctcgcccgccgccgcctcggggaaagcccgaagaggaggcggaccaggagaagagcaaagaaaagcagtccgtctggatttgtttgcccaggactggcgccgcgcacgcggatcgccgaggggagtgcggtcggagtcaccgcgcccccgcctccccgcccgggcagctgaggccgggggttggagcgctgcccccgcgcacagtccccgagcgcccgacgtctccgcgcaggttcttgaagcagctgggcctggggcgcccactaatgtggccctgagggccggagcccgcaccgacgggagcgggagccggagcagctgcgggcgccgagtggccggtgcgcccggcggagcgcgcgtgcgtggccagcgcgctccccgcttctgcttggctttccggcttaattttcctcggcgggattaaagttggaaattgaccggagaattgagttgccggggaacagagccccggccgccgccagagcgatgttcccgcagagccggcacccgacgccgcaccaggctgcaggccagcccttcaagttcactatcccggagtccctggaccggattaaagaggaattccagttcctgcaggcgcagtatcacagccttaaattggaatgtgagaaactggcaagtgaaaagacagaaatgcagaggcactatgtgatgtattatgaaatgtcatatggattaaacattgaaatgcacaaacagactgaaatcgccaagagattgaatacgatttgtgcacaagtcatcccatttctgtctcaggaacatcaacaacaggtggcccaggctgttgaacgtgccaaacaggtgaccatggcagagttgaatgccatcatcggggtacgtggcctaccaggtctacctcctacacagcagcagttgcaagctcagcatctttctcatggccacggacccccagttccccttacgcctcacccttcgggacttcagcctcctggaatcccgcccctcgggggcagtgccggccttcttgcgctgtctagtgctctgagtgggcagtctcacttggcaataaaagatgacaagaagcaccacgatgcagagcaccacagagacagagagccgggcacaagtaattccctcctggtcccagacagtctaagaggcacagataaacgcagaaatggacctgaattttccaatgacatcaagaaaaggaaggtggatgataaggactccagccactatgacagtgatggtgacaaaagcgatgacaacttagttgtggatgtgtctaatgaggacccttcttctccgcgagcaagccctgcccactcgccccgggaaaatggaatcgacaaaaatcgcctgctaaagaaggatgcttctagcagtccagcttccacggcctcctcggcaagttccacttctttgaaatccaaagaaatgagcttgcatgaaaaagccagcacgcctgttctgaaatccagcacaccaacgcctcggagcgacatgccaacgccgggcaccagcgccactccaggcctccgtccaggtctcggcaagcctccagccatagaccccctcgttaaccaagcggcagctggcttgaggacacccctggcagtgcccggcccatatcctgctccttttgggatggtcccccacgctggcatgaacggcgagctgaccagcccaggcgctgcctacgccagtttacacaacatgtcgccccagatgagcgccgcagccgccgcggccgccgtggtggcctacgggcgctcccccatggtggggtttgatcctccccctcacatgagagtacctaccattcctccaaacctggcaggaatccctggggggaaacctgcatactccttccacgttactgcagacggtcagatgcagcctgtcccttttccccccgacgccctcatcggacccggaatcccccggcatgctcgccagatcaacaccctcaaccacggggaggtggtgtgcgctgtgaccatcagcaaccccacgagacacgtgtacacaggcgggaagggctgcgtcaaggtctgggacatcagccaccctggcaataagagccctgtctcccagctcgactgtctgaacagagacaattatatccgttcctgtaaattgctacccgatggctgcactctcatagtgggaggggaagccagtactttgtccatttgggacctggcggctccaaccccgcgcatcaaggcggagctgacgtcctcggcccccgcctgctacgccctggccatcagccccgattccaaggtctgcttctcatgctgcagcgacggcaacatcgctgtgtgggatctgcacaaccagacactagtgaggcaattccagggccacacagacggagccagctgtattgacatttctaatgatggcaccaagctctggacgggtggtttggacaacacagtcaggtcctgggacctgcgcgaggggcggcagctgcagcagcacgacttcacctcccagatcttctccctggggtactgccccaccggggagtggctggcagtgggcatggagagcagcaatgtggaggtgctgcacgtgaacaagcctgacaagtaccagctgcacctgcatgagagctgcgtgctgtccctgaaatttgcttactgtggtaaatggtttgtgagtactggaaaagataacctcctcaatgcttggcggaccccctatggagccagcatattccagtccaaagagtcctcgtcagtgcttagctgtgacatctctgtggatgataagtacatagtcactggctcgggggacaagaaggctacagtctatgaagtcatctactgaaaacattatgtggtttaacgtttatagttgaattgggccaaaatgtttcgaatttatagaaatagaaaagttgtaactttaaaagagaaaaaaaattacaaacacctgtttccaaaccttgacagaaaactactttgagtctacaaagaggaggcgacaagtccatcagcagaaagtcacctgtctacatagaccaaatggagcaccaaggccaagcggacagaggggccatgggttgtaggattgaggaacggaatctgccgactcacatgacagcccattctttctttctgggtgatctggggatcacgccttgcccaagtgtgagattacctttctgttccttgcagttcacctcactttccgtcctttgtagagcagtggtgtctccaatgaacttgtttcctggttttgcatcttgtgaaatgtttttttgtatttttgttgaaggttaaacatttgtataaattgtaaatatatttggtttattacagtaaaggctttagtaccaataa

SEQ ID NO: 313562 - DNA, 4347 bp, Homo sapiens
cccaacctcccgggctcacgtcccccgccggctccgcgctcgcgccccccgcccgaacggggctgggcggggccggcgctggttagctccggagtgtgaaaccgcgtgttaatgtaagcggcgcgagaggcgcgggcggcggcggcggtgggagcggcggctgcagaagcagcagcagcagaaacagcggcgggtactctgtgccccgcgtcccggaggcagccgactgcgccaccccaccctcgcacggccgggcgggacccgcgccaccagcccggacctccgtcgtcccgcggcgaccaaaacccccgctggccccaccgctgtgactactctggactcgcccgcagagtttgcccgccggggagggtggccgattggcggagcgcactcctgctgttttccccaccatctcgtggatgtcgtccctcgggtggtgagagaactttgcagtgggctggagcgccctttgcggagaagcacacgaaggtgaaggaaggaaagaaagaagaccgaggaagaaggagctcggaagaagggtccggagcggccggtccggccgtgcagggcgagtgcgcccgaggcgcggcgccctgatgctccccgggctcgaggagcattgggcacttgcgggactgctctcggtggagtagccccgtcgggcccggagggtttgtgcaaccgcggagaacaccgagtgctggtcgcacggggcgtgccgagccgcctcccggcgcgccctccgcactttccccgcctcgtcatccgtcgctccccggccaggagcctccgctgcgtcttcaacctcgctcccctttgcgtcccgggagcctgcgagcacccggccgaaggcgcagccgaatcttgcgggagtcgccccgaaagcgtcgggtttgtgtggggttagcgggggccgccgcgccacctgcacctcgcccgccgccgcctcggggaaagcccgaagaggaggcggaccaggagaagagcaaagaaaagcagtccgtctggatttgtttgcccaggactggcgccgcgcacgcggatcgccgaggggagtgcggtcggagtcaccgcgcccccgcctccccgcccgggcagctgaggccgggggttggagcgctgcccccgcgcacagtccccgagcgcccgacgtctccgcgcaggttcttgaagcagctgggcctggggcgcccactaatgtggccctgagggccggagcccgcaccgacgggagcgggagccggagcagctgcgggcgccgagtggccggtgcgcccggcggagcgcgcgtgcgtggccagcgcgctccccgcttctgcttggctttccggcttaattttcctcggcgggattaaagttggaaattgaccggagaattgagttgccggggaacagagccccggccgccgccagagcgatgttcccgcagagccggcacccgacgccgcaccaggctgcaggccagcccttcaagttcactatcccggagtccctggaccggattaaagaggaattccagttcctgcaggcgcagtatcacagccttaaattggaatgtgagaaactggcaagtgaaaagacagaaatgcagaggcactatgtgatgtattatgaaatgtcatatggattaaacattgaaatgcacaaacagactgaaatcgccaagagattgaatacgatttgtgcacaagtcatcccatttctgtctcaggaacatcaacaacaggtggcccaggctgttgaacgtgccaaacaggtgaccatggcagagttgaatgccatcatcgggcagcagcagttgcaagctcagcatctttctcatggccacggacccccagttccccttacgcctcacccttcgggacttcagcctcctggaatcccgcccctcgggggcagtgccggccttcttgcgctgtctagtgctctgagtgggcagtctcacttggcaataaaagatgacaagaagcaccacgatgcagagcaccacagagacagagagccgggcacaagtaattccctcctggtcccagacagtctaagaggcacagataaacgcagaaatggacctgaattttccaatgacatcaagaaaaggaaggtggatgataaggactccagccactatgacagtgatggtgacaaaagcgatgacaacttagttgtggatgtgtctaatgaggacccttcttctccgcgagcaagccctgcccactcgccccgggaaaatggaatcgacaaaaatcgcctgctaaagaaggatgcttctagcagtccagcttccacggcctcctcggcaagttccacttctttgaaatccaaagaaatgagcttgcatgaaaaagccagcacgcctgttctgaaatccagcacaccaacgcctcggagcgacatgccaacgccgggcaccagcgccactccaggcctccgtccaggtctcggcaagcctccagccatagaccccctcgttaaccaagcgggattggattttcatttggaattggtaccagggaatggaaagttcggactgaaagagaaatcttggattttatcgagaaaatcttcttttgagattaagtcagcagctggcttgaggacacccctggcagtgcccggcccatatcctgctccttttgggatggtcccccacgctggcatgaacggcgagctgaccagcccaggcgctgcctacgccagtttacacaacatgtcgccccagatgagcgccgcagccgccgcggccgccgtggtggcctacgggcgctcccccatggtggggtttgatcctccccctcacatgagagtacctaccattcctccaaacctggcaggaatccctggggggaaacctgcatactccttccacgttactgcagacggtcagatgcagcctgtcccttttccccccgacgccctcatcggacccggaatcccccggcatgctcgccagatcaacaccctcaaccacggggaggtggtgtgcgctgtgaccatcagcaaccccacgagacacgtgtacacaggcgggaagggctgcgtcaaggtctgggacatcagccaccctggcaataagagccctgtctcccagctcgactgtctgaacagagacaattatatccgttcctgtaaattgctacccgatggctgcactctcatagtgggaggggaagccagtactttgtccatttgggacctggcggctccaaccccgcgcatcaaggcggagctgacgtcctcggcccccgcctgctacgccctggccatcagccccgattccaaggtctgcttctcatgctgcagcgacggcaacatcgctgtgtgggatctgcacaaccagacactagtgaggcaattccagggccacacagacggagccagctgtattgacatttctaatgatggcaccaagctctggacgggtggtttggacaacacagtcaggtcctgggacctgcgcgaggggcggcagctgcagcagcacgacttcacctcccagatcttctccctggggtactgccccaccggggagtggctggcagtgggcatggagagcagcaatgtggaggtgctgcacgtgaacaagcctgacaagtaccagctgcacctgcatgagagctgcgtgctgtccctgaaatttgcttactgtggtaaatggtttgtgagtactggaaaagataacctcctcaatgcttggcggaccccctatggagccagcatattccagtccaaagagtcctcgtcagtgcttagctgtgacatctctgtggatgataagtacatagtcactggctcgggggacaagaaggctacagtctatgaagtcatctactgaaaacattatgtggtttaacgtttatagttgaattgggccaaaatgtttcgaatttatagaaatagaaaagttgtaactttaaaagagaaaaaaaattacaaacacctgtttccaaaccttgacagaaaactactttgagtctacaaagaggaggcgacaagtccatcagcagaaagtcacctgtctacatagaccaaatggagcaccaaggccaagcggacagaggggccatgggttgtaggattgaggaacggaatctgccgactcacatgacagcccattctttctttctgggtgatctggggatcacgccttgcccaagtgtgagattacctttctgttccttgcagttcacctcactttccgtcctttgtagagcagtggtgtctccaatgaacttgtttcctggttttgcatcttgtgaaatgtttttttgtatttttgttgaaggttaaacatttgtataaattgtaaatatatttggtttattacagtaaaggctttagtaccaataa

SEQ ID NO: 313563 - DNA, 2899 bp, Homo sapiens
gtttatgtcccacccgttcttgccttctctgacttactgctttattcatccgcccgcattcccgtccctcggtccccctcgctggtcgcccccagacgccgcaccaggctgcaggccagcccttcaagttcactatcccggagtccctggaccggattaaagaggaattccagttcctgcaggcgcagtatcacagccttaaattggaatgtgagaaactggcaagtgaaaagacagaaatgcagaggcactatgtgatgtattatgaaatgtcatatggattaaacattgaaatgcacaaacagactgaaatcgccaagagattgaatacgatttgtgcacaagtcatcccatttctgtctcaggaacatcaacaacaggtggcccaggctgttgaacgtgccaaacaggtgaccatggcagagttgaatgccatcatcgggcagcagcagttgcaagctcagcatctttctcatggccacggacccccagttccccttacgcctcacccttcgggacttcagcctcctggaatcccgcccctcgggggcagtgccggccttcttgcgctgtctagtgctctgagtgggcagtctcacttggcaataaaagatgacaagaagcaccacgatgcagagcaccacagagacagagagccgggcacaagtaattccctcctggtcccagacagtctaagaggcacagataaacgcagaaatggacctgaattttccaatgacatcaagaaaaggaaggtggatgataaggactccagccactatgacagtgatggtgacaaaagcgatgacaacttagttgtggatgtgtctaatgaggacccttcttctccgcgagcaagccctgcccactcgccccgggaaaatggaatcgacaaaaatcgcctgctaaagaaggatgcttctagcagtccagcttccacggcctcctcggcaagttccacttctttgaaatccaaagaaatgagcttgcatgaaaaagccagcacgcctgttctgaaatccagcacaccaacgcctcggagcgacatgccaacgccgggcaccagcgccactccaggcctccgtccaggtctcggcaagcctccagccatagaccccctcgttaaccaagcggcagctggcttgaggacacccctggcagtgcccggcccatatcctgctccttttgggatggtcccccacgctggcatgaacggcgagctgaccagcccaggcgctgcctacgccagtttacacaacatgtcgccccagatgagcgccgcagccgccgcggccgccgtggtggcctacgggcgctcccccatggtggggtttgatcctccccctcacatgagagtacctaccattcctccaaacctggcaggaatccctggggggaaacctgcatactccttccacgttactgcagacggtcagatgcagcctgtcccttttccccccgacgccctcatcggacccggaatcccccggcatgctcgccagatcaacaccctcaaccacggggaggtggtgtgcgctgtgaccatcagcaaccccacgagacacgtgtacacaggcgggaagggctgcgtcaaggtctgggacatcagccaccctggcaataagagccctgtctcccagctcgactgtctgaacagagacaattatatccgttcctgtaaattgctacccgatggctgcactctcatagtgggaggggaagccagtactttgtccatttgggacctggcggctccaaccccgcgcatcaaggcggagctgacgtcctcggcccccgcctgctacgccctggccatcagccccgattccaaggtctgcttctcatgctgcagcgacggcaacatcgctgtgtgggatctgcacaaccagacactagtgaggcaattccagggccacacagacggagccagctgtattgacatttctaatgatggcaccaagctctggacgggtggtttggacaacacagtcaggtcctgggacctgcgcgaggggcggcagctgcagcagcacgacttcacctcccagatcttctccctggggtactgccccaccggggagtggctggcagtgggcatggagagcagcaatgtggaggtgctgcacgtgaacaagcctgacaagtaccagctgcacctgcatgagagctgcgtgctgtccctgaaatttgcttactgtggtaaatggtttgtgagtactggaaaagataacctcctcaatgcttggcggaccccctatggagccagcatattccagtccaaagagtcctcgtcagtgcttagctgtgacatctctgtggatgataagtacatagtcactggctcgggggacaagaaggctacagtctatgaagtcatctactgaaaacattatgtggtttaacgtttatagttgaattgggccaaaatgtttcgaatttatagaaatagaaaagttgtaactttaaaagagaaaaaaaattacaaacacctgtttccaaaccttgacagaaaactactttgagtctacaaagaggaggcgacaagtccatcagcagaaagtcacctgtctacatagaccaaatggagcaccaaggccaagcggacagaggggccatgggttgtaggattgaggaacggaatctgccgactcacatgacagcccattctttctttctgggtgatctggggatcacgccttgcccaagtgtgagattacctttctgttccttgcagttcacctcactttccgtcctttgtagagcagtggtgtctccaatgaacttgtttcctggttttgcatcttgtgaaatgtttttttgtatttttgttgaaggttaaacatttgtataaattgtaaatatatttggtttattacagtaaaggctttagtaccaataa

SEQ ID NO: 313564 - DNA, 4294 bp, Homo sapiens
cccaacctcccgggctcacgtcccccgccggctccgcgctcgcgccccccgcccgaacggggctgggcggggccggcgctggttagctccggagtgtgaaaccgcgtgttaatgtaagcggcgcgagaggcgcgggcggcggcggcggtgggagcggcggctgcagaagcagcagcagcagaaacagcggcgggtactctgtgccccgcgtcccggaggcagccgactgcgccaccccaccctcgcacggccgggcgggacccgcgccaccagcccggacctccgtcgtcccgcggcgaccaaaacccccgctggccccaccgctgtgactactctggactcgcccgcagagtttgcccgccggggagggtggccgattggcggagcgcactcctgctgttttccccaccatctcgtggatgtcgtccctcgggtggtgagagaactttgcagtgggctggagcgccctttgcggagaagcacacgaaggtgaaggaaggaaagaaagaagaccgaggaagaaggagctcggaagaagggtccggagcggccggtccggccgtgcagggcgagtgcgcccgaggcgcggcgccctgatgctccccgggctcgaggagcattgggcacttgcgggactgctctcggtggagtagccccgtcgggcccggagggtttgtgcaaccgcggagaacaccgagtgctggtcgcacggggcgtgccgagccgcctcccggcgcgccctccgcactttccccgcctcgtcatccgtcgctccccggccaggagcctccgctgcgtcttcaacctcgctcccctttgcgtcccgggagcctgcgagcacccggccgaaggcgcagccgaatcttgcgggagtcgccccgaaagcgtcgggtttgtgtggggttagcgggggccgccgcgccacctgcacctcgcccgccgccgcctcggggaaagcccgaagaggaggcggaccaggagaagagcaaagaaaagcagtccgtctggatttgtttgcccaggactggcgccgcgcacgcggatcgccgaggggagtgcggtcggagtcaccgcgcccccgcctccccgcccgggcagctgaggccgggggttggagcgctgcccccgcgcacagtccccgagcgcccgacgtctccgcgcaggttcttgaagcagctgggcctggggcgcccactaatgtggccctgagggccggagcccgcaccgacgggagcgggagccggagcagctgcgggcgccgagtggccggtgcgcccggcggagcgcgcgtgcgtggccagcgcgctccccgcttctgcttggctttccggcttaattttcctcggcgggattaaagttggaaattgaccggagaattgagttgccggggaacagagccccggccgccgccagagcgatgttcccgcagagccggcacccgacgccgcaccaggctgcaggccagcccttcaagttcactatcccggagtccctggaccggattaaagaggaattccagttcctgcaggcgcagtatcacagccttaaattggaatgtgagaaactggcaagtgaaaagacagaaatgcagaggcactatgtgatgtattatgaaatgtcatatggattaaacattgaaatgcacaaacagactgaaatcgccaagagattgaatacgatttgtgcacaagtcatcccatttctgtctcaggaacatcaacaacaggtggcccaggctgttgaacgtgccaaacaggtgaccatggcagagttgaatgccatcatcgggcagcagcagttgcaagctcagcatctttctcatggccacggacccccagttccccttacgcctcacccttcgggacttcagcctcctggaatcccgcccctcgggggcagtgccggccttcttgcgctgtctagtgctctgagtgggcagtctcacttggcaataaaagatgacaagaagcaccacgatgcagagcaccacagagacagagagccgggcacaagtaattccctcctggtcccagacagtctaagaggcacagataaacgcagaaatggacctgaattttccaatgacatcaagaaaaggaaggtggatgataaggactccagccactatgacagtgatggtgacaaaagcgatgacaacttagttgtggatgtgtctaatgaggacccttcttctccgcgagcaagccctgcccactcgccccgggaaaatggaatcgacaaaaatcgcctgctaaagaaggatgcttctagcagtccagcttccacggcctcctcggcaagttccacttctttgaaatccaaagaaatgagcttgcatgaaaaagccagcacgcctgttctgaaatccagcacaccaacgcctcggagcgacatgccaacgccgggcaccagcgccactccaggcctccgtccaggtctcggcaagcctccagccatagaccccctcgttaaccaagcgggattggattttcatttggaattggtaccagggaatggaaagttcggactgaaagagaaatcttggattttatcgagtgcccggcccatatcctgctccttttgggatggtcccccacgctggcatgaacggcgagctgaccagcccaggcgctgcctacgccagtttacacaacatgtcgccccagatgagcgccgcagccgccgcggccgccgtggtggcctacgggcgctcccccatggtggggtttgatcctccccctcacatgagagtacctaccattcctccaaacctggcaggaatccctggggggaaacctgcatactccttccacgttactgcagacggtcagatgcagcctgtcccttttccccccgacgccctcatcggacccggaatcccccggcatgctcgccagatcaacaccctcaaccacggggaggtggtgtgcgctgtgaccatcagcaaccccacgagacacgtgtacacaggcgggaagggctgcgtcaaggtctgggacatcagccaccctggcaataagagccctgtctcccagctcgactgtctgaacagagacaattatatccgttcctgtaaattgctacccgatggctgcactctcatagtgggaggggaagccagtactttgtccatttgggacctggcggctccaaccccgcgcatcaaggcggagctgacgtcctcggcccccgcctgctacgccctggccatcagccccgattccaaggtctgcttctcatgctgcagcgacggcaacatcgctgtgtgggatctgcacaaccagacactagtgaggcaattccagggccacacagacggagccagctgtattgacatttctaatgatggcaccaagctctggacgggtggtttggacaacacagtcaggtcctgggacctgcgcgaggggcggcagctgcagcagcacgacttcacctcccagatcttctccctggggtactgccccaccggggagtggctggcagtgggcatggagagcagcaatgtggaggtgctgcacgtgaacaagcctgacaagtaccagctgcacctgcatgagagctgcgtgctgtccctgaaatttgcttactgtggtaaatggtttgtgagtactggaaaagataacctcctcaatgcttggcggaccccctatggagccagcatattccagtccaaagagtcctcgtcagtgcttagctgtgacatctctgtggatgataagtacatagtcactggctcgggggacaagaaggctacagtctatgaagtcatctactgaaaacattatgtggtttaacgtttatagttgaattgggccaaaatgtttcgaatttatagaaatagaaaagttgtaactttaaaagagaaaaaaaattacaaacacctgtttccaaaccttgacagaaaactactttgagtctacaaagaggaggcgacaagtccatcagcagaaagtcacctgtctacatagaccaaatggagcaccaaggccaagcggacagaggggccatgggttgtaggattgaggaacggaatctgccgactcacatgacagcccattctttctttctgggtgatctggggatcacgccttgcccaagtgtgagattacctttctgttccttgcagttcacctcactttccgtcctttgtagagcagtggtgtctccaatgaacttgtttcctggttttgcatcttgtgaaatgtttttttgtatttttgttgaaggttaaacatttgtataaattgtaaatatatttggtttattacagtaaaggctttagtaccaataa

SEQ ID NO: 313565 - DNA, 2770 bp, Homo sapiens
aaatgtcatatggattaaacattgaaatgcacaaacagactgaaatcgccaagagattgaatacgatttgtgcacaagtcatcccatttctgtctcaggaacatcaacaacaggtggcccaggctgttgaacgtgccaagcaggtgaccatggcagagttgaatgccatcatcgggactgaaatcgccaagagattgaatacgatttgtgcacaagtcatcccatttctgtctcaggaacatcaacaacaggtggcccaggctgttgaacgtgccaaacaggtgaccatggcagagttgaatgccatcatcgggcagcagcagttgcaagctcagcatctttctcatggccacggacccccagttccccttacgcctcacccttcgggacttcagcctcctggaatcccgcccctcgggggcagtgccggccttcttgcgctgtctagtgctctgagtgggcagtctcacttggcaataaaagatgacaagaagcaccacgatgcagagcaccacagagacagagagccgggcacaagtaattccctcctggtcccagacagtctaagaggcacagataaacgcagaaatggacctgaattttccaatgacatcaagaaaaggaaggtggatgataaggactccagccactatgacagtgatggtgacaaaagcgatgacaacttagttgtggatgtgtctaatgaggacccttcttctccgcgagcaagccctgcccactcgccccgggaaaatggaatcgacaaaaatcgcctgctaaagaaggatgcttctagcagtccagcttccacggcctcctcggcaagttccacttctttgaaatccaaagaaatgagcttgcatgaaaaagccagcacgcctgttctgaaatccagcacaccaacgcctcggagcgacatgccaacgccgggcaccagcgccactccaggcctccgtccaggtctcggcaagcctccagccatagaccccctcgttaaccaagcggcagctggcttgaggacacccctggcagtgcccggcccatatcctgctccttttgggatggtcccccacgctggcatgaacggcgagctgaccagcccaggcgctgcctacgccagtttacacaacatgtcgccccagatgagcgccgcagccgccgcggccgccgtggtggcctacgggcgctcccccatggtggggtttgatcctccccctcacatgagagtacctaccattcctccaaacctggcaggaatccctggggggaaacctgcatactccttccacgttactgcagacggtcagatgcagcctgtcccttttccccccgacgccctcatcggacccggaatcccccggcatgctcgccagatcaacaccctcaaccacggggaggtggtgtgcgctgtgaccatcagcaaccccacgagacacgtgtacacaggcgggaagggctgcgtcaaggtctgggacatcagccaccctggcaataagagccctgtctcccagctcgactgtctgaacagagacaattatatccgttcctgtaaattgctacccgatggctgcactctcatagtgggaggggaagccagtactttgtccatttgggacctggcggctccaaccccgcgcatcaaggcggagctgacgtcctcggcccccgcctgctacgccctggccatcagccccgattccaaggtctgcttctcatgctgcagcgacggcaacatcgctgtgtgggatctgcacaaccagacactagtgaggcaattccagggccacacagacggagccagctgtattgacatttctaatgatggcaccaagctctggacgggtggtttggacaacacagtcaggtcctgggacctgcgcgaggggcggcagctgcagcagcacgacttcacctcccagatcttctccctggggtactgccccaccggggagtggctggcagtgggcatggagagcagcaatgtggaggtgctgcacgtgaacaagcctgacaagtaccagctgcacctgcatgagagctgcgtgctgtccctgaaatttgcttactgtggtaaatggtttgtgagtactggaaaagataacctcctcaatgcttggcggaccccctatggagccagcatattccagtccaaagagtcctcgtcagtgcttagctgtgacatctctgtggatgataagtacatagtcactggctcgggggacaagaaggctacagtctatgaagtcatctactgaaaacattatgtggtttaacgtttatagttgaattgggccaaaatgtttcgaatttatagaaatagaaaagttgtaactttaaaagagaaaaaaaattacaaacacctgtttccaaaccttgacagaaaactactttgagtctacaaagaggaggcgacaagtccatcagcagaaagtcacctgtctacatagaccaaatggagcaccaaggccaagcggacagaggggccatgggttgtaggattgaggaacggaatctgccgactcacatgacagcccattctttctttctgggtgatctggggatcacgccttgcccaagtgtgagattacctttctgttccttgcagttcacctcactttccgtcctttgtagagcagtggtgtctccaatgaacttgtttcctggttttgcatcttgtgaaatgtttttttgtatttttgttgaaggttaaacatttgtataaattgtaaatatatttggtttattacagtaaaggctttagtaccaataa

SEQ ID NO: 313566 - DNA, 2803 bp, Homo sapiens
cccaacctcccgggctcacgtcccccgccggctccgcgctcgcgccccccgcccgaacggggctgggcggggccggcgctggttagctccggagtgtgaaaccgcgtgttaatgtaagcggcgcgagaggcgcgggcggcggcggcggtgggagcggcggctgcagaagcagcagcagcagaaacagcggcgggtactctgtgccccgcgtcccggaggcagccgactgcgccaccccaccctcgcacggccgggcgggacccgcgccaccagcccggacctccgtcgtcccgcggcgaccaaaacccccgctggccccaccgctgtgactactctggactcgcccgcagagtttgcccgccggggagggtggccgattggcggagcgcactcctgctgttttccccaccatctcgtggatgtcgtccctcgggtggtgagagaactttgcagtgggctggagcgccctttgcggagaagcacacgaaggtgaaggaaggaaagaaagaagaccgaggaagaaggagctcggaagaagggtccggagcggccggtccggccgtgcagggcgagtgcgcccgaggcgcggcgccctgatgctccccgggctcgaggagcattgggcacttgcgggactgctctcggtggagtagccccgtcgggcccggagggtttgtgcaaccgcggagaacaccgagtgctggtcgcacggggcgtgccgagccgcctcccggcgcgccctccgcactttccccgcctcgtcatccgtcgctccccggccaggagcctccgctgcgtcttcaacctcgctcccctttgcgtcccgggagcctgcgagcacccggccgaaggcgcagccgaatcttgcgggagtcgccccgaaagcgtcgggtttgtgtggggttagcgggggccgccgcgccacctgcacctcgcccgccgccgcctcggggaaagcccgaagaggaggcggaccaggagaagagcaaagaaaagcagtccgtctggatttgtttgcccaggactggcgccgcgcacgcggatcgccgaggggagtgcggtcggagtcaccgcgcccccgcctccccgcccgggcagctgaggccgggggttggagcgctgcccccgcgcacagtccccgagcgcccgacgtctccgcgcaggttcttgaagcagctgggcctggggcgcccactaatgtggccctgagggccggagcccgcaccgacgggagcgggagccggagcagctgcgggcgccgagtggccggtgcgcccggcggagcgcgcgtgcgtggccagcgcgctccccgcttctgcttggctttccggcttaattttcctcggcgggattaaagttggaaattgaccggagaattgagttgccggggaacagagccccggccgccgccagagcgatgttcccgcagagccggcacccgacgccgcaccaggctgcaggccagcccttcaagttcactatcccggagtccctggaccggattaaagaggaattccagttcctgcaggcgcagtatcacagccttaaattggaatgtgagaaactggcaagtgaaaagacagaaatgcagaggcactatgtgatgtattatgaaatgtcatatggattaaacattgaaatgcacaaacagactgaaatcgccaagagattgaatacgatttgtgcacaagtcatcccatttctgtctcaggaacatcaacaacaggtggcccaggctgttgaacgtgccaaacaggtgaccatggcagagttgaatgccatcatcgggcagcagcagttgcaagctcagcatctttctcatggccacggacccccagttccccttacgcctcacccttcgggacttcagcctcctggaatcccgcccctcgggggcagtgccggccttcttgcgctgtctagtgctctgagtgggcagtctcacttggcaataaaagatgacaagaagcaccacgatgcagagcaccacagagacagagagccgggcacaagtaattccctcctggtcccagacagtctaagaggcacagataaacgcagaaatggacctgaattttccaatgacatcaagaaaaggaaggtggatgataaggactccagccactatgacagtgatggtgacaaaagcgatgacaacttagttgtggatgtgtctaatgaggacccttcttctccgcgagcaagccctgcccactcgccccgggaaaatggaatcgacaaaaatcgcctgctaaagaaggatgcttctagcagtccagcttccacggcctcctcggcaagttccacttctttgaaatccaaagaaatgagcttgcatgaaaaagccagcacgcctgttctgaaatccagcacaccaacgcctcggagcgacatgccaacgccgggcaccagcgccactccaggcctccgtccaggtctcggcaagcctccagccatagaccccctcgttaaccaagcggcagctggcttgaggacacccctggcagtgcccggcccatatcctgctccttttgggatggtcccccacgctggcatgaacggcgagctgaccagcccaggcgctgcctacgccagtttacacaacatgtcgccccagatgagcgccgcagccgccgcggccgccgtggtggcctacgggcgctcccccatggtggggtttgatcctccccctcacatgagagtacctaccattcctccaaacctggcaggaatccctggggggaaacctgcgtactccctccacgttactgcagacggtcgggggtaccatatggaacccccg

SEQ ID NO: 313567 - DNA, 2633 bp, Homo sapiens
cccaacctcccgggctcacgtcccccgccggctccgcgctcgcgccccccgcccgaacggggctgggcggggccggcgctggttagctccggagtgtgaaaccgcgtgttaatgtaagcggcgcgagaggcgcgggcggcggcggcggtgggagcggcggctgcagaagcagcagcagcagaaacagcggcgggtactctgtgccccgcgtcccggaggcagccgactgcgccaccccaccctcgcacggccgggcgggacccgcgccaccagcccggacctccgtcgtcccgcggcgaccaaaacccccgctggccccaccgctgtgactactctggactcgcccgcagagtttgcccgccggggagggtggccgattggcggagcgcactcctgctgttttccccaccatctcgtggatgtcgtccctcgggtggtgagagaactttgcagtgggctggagcgccctttgcggagaagcacacgaaggtgaaggaaggaaagaaagaagaccgaggaagaaggagctcggaagaagggtccggagcggccggtccggccgtgcagggcgagtgcgcccgaggcgcggcgccctgatgctccccgggctcgaggagcattgggcacttgcgggactgctctcggtggagtagccccgtcgggcccggagggtttgtgcaaccgcggagaacaccgagtgctggtcgcacggggcgtgccgagccgcctcccggcgcgccctccgcactttccccgcctcgtcatccgtcgctccccggccaggagcctccgctgcgtcttcaacctcgctcccctttgcgtcccgggagcctgcgagcacccggccgaaggcgcagccgaatcttgcgggagtcgccccgaaagcgtcgggtttgtgtggggttagcgggggccgccgcgccacctgcacctcgcccgccgccgcctcggggaaagcccgaagaggaggcggaccaggagaagagcaaagaaaagcagtccgtctggatttgtttgcccaggactggcgccgcgcacgcggatcgccgaggggagtgcggtcggagtcaccgcgcccccgcctccccgcccgggcagctgaggccgggggttggagcgctgcccccgcgcacagtccccgagcgcccgacgtctccgcgcaggttcttgaagcagctgggcctggggcgcccactaatgtggccctgagggccggagcccgcaccgacgggagcgggagccggagcagctgcgggcgccgagtggccggtgcgcccggcggagcgcgcgtgcgtggccagcgcgctccccgcttctgcttggctttccggcttaattttcctcggcgggattaaagttggaaattgaccggagaattgagttgccggggaacagagccccggccgccgccagagcgatgttcccgcagagccggcacccgacgccgcaccaggctgcaggccagcccttcaagttcactatcccggagtccctggaccggattaaagaggaattccagttcctgcaggcgcagtatcacagccttaaattggaatgtgagaaactggcaagtgaaaagacagaaatgcagaggcactatgtgatgtattatgaaatgtcatatggattaaacattgaaatgcacaaacagactgaaatcgccaagagattgaatacgatttgtgcacaagtcatcccatttctgtctcaggaacatcaacaacaggtggcccaggctgttgaacgtgccaaacaggtgaccatggcagagttgaatgccatcatcgggcagcagcagttgcaagctcagcatctttctcatggccacggacccccagttccccttacgcctcacccttcgggacttcagcctcctggaatcccgcccctcgggggcagtgccggccttcttgcgctgtctagtgctctgagtgggcagtctcacttggcaataaaagatgacaagaagcaccacgatgcagagcaccacagagacagagagccgggcacaagccagattaggactttgtcctcatactcttacagtgctgcaaagttgtgtgcatcgctaaagagagccccaacctatacagagagcaaacaatgagataagaggaactgtcgcaaagctttccactgaaacacaggtcaccctggaagtttgcagggtttgctgtgggcatctgtagatttctcgatctcgttagattgcaggcatcttgacatcttggcaactgcctagttaatgccagtggcctgtaccatattatggaaaactgttaactgcttaattgggtaattttcaaagaaagtaatgttgttaaatggggcgaaataagaagttaaatttgaaagtgaatgtgttcaaatgaaaggtttgataattgcatctgttactacttagtttcataggctttaattctagtatgcattaaatattgggcaaaattgcacttgactaattttttgaagaaaagtaatttattctgtcaagaaataaaaaaataggctttgtgtatggttaaactgtaaatcttatgtttacaaaatactgtaattttcaggaaatcactgtattaggaatgtgcaatgacttatataaataaaagccatttttaaaactgaaaaaaact

SEQ ID NO: 313568 - DNA, 889 bp, Homo sapiens
gagagagagtagagagagagagagagtagagagagagagagagagagagagagagagagagagagagagagagagagagagagagagagagagagagagagagagagagagagagagagagagacatctttctcatggccacggacccccagttccccttacgcctcacccttcgggacttcagcctcctggaatcccgcccctcgggggcagtgccggccttcttgcgctgtctagtgctctgagtgggcagtctcacttggcaatagccagattaggactttgtcctcatactcttacagtgctgcaaagttgtgtgcatcgctaaagagagccccaacctatacagagagcaaacaatgagataagaggaactgtcgcaaagctttccactgaaacacaggtcaccctggaagtttgcagggtttgctgtgggcatctgtagatttctcgatctcgttagattgcaggcatcttgacatcttggcaactgcctagttaatgccagtggcctgtaccatattatggaaaactgttaactgcttaattgggtaattttcaaagaaagtaatgttgttaaatggggcgaaataagaagttaaatttgaaagtgaatgtgttcaaatgaaaggtttgataattgcatctgttactacttagtttcataggctttaattctagtatgcattaaatattgggcaaaattgcacttgactaattttttgaagaaaagtaatttattctgtcaagaaataaaaaaataggctttgtgtatggttaaactgtaaatcttatgtttacaaaatactgtaattttcaggaaatcactgtattaggaatgtgcaatgacttatataaataaaagccatttttaaaactgaaaaaaact

SEQ ID NO: 313569 - DNA, 392 bp, Homo sapiens
atagttcatatattaaaaatgttcttagtttgattaagtccaagttgctaattgtatagtaggaattttaaccttgtgaaaactagatattcctttgctaattctaggtaaatggtttgtgagtactggaaaagataacctcctcaatgcttggcggaccccctatggagccagcatattccaggtgagtaagtactcctcacctagatccacagtttgaccacagtgtcgcctctgaagccaggagtgaaggtgcctccgagggagcagggcctctgagtaccgttgttccacattaaacacatgtccattgttttctcttccagtccaaagagtcctcgtcagtgcttagctgtgacatctctgtggatgataagtacatagtcactggc

SEQ ID NO: 313570 - DNA, 532 bp, Homo sapiens
gggaggcttcaggaatcagtggtctctcctgcagtagaaattaggagggtttctctgcgactccagcccttaaaaaactcataatttgcaacctgatattccccagtgggaaaggaaaaaagcaacaacctgggcccaaaggaaaataggcaacagaatattcctcctaaacccgtgctttggtttacgtaaatccaggattggattttcatttggaattggtaccagggaatggaaagttcggactgaaagagaaatcttggattttatcgagaaaatcttcttttgagattaagtcaggtaaacacttggtgcctgtgccttggtttgccctctgtaaattgggtagggaatactcttaattcccctggcttcctggtgctgccatttacacaaatgagaaaatgtgtgggttgtgcttcccctggagtcttttctttcctggagatgcattcgctctggggaaggagggatccagtgtataaattggaggtgattttccccctcccctagaagccttacctctttctct

SEQ ID NO: 313571 - DNA, 642 bp, Homo sapiens
gttctttggcctttgcattgaggggcttaagtgtaacagcagccacatgacaacttgagaaagcagctctggtaaattcttagcaagaatccttctgactaatgaggtaatgtgctcagcataacgaagaccgaaacatagaggatgggcctgcagtttccaagtggtaaataatgcagggtgatgaggtagatttataaactagcttggaaaagtggtttcttctcagggaactatgtgtacacctgtacctcatacctagatagtttcagctctgtgatgcaggacaccagaagcagttacctaagctcctgtgaatttgttttgtttactattttgaaggagacagttgtacttggaccccaatcttgactagagaactcttgctctgttagagtgtccatgaaacaccactcttaactcaaaaaaccaagacagccattagagaacatggtgctatgattgctcggtaattcattatagcaatgaattatgtttattctacagaacagagacaattatatccgttcctgtaaattgctacccgatggctgcactctcatagtgggaggggaagccagtactttgtccatttgggacctggcggctccaaccccgcgcatcaaggcggagctgacgtcc

SEQ ID NO: 313572 - DNA, 293 bp, Homo sapiens
ggagcaccaaggccaagcggacagaggggccatgggttgtaggattgaggaacggaatctgccgactcacatgacagcccattctttctttctgggtgatctggggatcacgccttgcccaagtgtgagattacctttctgttccttgcagttcacctcactttccgtcctttgtagagcagtggtgtctccaatgaacttgtttcctggttttgcatcttgtgaaatgtttttttgtatttttgttgaaggttaaacatttgtataaattgtaaatatatttggtttattac

SEQ ID NO: 313573 - DNA, 4191 bp, Homo sapiens
cccaacctcccgggctcacgtcccccgccggctccgcgctcgcgccccccgcccgaacggggctgggcggggccggcgctggttagctccggagtgtgaaaccgcgtgttaatgtaagcggcgcgagaggcgcgggcggcggcggcggtgggagcggcggctgcagaagcagcagcagcagaaacagcggcgggtactctgtgccccgcgtcccggaggcagccgactgcgccaccccaccctcgcacggccgggcgggacccgcgccaccagcccggacctccgtcgtcccgcggcgaccaaaacccccgctggccccaccgctgtgactactctggactcgcccgcagagtttgcccgccggggagggtggccgattggcggagcgcactcctgctgttttccccaccatctcgtggatgtcgtccctcgggtggtgagagaactttgcagtgggctggagcgccctttgcggagaagcacacgaaggtgaaggaaggaaagaaagaagaccgaggaagaaggagctcggaagaagggtccggagcggccggtccggccgtgcagggcgagtgcgcccgaggcgcggcgccctgatgctccccgggctcgaggagcattgggcacttgcgggactgctctcggtggagtagccccgtcgggcccggagggtttgtgcaaccgcggagaacaccgagtgctggtcgcacggggcgtgccgagccgcctcccggcgcgccctccgcactttccccgcctcgtcatccgtcgctccccggccaggagcctccgctgcgtcttcaacctcgctcccctttgcgtcccgggagcctgcgagcacccggccgaaggcgcagccgaatcttgcgggagtcgccccgaaagcgtcgggtttgtgtggggttagcgggggccgccgcgccacctgcacctcgcccgccgccgcctcggggaaagcccgaagaggaggcggaccaggagaagagcaaagaaaagcagtccgtctggatttgtttgcccaggactggcgccgcgcacgcggatcgccgaggggagtgcggtcggagtcaccgcgcccccgcctccccgcccgggcagctgaggccgggggttggagcgctgcccccgcgcacagtccccgagcgcccgacgtctccgcgcaggttcttgaagcagctgggcctggggcgcccactaatgtggccctgagggccggagcccgcaccgacgggagcgggagccggagcagctgcgggcgccgagtggccggtgcgcccggcggagcgcgcgtgcgtggccagcgcgctccccgcttctgcttggctttccggcttaattttcctcggcgggattaaagttggaaattgaccggagaattgagttgccggggaacagagccccggccgccgccagagcgatgttcccgcagagccggcacccgacgccgcaccaggctgcaggccagcccttcaagttcactatcccggagtccctggaccggattaaagaggaattccagttcctgcaggcgcagtatcacagccttaaattggaatgtgagaaactggcaagtgaaaagacagaaatgcagaggcactatgtgatgtattatgaaatgtcatatggattaaacattgaaatgcacaaacagactgaaatcgccaagagattgaatacgatttgtgcacaagtcatcccatttctgtctcaggaacatcaacaacaggtggcccaggctgttgaacgtgccaaacaggtgaccatggcagagttgaatgccatcatcgggcagcagcagttgcaagctcagcatctttctcatggccacggacccccagttccccttacgcctcacccttcgggacttcagcctcctggaatcccgcccctcgggggcagtgccggccttcttgcgctgtctagtgctctgagtgggcagtctcacttggcaataaaagatgacaagaagcaccacgatgcagagcaccacagagacagagagccgggcacaagtaattccctcctggtcccagacagtctaagaggcacagataaacgcagaaatggacctgaattttccaatgacatcaagaaaaggaaggtggatgataaggactccagccactatgacagtgatggtgacaaaagcgatgacaacttagttgtggatgtgtctaatgaggacccttcttctccgcgagcaagccctgcccactcgccccgggaaaatggaatcgacaaaaatcgcctgctaaagaaggatgcttctagcagtccagcttccacggcctcctcggcaagttccacttctttgaaatccaaagaaatgagcttgcatgaaaaagccagcacgcctgttctgaaatccagcacaccaacgcctcggagcgacatgccaacgccgggcaccagcgccactccaggcctccgtccaggtctcggcaagcctccagccatagaccccctcgttaaccaagcggcagctggcttgaggacacccctggcagtgcccggcccatatcctgctccttttgggatggtcccccacgctggcatgaacggcgagctgaccagcccaggcgctgcctacgccagtttacacaacatgtcgccccagatgagcgccgcagccgccgcggccgccgtggtggcctacgggcgctcccccatggtggggtttgatcctccccctcacatgagagtacctaccattcctccaaacctggcaggaatccctggggggaaacctgcatactccttccacgttactgcagacggtcagatgcagcctgtcccttttccccccgacgccctcatcggacccggaatcccccggcatgctcgccagatcaacaccctcaaccacggggaggtggtgtgcgctgtgaccatcagcaaccccacgagacacgtgtacacaggcgggaagggctgcgtcaaggtctgggacatcagccaccctggcaataagagccctgtctcccagctcgactgtctgaacagagacaattatatccgttcctgtaaattgctacccgatggctgcactctcatagtgggaggggaagccagtactttgtccatttgggacctggcggctccaaccccgcgcatcaaggcggagctgacgtcctcggcccccgcctgctacgccctggccatcagccccgattccaaggtctgcttctcatgctgcagcgacggcaacatcgctgtgtgggatctgcacaaccagacactagtgaggcaattccagggccacacagacggagccagctgtattgacatttctaatgatggcaccaagctctggacgggtggtttggacaacacagtcaggtcctgggacctgcgcgaggggcggcagctgcagcagcacgacttcacctcccagatcttctccctggggtactgccccaccggggagtggctggcagtgggcatggagagcagcaatgtggaggtgctgcacgtgaacaagcctgacaagtaccagctgcacctgcatgagagctgcgtgctgtccctgaaatttgcttactgtggtaaatggtttgtgagtactggaaaagataacctcctcaatgcttggcggaccccctatggagccagcatattccagtccaaagagtcctcgtcagtgcttagctgtgacatctctgtggatgataagtacatagtcactggctcgggggacaagaaggctacagtctatgaagtcatctactgaaaacattatgtggtttaacgtttatagttgaattgggccaaaatgtttcgaatttatagaaatagaaaagttgtaactttaaaagagaaaaaaaattacaaacacctgtttccaaaccttgacagactgtctacatagaccaaatggagcaccaaggccaagcggacagaggggccatgggttgtaggattgaggaacggaatctgccgactcacatgacagcccattctttctttctgggtgatctggggatcacgccttgcccaagtgtgagattacctttctgttccttgcagttcacctcactttccgtcctttgtagagcagtggtgtctccaatgaacttgtttcctggttttgcatcttgtgaaatgtttttttgtatttttgttgaaggttaaacatttgtataaattgtaaatatatttggtttattacagtaaaggctttagtaccaataa

SEQ ID NO: 313574 - DNA, 4023 bp, Homo sapiens
cccaacctcccgggctcacgtcccccgccggctccgcgctcgcgccccccgcccgaacggggctgggcggggccggcgctggttagctccggagtgtgaaaccgcgtgttaatgtaagcggcgcgagaggcgcgggcggcggcggcggtgggagcggcggctgcagaagcagcagcagcagaaacagcggcgggtactctgtgccccgcgtcccggaggcagccgactgcgccaccccaccctcgcacggccgggcgggacccgcgccaccagcccggacctccgtcgtcccgcggcgaccaaaacccccgctggccccaccgctgtgactactctggactcgcccgcagagtttgcccgccggggagggtggccgattggcggagcgcactcctgctgttttccccaccatctcgtggatgtcgtccctcgggtggtgagagaactttgcagtgggctggagcgccctttgcggagaagcacacgaaggtgaaggaaggaaagaaagaagaccgaggaagaaggagctcggaagaagggtccggagcggccggtccggccgtgcagggcgagtgcgcccgaggcgcggcgccctgatgctccccgggctcgaggagcattgggcacttgcgggactgctctcggtggagtagccccgtcgggcccggagggtttgtgcaaccgcggagaacaccgagtgctggtcgcacggggcgtgccgagccgcctcccggcgcgccctccgcactttccccgcctcgtcatccgtcgctccccggccaggagcctccgctgcgtcttcaacctcgctcccctttgcgtcccgggagcctgcgagcacccggccgaaggcgcagccgaatcttgcgggagtcgccccgaaagcgtcgggtttgtgtggggttagcgggggccgccgcgccacctgcacctcgcccgccgccgcctcggggaaagcccgaagaggaggcggaccaggagaagagcaaagaaaagcagtccgtctggatttgtttgcccaggactggcgccgcgcacgcggatcgccgaggggagtgcggtcggagtcaccgcgcccccgcctccccgcccgggcagctgaggccgggggttggagcgctgcccccgcgcacagtccccgagcgcccgacgtctccgcgcaggttcttgaagcagctgggcctggggcgcccactaatgtggccctgagggccggagcccgcaccgacgggagcgggagccggagcagctgcgggcgccgagtggccggtgcgcccggcggagcgcgcgtgcgtggccagcgcgctccccgcttctgcttggctttccggcttaattttcctcggcgggattaaagttggaaattgaccggagaattgagttgccggggaacagagccccggccgccgccagagcgatgttcccgcagagccggcacccgacgccgcaccaggctgcaggccagcccttcaagttcactatcccggagtccctggaccggattaaagaggaattccagttcctgcaggcgcagtatcacagccttaaattggaatgtgagaaactggcaagtgaaaagacagaaatgcagaggcactatgtgatgtattatgaaatgtcatatggattaaacattgaaatgcacaaacagactgaaatcgccaagagattgaatacgatttgtgcacaagtcatcccatttctgtctcaggaacatcaacaacaggtggcccaggctgttgaacgtgccaaacaggtgaccatggcagagttgaatgccatcatcgggagtaattccctcctggtcccagacagtctaagaggcacagataaacgcagaaatggacctgaattttccaatgacatcaagaaaaggaaggtggatgataaggactccagccactatgacagtgatggtgacaaaagcgatgacaacttagttgtggatgtgtctaatgaggacccttcttctccgcgagcaagccctgcccactcgccccgggaaaatggaatcgacaaaaatcgcctgctaaagaaggatgcttctagcagtccagcttccacggcctcctcggcaagttccacttctttgaaatccaaagaaatgagcttgcatgaaaaagccagcacgcctgttctgaaatccagcacaccaacgcctcggagcgacatgccaacgccgggcaccagcgccactccaggcctccgtccaggtctcggcaagcctccagccatagaccccctcgttaaccaagcggcagctggcttgaggacacccctggcagtgcccggcccatatcctgctccttttgggatggtcccccacgctggcatgaacggcgagctgaccagcccaggcgctgcctacgccagtttacacaacatgtcgccccagatgagcgccgcagccgccgcggccgccgtggtggcctacgggcgctcccccatggtggggtttgatcctccccctcacatgagagtacctaccattcctccaaacctggcaggaatccctggggggaaacctgcatactccttccacgttactgcagacggtcagatgcagcctgtcccttttccccccgacgccctcatcggacccggaatcccccggcatgctcgccagatcaacaccctcaaccacggggaggtggtgtgcgctgtgaccatcagcaaccccacgagacacgtgtacacaggcgggaagggctgcgtcaaggtctgggacatcagccaccctggcaataagagccctgtctcccagctcgactgtctgaacagagacaattatatccgttcctgtaaattgctacccgatggctgcactctcatagtgggaggggaagccagtactttgtccatttgggacctggcggctccaaccccgcgcatcaaggcggagctgacgtcctcggcccccgcctgctacgccctggccatcagccccgattccaaggtctgcttctcatgctgcagcgacggcaacatcgctgtgtgggatctgcacaaccagacactagtgaggcaattccagggccacacagacggagccagctgtattgacatttctaatgatggcaccaagctctggacgggtggtttggacaacacagtcaggtcctgggacctgcgcgaggggcggcagctgcagcagcacgacttcacctcccagatcttctccctggggtactgccccaccggggagtggctggcagtgggcatggagagcagcaatgtggaggtgctgcacgtgaacaagcctgacaagtaccagctgcacctgcatgagagctgcgtgctgtccctgaaatttgcttactgtggtaaatggtttgtgagtactggaaaagataacctcctcaatgcttggcggaccccctatggagccagcatattccagtccaaagagtcctcgtcagtgcttagctgtgacatctctgtggatgataagtacatagtcactggctcgggggacaagaaggctacagtctatgaagtcatctactgaaaacattatgtggtttaacgtttatagttgaattgggccaaaatgtttcgaatttatagaaatagaaaagttgtaactttaaaagagaaaaaaaattacaaacacctgtttccaaaccttgacagaaaactactttgagtctacaaagaggaggcgacaagtccatcagcagaaagtcacctgtctacatagaccaaatggagcaccaaggccaagcggacagaggggccatgggttgtaggattgaggaacggaatctgccgactcacatgacagcccattctttctttctgggtgatctggggatcacgccttgcccaagtgtgagattacctttctgttccttgcagttcacctcactttccgtcctttgtagagcagtggtgtctccaatgaacttgtttcctggttttgcatcttgtgaaatgtttttttgtatttttgttgaaggttaaacatttgtataaattgtaaatatatttggtttattacagtaaaggctttagtaccaataa

SEQ ID NO: 313575 - DNA, 4679 bp, Homo sapiens
cccaacctcccgggctcacgtcccccgccggctccgcgctcgcgccccccgcccgaacggggctgggcggggccggcgctggttagctccggagtgtgaaaccgcgtgttaatgtaagcggcgcgagaggcgcgggcggcggcggcggtgggagcggcggctgcagaagcagcagcagcagaaacagcggcgggtactctgtgccccgcgtcccggaggcagccgactgcgccaccccaccctcgcacggccgggcgggacccgcgccaccagcccggacctccgtcgtcccgcggcgaccaaaacccccgctggccccaccgctgtgactactctggactcgcccgcagagtttgcccgccggggagggtggccgattggcggagcgcactcctgctgttttccccaccatctcgtggatgtcgtccctcgggtggtgagagaactttgcagtgggctggagcgccctttgcggagaagcacacgaaggtgaaggaaggaaagaaagaagaccgaggaagaaggagctcggaagaagggtccggagcggccggtccggccgtgcagggcgagtgcgcccgaggcgcggcgccctgatgctccccgggctcgaggagcattgggcacttgcgggactgctctcggtggagtagccccgtcgggcccggagggtttgtgcaaccgcggagaacaccgagtgctggtcgcacggggcgtgccgagccgcctcccggcgcgccctccgcactttccccgcctcgtcatccgtcgctccccggccaggagcctccgctgcgtcttcaacctcgctcccctttgcgtcccgggagcctgcgagcacccggccgaaggcgcagccgaatcttgcgggagtcgccccgaaagcgtcgggtttgtgtggggttagcgggggccgccgcgccacctgcacctcgcccgccgccgcctcggggaaagcccgaagaggaggcggaccaggagaagagcaaagaaaagcagtccgtctggatttgtttgcccaggactggcgccgcgcacgcggatcgccgaggggagtgcggtcggagtcaccgcgcccccgcctccccgcccgggcagctgaggccgggggttggagcgctgcccccgcgcacagtccccgagcgcccgacgtctccgcgcaggttcttgaagcagctgggcctggggcgcccactaatgtggccctgagggccggagcccgcaccgacgggagcgggagccggagcagctgcgggcgccgagtggccggtgcgcccggcggagcgcgcgtgcgtggccagcgcgctccccgcttctgcttggctttccggcttaattttcctcggcgggattaaagttggaaattgaccggagaattgagttgccggggaacagagccccggccgccgccagagcgatgttcccgcagagccggcacccgacgccgcaccaggctgcaggccagcccttcaagttcactatcccggagtccctggaccggattaaagaggaattccagttcctgcaggcgcagtatcacagccttaaattggaatgtgagaaactggcaagtgaaaagacagaaatgcagaggcactatgtgatgtattatgaaatgtcatatggattaaacattgaaatgcacaaacagactgaaatcgccaagagattgaatacgatttgtgcacaagtcatcccatttctgtctcaggaacatcaacaacaggtggcccaggctgttgaacgtgccaaacaggtgaccatggcagagttgaatgccatcatcgggcagcagcagttgcaagctcagcatctttctcatggccacggacccccagttccccttacgcctcacccttcgggacttcagcctcctggaatcccgcccctcgggggcagtgccggccttcttgcgctgtctagtgctctgagtgggcagtctcacttggcaataaaagatgacaagaagcaccacgatgcagagcaccacagagacagagagccgggcacaagtaattccctcctggtcccagacagtctaagaggcacagataaacgcagaaatggacctgaattttccaatgacatcaagaaaaggaaggtggatgataaggactccagccactatgacagtgatggtgacaaaagcgatgacaacttagttgtggatgtgtctaatgaggacccttcttctccgcgagcaagccctgcccactcgccccgggaaaatggaatcgacaaaaatcgcctgctaaagaaggatgcttctagcagtccagcttccacggcctcctcggcaagttccacttctttgaaatccaaagaaatgagcttgcatgaaaaagccagcacgcctgttctgaaatccagcacaccaacgcctcggagcgacatgccaacgccgggcaccagcgccactccaggcctccgtccaggtctcggcaagcctccagccatagaccccctcgttaaccaagcgggattggattttcatttggaattggtaccagggaatggaaagttcggactgaaagagaaatcttggattttatcgagaaaatcttcttttgagattaagtcaggtaaacacttggtgcctgtgccttggtttgccctctgtaaattgggtagggaatactcttaattcccctggcttcctggtgctgccatttacacaaatgagaaaatgtgtgggttgtgcttcccctggagtcttttctttcctggagatgcattcgctctggggaaggagggatccagtgtataaattggaggtgattttccccctcccctagaagccttacctctttctctctccccatgagtgacactaacaaatgatgaggccagacttgctggtcaggtttgatggagtgggtcagttgaatgatgtgcggcttgtgtttcctttcagcagctggcttgaggacacccctggcagtgcccggcccatatcctgctccttttgggatggtcccccacgctggcatgaacggcgagctgaccagcccaggcgctgcctacgccagtttacacaacatgtcgccccagatgagcgccgcagccgccgcggccgccgtggtggcctacgggcgctcccccatggtggggtttgatcctccccctcacatgagagtacctaccattcctccaaacctggcaggaatccctggggggaaacctgcatactccttccacgttactgcagacggtcagatgcagcctgtcccttttccccccgacgccctcatcggacccggaatcccccggcatgctcgccagatcaacaccctcaaccacggggaggtggtgtgcgctgtgaccatcagcaaccccacgagacacgtgtacacaggcgggaagggctgcgtcaaggtctgggacatcagccaccctggcaataagagccctgtctcccagctcgactgtctgaacagagacaattatatccgttcctgtaaattgctacccgatggctgcactctcatagtgggaggggaagccagtactttgtccatttgggacctggcggctccaaccccgcgcatcaaggcggagctgacgtcctcggcccccgcctgctacgccctggccatcagccccgattccaaggtctgcttctcatgctgcagcgacggcaacatcgctgtgtgggatctgcacaaccagacactagtgaggcaattccagggccacacagacggagccagctgtattgacatttctaatgatggcaccaagctctggacgggtggtttggacaacacagtcaggtcctgggacctgcgcgaggggcggcagctgcagcagcacgacttcacctcccagatcttctccctggggtactgccccaccggggagtggctggcagtgggcatggagagcagcaatgtggaggtgctgcacgtgaacaagcctgacaagtaccagctgcacctgcatgagagctgcgtgctgtccctgaaatttgcttactgtggtaaatggtttgtgagtactggaaaagataacctcctcaatgcttggcggaccccctatggagccagcatattccagtccaaagagtcctcgtcagtgcttagctgtgacatctctgtggatgataagtacatagtcactggctcgggggacaagaaggctacagtctatgaagtcatctactgaaaacattatgtggtttaacgtttatagttgaattgggccaaaatgtttcgaatttatagaaatagaaaagttgtaactttaaaagagaaaaaaaattacaaacacctgtttccaaaccttgacagaaaactactttgagtctacaaagaggaggcgacaagtccatcagcagaaagtcacctgtctacatagaccaaatggagcaccaaggccaagcggacagaggggccatgggttgtaggattgaggaacggaatctgccgactcacatgacagcccattctttctttctgggtgatctggggatcacgccttgcccaagtgtgagattacctttctgttccttgcagttcacctcactttccgtcctttgtagagcagtggtgtctccaatgaacttgtttcctggttttgcatcttgtgaaatgtttttttgtatttttgttgaaggttaaacatttgtataaattgtaaatatatttggtttattacagtaaaggctttagtaccaataa

SEQ ID NO: 313576 - DNA, 4200 bp, Homo sapiens
cccaacctcccgggctcacgtcccccgccggctccgcgctcgcgccccccgcccgaacggggctgggcggggccggcgctggttagctccggagtgtgaaaccgcgtgttaatgtaagcggcgcgagaggcgcgggcggcggcggcggtgggagcggcggctgcagaagcagcagcagcagaaacagcggcgggtactctgtgccccgcgtcccggaggcagccgactgcgccaccccaccctcgcacggccgggcgggacccgcgccaccagcccggacctccgtcgtcccgcggcgaccaaaacccccgctggccccaccgctgtgactactctggactcgcccgcagagtttgcccgccggggagggtggccgattggcggagcgcactcctgctgttttccccaccatctcgtggatgtcgtccctcgggtggtgagagaactttgcagtgggctggagcgccctttgcggagaagcacacgaaggtgaaggaaggaaagaaagaagaccgaggaagaaggagctcggaagaagggtccggagcggccggtccggccgtgcagggcgagtgcgcccgaggcgcggcgccctgatgctccccgggctcgaggagcattgggcacttgcgggactgctctcggtggagtagccccgtcgggcccggagggtttgtgcaaccgcggagaacaccgagtgctggtcgcacggggcgtgccgagccgcctcccggcgcgccctccgcactttccccgcctcgtcatccgtcgctccccggccaggagcctccgctgcgtcttcaacctcgctcccctttgcgtcccgggagcctgcgagcacccggccgaaggcgcagccgaatcttgcgggagtcgccccgaaagcgtcgggtttgtgtggggttagcgggggccgccgcgccacctgcacctcgcccgccgccgcctcggggaaagcccgaagaggaggcggaccaggagaagagcaaagaaaagcagtccgtctggatttgtttgcccaggactggcgccgcgcacgcggatcgccgaggggagtgcggtcggagtcaccgcgcccccgcctccccgcccgggcagctgaggccgggggttggagcgctgcccccgcgcacagtccccgagcgcccgacgtctccgcgcaggttcttgaagcagctgggcctggggcgcccactaatgtggccctgagggccggagcccgcaccgacgggagcgggagccggagcagctgcgggcgccgagtggccggtgcgcccggcggagcgcgcgtgcgtggccagcgcgctccccgcttctgcttggctttccggcttaattttcctcggcgggattaaagttggaaattgaccggagaattgagttgccggggaacagagccccggccgccgccagagcgatgttcccgcagagccggcacccgacgccgcaccaggctgcaggccagcccttcaagttcactatcccggagtccctggaccggattaaagaggaattccagttcctgcaggcgcagtatcacagccttaaattggaatgtgagaaactggcaagtgaaaagacagaaatgcagaggcactatgtgatgtattatgaaatgtcatatggattaaacattgaaatgcacaaacagactgaaatcgccaagagattgaatacgatttgtgcacaagtcatcccatttctgtctcaggaacatcaacaacaggtggcccaggctgttgaacgtgccaaacaggtgaccatggcagagttgaatgccatcatcgggcagcagcagttgcaagctcagcatctttctcatggccacggacccccagttccccttacgcctcacccttcgggacttcagcctcctggaatcccgcccctcgggggcagtgccggccttcttgcgctgtctagtgctctgagtgggcagtctcacttggcaataaaagatgacaagaagcaccacgatgcagagcaccacagagacagagagccgggcacaagtaattccctcctggtcccagacagtctaagaggcacagataaacgcagaaatggacctgaattttccaatgacatcaagaaaaggaaggtggatgataaggactccagccactatgacagtgatggtgacaaaagcgatgacaacttagttgtggatgtgtctaatgaggacccttcttctccgcgagcaagccctgcccactcgccccgggaaaatggaatcgacaaaaatcgcctgctaaagaaggatgcttctagcagtccagcttccacggcctcctcggcaagttccacttctttgaaatccaaagaaatgagcttgcatgaaaaagccagcacgcctgttctgaaatccagcacaccaacgcctcggagcgacatgccaacgccgggcaccagcgccactccaggcctccgtccagcagctggcttgaggacacccctggcagtgcccggcccatatcctgctccttttgggatggtcccccacgctggcatgaacggcgagctgaccagcccaggcgctgcctacgccagtttacacaacatgtcgccccagatgagcgccgcagccgccgcggccgccgtggtggcctacgggcgctcccccatggtggggtttgatcctccccctcacatgagagtacctaccattcctccaaacctggcaggaatccctggggggaaacctgcatactccttccacgttactgcagacggtcagatgcagcctgtcccttttccccccgacgccctcatcggacccggaatcccccggcatgctcgccagatcaacaccctcaaccacggggaggtggtgtgcgctgtgaccatcagcaaccccacgagacacgtgtacacaggcgggaagggctgcgtcaaggtctgggacatcagccaccctggcaataagagccctgtctcccagctcgactgtctgaacagagacaattatatccgttcctgtaaattgctacccgatggctgcactctcatagtgggaggggaagccagtactttgtccatttgggacctggcggctccaaccccgcgcatcaaggcggagctgacgtcctcggcccccgcctgctacgccctggccatcagccccgattccaaggtctgcttctcatgctgcagcgacggcaacatcgctgtgtgggatctgcacaaccagacactagtgaggcaattccagggccacacagacggagccagctgtattgacatttctaatgatggcaccaagctctggacgggtggtttggacaacacagtcaggtcctgggacctgcgcgaggggcggcagctgcagcagcacgacttcacctcccagatcttctccctggggtactgccccaccggggagtggctggcagtgggcatggagagcagcaatgtggaggtgctgcacgtgaacaagcctgacaagtaccagctgcacctgcatgagagctgcgtgctgtccctgaaatttgcttactgtggtaaatggtttgtgagtactggaaaagataacctcctcaatgcttggcggaccccctatggagccagcatattccagtccaaagagtcctcgtcagtgcttagctgtgacatctctgtggatgataagtacatagtcactggctcgggggacaagaaggctacagtctatgaagtcatctactgaaaacattatgtggtttaacgtttatagttgaattgggccaaaatgtttcgaatttatagaaatagaaaagttgtaactttaaaagagaaaaaaaattacaaacacctgtttccaaaccttgacagaaaactactttgagtctacaaagaggaggcgacaagtccatcagcagaaagtcacctgtctacatagaccaaatggagcaccaaggccaagcggacagaggggccatgggttgtaggattgaggaacggaatctgccgactcacatgacagcccattctttctttctgggtgatctggggatcacgccttgcccaagtgtgagattacctttctgttccttgcagttcacctcactttccgtcctttgtagagcagtggtgtctccaatgaacttgtttcctggttttgcatcttgtgaaatgtttttttgtatttttgttgaaggttaaacatttgtataaattgtaaatatatttggtttattacagtaaaggctttagtaccaataa

SEQ ID NO: 313577 - DNA, 4060 bp, Homo sapiens
cccaacctcccgggctcacgtcccccgccggctccgcgctcgcgccccccgcccgaacggggctgggcggggccggcgctggttagctccggagtgtgaaaccgcgtgttaatgtaagcggcgcgagaggcgcgggcggcggcggcggtgggagcggcggctgcagaagcagcagcagcagaaacagcggcgggtactctgtgccccgcgtcccggaggcagccgactgcgccaccccaccctcgcacggccgggcgggacccgcgccaccagcccggacctccgtcgtcccgcggcgaccaaaacccccgctggccccaccgctgtgactactctggactcgcccgcagagtttgcccgccggggagggtggccgattggcggagcgcactcctgctgttttccccaccatctcgtggatgtcgtccctcgggtggtgagagaactttgcagtgggctggagcgccctttgcggagaagcacacgaaggtgaaggaaggaaagaaagaagaccgaggaagaaggagctcggaagaagggtccggagcggccggtccggccgtgcagggcgagtgcgcccgaggcgcggcgccctgatgctccccgggctcgaggagcattgggcacttgcgggactgctctcggtggagtagccccgtcgggcccggagggtttgtgcaaccgcggagaacaccgagtgctggtcgcacggggcgtgccgagccgcctcccggcgcgccctccgcactttccccgcctcgtcatccgtcgctccccggccaggagcctccgctgcgtcttcaacctcgctcccctttgcgtcccgggagcctgcgagcacccggccgaaggcgcagccgaatcttgcgggagtcgccccgaaagcgtcgggtttgtgtggggttagcgggggccgccgcgccacctgcacctcgcccgccgccgcctcggggaaagcccgaagaggaggcggaccaggagaagagcaaagaaaagcagtccgtctggatttgtttgcccaggactggcgccgcgcacgcggatcgccgaggggagtgcggtcggagtcaccgcgcccccgcctccccgcccgggcagctgaggccgggggttggagcgctgcccccgcgcacagtccccgagcgcccgacgtctccgcgcaggttcttgaagcagctgggcctggggcgcccactaatgtggccctgagggccggagcccgcaccgacgggagcgggagccggagcagctgcgggcgccgagtggccggtgcgcccggcggagcgcgcgtgcgtggccagcgcgctccccgcttctgcttggctttccggcttaattttcctcggcgggattaaagttggaaattgaccggagaattgagttgccggggaacagagccccggccgccgccagagcgatgttcccgcagagccggcacccgacgccgcaccaggctgcaggccagcccttcaagttcactatcccggagtccctggaccggattaaagaggaattccagttcctgcaggcgcagtatcacagccttaaattggaatgtgagaaactggcaagtgaaaagacagaaatgcagaggcactatgtgatgtattatgaaatgtcatatggattaaacattgaaatgcacaaacagactgaaatcgccaagagattgaatacgatttgtgcacaagtcatcccatttctgtctcaggaacatcaacaacaggtggcccaggctgttgaacgtgccaaacaggtgaccatggcagagttgaatgccatcatcgggcagcagcagttgcaagctcagcatctttctcatggccacggacccccagttccccttacgcctcacccttcgggacttcagcctcctggaatcccgcccctcgggggcagtgccggccttcttgcgctgtctagtgctctgagtgggcagtctcacttggcaataaaagatgacaagaagcaccacgatgcagagcaccacagagacagagagccgggcacaagtaattccctcctggtcccagacagtctaagaggcacagataaacgcagaaatggacctgaattttccaatgacatcaagaaaaggaaggtggatgataaggactccagccactatgacagtgatggtgacaaaagcgatgacaacttagttgtggatgtgtctaatgaggtaaccattcttttcatcaaacgacatgccaacgccgggcaccagcgccactccaggcctccgtccaggtctcggcaagcctccagccatagaccccctcgttaaccaagcggcagctggcttgaggacacccctggcagtgcccggcccatatcctgctccttttgggatggtcccccacgctggcatgaacggcgagctgaccagcccaggcgctgcctacgccagtttacacaacatgtcgccccagatgagcgccgcagccgccgcggccgccgtggtggcctacgggcgctcccccatggtggggtttgatcctccccctcacatgagagtacctaccattcctccaaacctggcaggaatccctggggggaaacctgcatactccttccacgttactgcagacggtcagatgcagcctgtcccttttccccccgacgccctcatcggacccggaatcccccggcatgctcgccagatcaacaccctcaaccacggggaggtggtgtgcgctgtgaccatcagcaaccccacgagacacgtgtacacaggcgggaagggctgcgtcaaggtctgggacatcagccaccctggcaataagagccctgtctcccagctcgactgtctgaacagagacaattatatccgttcctgtaaattgctacccgatggctgcactctcatagtgggaggggaagccagtactttgtccatttgggacctggcggctccaaccccgcgcatcaaggcggagctgacgtcctcggcccccgcctgctacgccctggccatcagccccgattccaaggtctgcttctcatgctgcagcgacggcaacatcgctgtgtgggatctgcacaaccagacactagtgaggcaattccagggccacacagacggagccagctgtattgacatttctaatgatggcaccaagctctggacgggtggtttggacaacacagtcaggtcctgggacctgcgcgaggggcggcagctgcagcagcacgacttcacctcccagatcttctccctggggtactgccccaccggggagtggctggcagtgggcatggagagcagcaatgtggaggtgctgcacgtgaacaagcctgacaagtaccagctgcacctgcatgagagctgcgtgctgtccctgaaatttgcttactgtggtaaatggtttgtgagtactggaaaagataacctcctcaatgcttggcggaccccctatggagccagcatattccagtccaaagagtcctcgtcagtgcttagctgtgacatctctgtggatgataagtacatagtcactggctcgggggacaagaaggctacagtctatgaagtcatctactgaaaacattatgtggtttaacgtttatagttgaattgggccaaaatgtttcgaatttatagaaatagaaaagttgtaactttaaaagagaaaaaaaattacaaacacctgtttccaaaccttgacagaaaactactttgagtctacaaagaggaggcgacaagtccatcagcagaaagtcacctgtctacatagaccaaatggagcaccaaggccaagcggacagaggggccatgggttgtaggattgaggaacggaatctgccgactcacatgacagcccattctttctttctgggtgatctggggatcacgccttgcccaagtgtgagattacctttctgttccttgcagttcacctcactttccgtcctttgtagagcagtggtgtctccaatgaacttgtttcctggttttgcatcttgtgaaatgtttttttgtatttttgttgaaggttaaacatttgtataaattgtaaatatatttggtttattacagtaaaggctttagtaccaataa

SEQ ID NO: 313578 - DNA, 2663 bp, Homo sapiens
cccaacctcccgggctcacgtcccccgccggctccgcgctcgcgccccccgcccgaacggggctgggcggggccggcgctggttagctccggagtgtgaaaccgcgtgttaatgtaagcggcgcgagaggcgcgggcggcggcggcggtgggagcggcggctgcagaagcagcagcagcagaaacagcggcgggtactctgtgccccgcgtcccggaggcagccgactgcgccaccccaccctcgcacggccgggcgggacccgcgccaccagcccggacctccgtcgtcccgcggcgaccaaaacccccgctggccccaccgctgtgactactctggactcgcccgcagagtttgcccgccggggagggtggccgattggcggagcgcactcctgctgttttccccaccatctcgtggatgtcgtccctcgggtggtgagagaactttgcagtgggctggagcgccctttgcggagaagcacacgaaggtgaaggaaggaaagaaagaagaccgaggaagaaggagctcggaagaagggtccggagcggccggtccggccgtgcagggcgagtgcgcccgaggcgcggcgccctgatgctccccgggctcgaggagcattgggcacttgcgggactgctctcggtggagtagccccgtcgggcccggagggtttgtgcaaccgcggagaacaccgagtgctggtcgcacggggcgtgccgagccgcctcccggcgcgccctccgcactttccccgcctcgtcatccgtcgctccccggccaggagcctccgctgcgtcttcaacctcgctcccctttgcgtcccgggagcctgcgagcacccggccgaaggcgcagccgaatcttgcgggagtcgccccgaaagcgtcgggtttgtgtggggttagcgggggccgccgcgccacctgcacctcgcccgccgccgcctcggggaaagcccgaagaggaggcggaccaggagaagagcaaagaaaagcagtccgtctggatttgtttgcccaggactggcgccgcgcacgcggatcgccgaggggagtgcggtcggagtcaccgcgcccccgcctccccgcccgggcagctgaggccgggggttggagcgctgcccccgcgcacagtccccgagcgcccgacgtctccgcgcaggttcttgaagcagctgggcctggggcgcccactaatgtggccctgagggccggagcccgcaccgacgggagcgggagccggagcagctgcgggcgccgagtggccggtgcgcccggcggagcgcgcgtgcgtggccagcgcgctccccgcttctgcttggctttccggcttaattttcctcggcgggattaaagttggaaattgaccggagaattgagttgccggggaacagagccccggccgccgccagagcgatgttcccgcagagccggcacccgacgccgcaccaggctgcaggccagcccttcaagttcactatcccggagtccctggaccggattaaagaggaattccagttcctgcaggcgcagtatcacagccttaaattggaatgtgagaaactggcaagtgaaaagacagaaatgcagaggcactatgtgatgtattatgaaatgtcatatggattaaacattgaaatgcacaaacagactgaaatcgccaagagattgaatacgatttgtgcacaagtcatcccatttctgtctcaggaacatcaacaacaggtggcccaggctgttgaacgtgccaaacaggtgaccatggcagagttgaatgccatcatcggggtacgtggcctaccaggtctacctcctacacagcagcagttgcaagctcagcatctttctcatggccacggacccccagttccccttacgcctcacccttcgggacttcagcctcctggaatcccgcccctcgggggcagtgccggccttcttgcgctgtctagtgctctgagtgggcagtctcacttggcaataaaagatgacaagaagcaccacgatgcagagcaccacagagacagagagccgggcacaagccagattaggactttgtcctcatactcttacagtgctgcaaagttgtgtgcatcgctaaagagagccccaacctatacagagagcaaacaatgagataagaggaactgtcgcaaagctttccactgaaacacaggtcaccctggaagtttgcagggtttgctgtgggcatctgtagatttctcgatctcgttagattgcaggcatcttgacatcttggcaactgcctagttaatgccagtggcctgtaccatattatggaaaactgttaactgcttaattgggtaattttcaaagaaagtaatgttgttaaatggggcgaaataagaagttaaatttgaaagtgaatgtgttcaaatgaaaggtttgataattgcatctgttactacttagtttcataggctttaattctagtatgcattaaatattgggcaaaattgcacttgactaattttttgaagaaaagtaatttattctgtcaagaaataaaaaaataggctttgtgtatggttaaactgtaaatcttatgtttacaaaatactgtaattttcaggaaatcactgtattaggaatgtgcaatgacttatataaataaaagccatttttaaaactgaaaaaaact

SEQ ID NO: 313579 - DNA, 2242 bp, Homo sapiens
tgctacgcctgcgcagtaggcctccggtcgccgttccccttccccggctctagcaggccggcttctctgtccaatgcccacccggagctgggaggaggagtctgcgtaatgtgcgtgtgaagagactgggggagctggccggggctcacggtgtttgacccgtcggtcgtgcgtgagaggaaagggaaggaggaggtcccgaatagcggtcgccgaaatgttccggtgtggaggcctggcggcgggtgctttgaagcagaagctggtgcccttggtgcggaccgtgtgcgtccgaagcccgaggcagaggaaccggctcccagttgtgcagtctcatcacctaggatccccttctagatcactagcatctacaggtgcttctgggaaagatggcagcaacctagtgtacttcttaattgtaggagcaacagtcactggggcaggagtttattatgcctacaagactatgaaagaggatgaaaaaagatacaatgaaagaatttcagggttagggctgacaccagaacagaaacagaaaaaggccgcgttatctgcttcagaaggagaggaagttcctcaagacaaggcgccaagtcatgttcctttcctgctaattggtggaggcacagctgcttttgctgcagccagatccatccgggctcgggatcctggggccagggtactgattgtatctgaagatcctgagctgccgtacatgcgacctcctctttcaaaagaactgtggttttcagatgacccaaatgtcacaaagacactgcgattcaaacagtggaatggaaaagagagaagcatatatttccagccaccttctttctatgtctctgctcaggacctgcctcatattgagaatggtggtgtggctgtcctcactgggaagaaggtagtacagctggatgtgagagacaacatggtgaaacttaatgatggctctcaaataacctatgaaaagtgcttgattgcaacaggaggtactccaagaagtctgtctgccattgatagggctggagcagaggtgaagagtagaacaacgcttttcagaaagattggagactttagaagcttggagaagatttcacgggaagtcaaatcaattacgattatcggtgggggcttccttggtagcgaactggcctgtgctcttggcagaaaggctcgagccttgggcacagaagtgattcaactcttccccgagaaaggaaatatgggaaagatcctccccgaatacctcagcaactggaccatggaaaaagtcagacgagagggggttaaggtgatgcccaatgctattgtgcaatccgttggagtcagcagtggcaagttacttatcaagctgaaagacggcaggaaggtagaaactgaccacatagtggcagctgtgggcctggagcccaatgttgagttggccaagactggtggcctggaaatagactcagattttggtggcttccgggtaaatgcagagctacaagcacgctctaacatctgggtggcaggagatgctgcatgcttctacgatataaagttgggaaggaggcgggtagagcaccatgatcacgctgttgtgagtggaagattggctggagaaaatatgactggagctgctaagccgtactggcatcagtcaatgttctggagtgatttgggccccgatgttggctatgaagctattggtcttgtggacagtagtttgcccacagttggtgtttttgcaaaagcaactgcacaagacaaccccaaatctgccacagagcagtcaggaactggtatccgatcagagagtgagacagagtccgaggcctcagaaattactattcctcccagcaccccggcagttccacaggctcccgtccagggggaggactacggcaaaggtgtcatcttctacctcagggacaaagtggtcgtggggattgtgctatggaacatctttaaccgaatgccaatagcaaggaagatcattaaggacggtgagcagcatgaagatctcaatgaagtagccaaactattcaacattcatgaagactgaagccccacagtggaattggcaaacccactgcagcccctgagaggaggtcgaatgggtaaaggagcatttttttattcagcagactttctctgtgtatgagtgtgaatgatcaagtcctttgtgaatattttcaactatgtaggtaaattcttaatgttcacatagtgaaataaattctgattcttctaaattaaa

SEQ ID NO: 313580 - DNA, 1393 bp, Homo sapiens
tgctacgcctgcgcagtaggcctccggtcgccgttccccttccccggctctagcaggccggcttctctgtccaatgcccacccggagctgggaggaggagtctgcgtaatgtgcgtgtgaagagactgggggagctggccggggctcacggtgtttgacccgtcggtcgtgcgtgagaggaaagggaaggaggaggtcccgaatagcggtcgccgaaatgttccggtgtggaggcctggcggcgggtgctttgaagcagaagctggtgcccttggtgcggaccgtgtgcgtccgaagcccgaggcagaggaaccggctcccagctcgagccttgggcacagaagtgattcaactcttccccgagaaaggaaatatgggaaagatcctccccgaatacctcagcaactggaccatggaaaaagtcagacgagagggggttaaggtgatgcccaatgctattgtgcaatccgttggagtcagcagtggcaagttacttatcaagctgaaagacggcaggaaggtagaaactgaccacatagtggcagctgtgggcctggagcccaatgttgagttggccaagactggtggcctggaaatagactcagattttggtggcttccgggtaaatgcagagctacaagcacgctctaacatctgggtggcaggagatgctgcatgcttctacgatataaagttgggaaggaggcgggtagagcaccatgatcacgctgttgtgagtggaagattggctggagaaaatatgactggagctgctaagccgtactggcatcagtcaatgttctggagtgatttgggccccgatgttggctatgaagctattggtcttgtggacagtagtttgcccacagttggtgtttttgcaaaagcaactgcacaagacaaccccaaatctgccacagagcagtcaggaactggtatccgatcagagagtgagacagagtccgaggcctcagaaattactattcctcccagcaccccggcagttccacaggctcccgtccagggggaggactacggcaaaggtgtcatcttctacctcagggacaaagtggtcgtggggattgtgctatggaacatctttaaccgaatgccaatagcaaggaagatcattaaggacggtgagcagcatgaagatctcaatgaagtagccaaactattcaacattcatgaagactgaagccccacagtggaattggcaaacccactgcagcccctgagaggaggtcgaatgggtaaaggagcatttttttattcagcagactttctctgtgtatgagtgtgaatgatcaagtcctttgtgaatattttcaactatgtaggtaaattcttaatgttcacatagtgaaataaattctgattcttctaaattaaa

SEQ ID NO: 313581 - DNA, 1277 bp, Homo sapiens
gttaaactagcatatctgcctttattgtgtttgtcattagcctgagtagaaaggcctttaaaatttttttagaaagcatttgaatgcattttgtttggtattgtatttattcaataaagtatttaattagtaaaaaaaaaaaaaaaaaaaaactcgagactagagatttcacgggaagtcaaatcaattacgattatcggtgggggcttccttggtagcgaactggcctgtgctcttggcagaaaggctcgagccttgggcacagaagtgattcaactcttccccgagaaaggaaatatgggaaagatcctccccgaatacctcagcaactggaccatggaaaaagtcagacgagtggagtcagcagtggcaagttacttatcaagctgaaagacggcaggaaggtagaaactgaccacatagtggcagctgtgggcctggagcccaatgttgagttggccaagactggtggcctggaaatagactcagattttggtggcttccgggtaaatgcagagctacaagcacgctctaacatctgggtggcaggagatgctgcatgcttctacgatataaagttgggaaggaggcgggtagagcaccatgatcacgctgttgtgagtggaagattggctggagaaaatatgactggagctgctaagccgtactggcatcagtcaatgttctggagtgatttgggccccgatgttggctatgaagctattggtcttgtggacagtagtttgcccacagttggtgtttttgcaaaagcaactgcacaagacaaccccaaatctgccacagagcagtcaggaactggtatccgatcagagagtgagacagagtccgaggcctcagaaattactattcctcccagcaccccggcagttccacaggctcccgtccagggggaggactacggcaaaggtgtcatcttctacctcagggacaaagtggtcgtggggattgtgctatggaacatctttaaccgaatgccaatagcaaggaagatcattaaggacggtgagcagcatgaagatctcaatgaagtagccaaactattcaacattcatgaagactgaagccccacagtggaattggcaaacccactgcagcccctgagaggaggtcgaatgggtaaaggagcatttttttattcagcagactttctctgtgtatgagtgtgaatgatcaagtcctttgtgaatattttcaactatgtaggtaaattcttaatgttcacatagtgaaataaattctgattcttctaaattaaa

SEQ ID NO: 313582 - DNA, 915 bp, Homo sapiens
gaaactgtggtaattgactgaattatttcttttttgcctcaggtagaaactgaccacatagtggcagctgtgggcctggagcccaatgttgagttggccaagactggtggcctggaaatagactcagattttggtggcttccgggtaaatgcagagctacaagcacgctctaacatctgggtggcaggagatgctgcatgcttctacgatataaagttgggaaggaggcgggtagagcaccatgatcacgctgttgtgagtggaagattggctggagaaaatatgactggagctgctaagccgtactggcatcagtcaatgttctggagtgatttgggccccgatgttggctatgaagctattggtcttgtggacagtagtttgcccacagttggtgtttttgcaaaagcaactgcacaagacaaccccaaatctgccacagagcagtcaggaactggtatccgatcagagagtgagacagagtccgaggcctcagaaattactattcctcccagcaccccggcagttccacaggctcccgtccagggggaggactacggcaaaggtgtcatcttctacctcagggacaaagtggtcgtggggattgtgctatggaacatctttaaccgaatgccaatagcaaggaagatcattaaggacggtgagcagcatgaagatctcaatgaagtagccaaactattcaacattcatgaagactgaagccccacagtggaattggcaaacccactgcagcccctgagaggaggtcgaatgggtaaaggagcatttttttattcagcagactttctctgtgtatgagtgtgaatgatcaagtcctttgtgaatattttcaactatgtaggtaaattcttaatgttcacatagtgaaataaattctgattcttctaaattaaa

SEQ ID NO: 313583 - DNA, 1511 bp, Homo sapiens
tgctacgcctgcgcagtaggcctccggtcgccgttccccttccccggctctagcaggccggcttctctgtccaatgcccacccggagctgggaggaggagtctgcgtaatgtgcgtgtgaagagactgggggagctggccggggctcacggtgtttgacccgtcggtcgtgcgtgagaggaaagggaaggaggaggtcccgaatagcggtcgccgaaatgttccggtgtggaggcctggcggcgggtgctttgaagcagaagctggtgcccttggtgcggaccgtgtgcgtccgaagcccgaggcagaggaaccggctcccaggcaacttgttccagcgatggcatgttcctctagaactccagatgacaagacaaatggctagctctggtgcatcagggggcaaaatcgataattctgtgttagtccttattgtgggcttatcaacagtaggagctggtgcctatgcctacaagactatgaaagaggatgaaaaaagatacaatgaaagaatttcagggttagggctgacaccagaacagaaacagaaaaaggccgcgttatctgcttcagaaggagaggaagttcctcaagacaaggcgccaagtcatgttcctttcctgctaattggtggaggcacagctgcttttgctgcagccagatccatccgggctcgggatcctggggccagggtactgattgtatctgaagatcctgagctgccgtacatgcgacctcctctttcaaaagaactgtggttttcagatgacccaaatgtcacaaagacactgcgattcaaacagtggaatggaaaagagagaagcatatatttccagccaccttctttctatgtctctgctcaggacctgcctcatattgagaatggtggtgtggctgtcctcactgggaagaaggtagtacagctggatgtgagagacaacatggtgaaacttaatgatggctctcaaataacctatgaaaagtgcttgattgcaacaggaggtactccaagaagtctgtctgccattgatagggctggagcagaggtgaagagtagaacaacgcttttcagaaagattggagactttagaagcttggagaagatttcacgggaagtcaaatcaattacgattatcggtgggggcttccttggtagcgaactggcctgtgctcttggcagaaaggctcgagccttgggcacagaagtgattcaactcttccccgagaaaggaaatatgggaaagatcctccccgaatacctcagcaactggaccatggaaaaagtcagacgagtggagtcagcagtggcaagttacttatcaagctgaaagacggcaggaaggtagaaactgaccacatagtggcagctgtgggcctggagcccaatgttgagttggccaagactggtggcctggaaatagactcagattttggtggcttccgggtaaatgcagagctacaagcacgctctaacatctgggtggtaagtgtgctacagcatgaccaggcata

SEQ ID NO: 313584 - DNA, 241 bp, Homo sapiens
atgatcacgctgttgtgagtggaagattggctggagaaaatatgactggagctgctaagccgtactggcatcagtcaatgttctggtaatagtggtgtgccttggagacccaactgattacaactcagtatctctaggaccataacacagagttatggtttggttttattatgagccagttagcttcatacagaagggaaaaaagtccatcttatgtccacacattctaccctcaggtagc

SEQ ID NO: 313585 - DNA, 890 bp, Homo sapiens
cagattcgcagtggtcgcttcttctcctggatttgttaaggattccaagtaactcttatttggagagaagacgatctgcacttcgcattttggcattgacatttaattttagggtcctttatatagaagggagagtaggagtgatttgggccccgatgttggctatgaagctattggtcttgtggacagtagtttgcccacagttggtgtttttgcaaaagcaactgcacaagacaaccccaaatctgccacagagcagtcaggaactggtatccgatcagagagtgagacagagtccgaggcctcagaaattactattcctcccagcaccccggcagttccacaggctcccgtccagggggaggactacggcaaaggtgtcatcttctacctcagggacaaagtggtcgtggggattgtgctatggaacatctttaaccgaatgccaatagcaaggaagatcattaaggacggtgagcagcatgaagatctcaatgaagtagccaaactattcaacattcatgaagactgaagccccacagtggaattggcaaacccactgcagcccctgagaggaggtcgaatgggtaaaggagcatttttttattcagcagactttctctgtgtatgagtgtgaatgatcaagtcctttgtgaatattttcaactatgtaggtaaattcttaatgttcacatagtgaaataaattctgattcttctaaattaaaaaaaaacaaaaaaaaaaaaaagggcggggggcaaaagttccccggagggcaaattacgcgtccccattttttacaaggggcctaggagggggttataaaaagggaggcggggttaaccggaggggaccgcttggactgggggaccatctgggggaatggacac

SEQ ID NO: 313586 - DNA, 2254 bp, Homo sapiens
tgctacgcctgcgcagtaggcctccggtcgccgttccccttccccggctctagcaggccggcttctctgtccaatgcccacccggagctgggaggaggagtctgcgtaatgtgcgtgtgaagagactgggggagctggccggggctcacggtgtttgacccgtcggtcgtgcgtgagaggaaagggaaggaggaggtcccgaatagcggtcgccgaaatgttccggtgtggaggcctggcggcgggtgctttgaagcagaagctggtgcccttggtgcggaccgtgtgcgtccgaagcccgaggcagaggaaccggctcccaggcaacttgttccagcgatggcatgttcctctagaactccagatgacaagacaaatggctagctctggtgcatcagggggcaaaatcgataattctgtgttagtccttattgtgggcttatcaacagtaggagctggtgcctatgcctacaagactatgaaagaggatgaaaaaagatacaatgaaagaatttcagggttagggctgacaccagaacagaaacagaaaaaggccgcgttatctgcttcagaaggagaggaagttcctcaagacaaggcgccaagtcatgttcctttcctgctaattggtggaggcacagctgcttttgctgcagccagatccatccgggctcgggatcctggggccagggtactgattgtatctgaagatcctgagctgccgtacatgcgacctcctctttcaaaagaactgtggttttcagatgacccaaatgtcacaaagacactgcgattcaaacagtggaatggaaaagagagaagcatatatttccagccaccttctttctatgtctctgctcaggacctgcctcatattgagaatggtggtgtggctgtcctcactgggaagaaggtagtacagctggatgtgagagacaacatggtgaaacttaatgatggctctcaaataacctatgaaaagtgcttgattgcaacaggaggtactccaagaagtctgtctgccattgatagggctggagcagaggtgaagagtagaacaacgcttttcagaaagattggagactttagaagcttggagaagatttcacgggaagtcaaatcaattacgattatcggtgggggcttccttggtagcgaactggcctgtgctcttggcagaaaggctcgagccttgggcacagaagtgattcaactcttccccgagaaaggaaatatgggaaagatcctccccgaatacctcagcaactggaccatggaaaaagtcagacgagagggggttaaggtgatgcccaatgctattgtgcaatccgttggagtcagcagtggcaagttacttatcaagctgaaagacggcaggaaggtagaaactgaccacatagtggcagctgtgggcctggagcccaatgttgagttggccaagactggtggcctggaaatagactcagattttggtggcttccgggtaaatgcagagctacaagcacgctctaacatctgggtggcaggagatgctgcatgcttctacgatataaagttgggaaggaggcgggtagagcaccatgatcacgctgttgtgagtggaagattggctggagaaaatatgactggagctgctaagccgtactggcatcagtcaatgttctggagtgatttgggccccgatgttggctatgaagctattggtcttgtggacagtagtttgcccacagttggtgtttttgcaaaagcaactgcacaagacaaccccaaatctgccacagagcagtcaggaactggtatccgatcagagagtgagacagagtccgaggcctcagaaattactattcctcccagcaccccggcagttccacaggctcccgtccagggggaggactacggcaaaggtgtcatcttctacctcagggacaaagtggtcgtggggattgtgctatggaacatctttaaccgaatgccaatagcaaggaagatcattaaggacggtgagcagcatgaagatctcaatgaagtagccaaactattcaacattcatgaagactgaagccccacagtggaattggcaaacccactgcagcccctgagaggaggtcgaatgggtaaaggagcatttttttattcagcagactttctctgtgtatgagtgtgaatgatcaagtcctttgtgaatattttcaactatgtaggtaaattcttaatgttcacatagtgaaataaattctgattcttctaaattaaa

SEQ ID NO: 313587 - DNA, 1603 bp, Homo sapiens
aaatattaaggaaagtgagttatgaagatgataagggcaatgcagactacagaattatgggtgtctttgaactgctgcttcctgtaaaatgccaaaaacttctttgggcacatgatggttcccagcttgagagatctgtgagctccagttggaatgtttcatggcaactagttttcttaatgttctttttcagatatatgaaatcagggcatcttttcaggaggatgcttcctattcagaggttgcaaagcacttatgtaagccttaggtgactgcatgggtggaagtgcacagagttcaccatctgaagcttaatctggggccagcagttctgatacctgttgtatttgcgttacaaatgaacttgagcaccgaggccctcatgcccactgtcctgtaagtgggcgctcggcctggattgcagctctgccctgtctgtagtgagggctgcctgctgctcctttacttctcttcctgtattcctaggattgacttttgcttcctgctgtaactactctgtttcttcttcccagctcgagccttgggcacagaagtgattcaactcttccccgagaaaggaaatatgggaaagatcctccccgaatacctcagcaactggaccatggaaaaagtcagacgagagggggttaaggtgatgcccaatgctattgtgcaatccgttggagtcagcagtggcaagttacttatcaagctgaaagacggcaggaaggtagaaactgaccacatagtggcagctgtgggcctggagcccaatgttgagttggccaagactggtggcctggaaatagactcagattttggtggcttccgggtaaatgcagagctacaagcacgctctaacatctgggtggcaggagatgctgcatgcttctacgatataaagttgggaaggaggcgggtagagcaccatgatcacgctgttgtgagtggaagattggctggagaaaatatgactggagctgctaagccgtactggcatcagtcaatgttctggagtgatttgggccccgatgttggctatgaagctattggtcttgtggacagtagtttgcccacagttggtgtttttgcaaaagcaactgcacaagacaaccccaaatctgccacagagcagtcaggaactggtatccgatcagagagtgagacagagtccgaggcctcagaaattactattcctcccagcaccccggcagttccacaggctcccgtccagggggaggactacggcaaaggtgtcatcttctacctcagggacaaagtggtcgtggggattgtgctatggaacatctttaaccgaatgccaatagcaaggaagatcattaaggacggtgagcagcatgaagatctcaatgaagtagccaaactattcaacattcatgaagactgaagccccacagtggaattggcaaacccactgcagcccctgagaggaggtcgaatgggtaaaggagcatttttttattcagcagactttctctgtgtatgagtgtgaatgatcaagtcctttgtgaatattttcaactatgtaggtaaattcttaatgttcacatagtgaaataaattctgattcttctaaattaaa

SEQ ID NO: 313588 - DNA, 951 bp, Homo sapiens
  misc_feature (42)..(42): n is a, c, g, or t
  misc_feature (47)..(47): n is a, c, g, or t
  misc_feature (57)..(57): n is a, c, g, or t
  misc_feature (65)..(65): n is a, c, g, or t
gggctgctgtcatgcagaagtgagcggggataacgacagtgntgctntttagtagangaatcatnccgcaaatatcaccaagaaactgaccacatagtggcagctgtgggcctggagcccaatgttgagttggccaagactggtggcctggaaatagactcagattttggtggcttccgggtaaatgcagagctacaagcacgctctaacatctgggtggcaggagatgctgcatgcttctacgatataaagttgggaaggaggcgggtagagcaccatgatcacgctgttgtgagtggaagattggctggagaaaatatgactggagctgctaagccgtactggcatcagtcaatgttctggagtgatttgggccccgatgttggctatgaagctattggtcttgtggacagtagtttgcccacagttggtgtttttgcaaaagcaactgcacaagacaaccccaaatctgccacagagcagtcaggaactggtatccgatcagagagtgagacagagtccgaggcctcagaaattactattcctcccagcaccccggcagttccacaggctcccgtccagggggaggactacggcaaaggtgtcatcttctacctcagggacaaagtggtcgtggggattgtgctatggaacatctttaaccgaatgccaatagcaaggaagatcattaaggacggtgagcagcatgaagatctcaatgaagtagccaaactattcaacattcatgaagactgaagccccacagtggaattggcaaacccactgcagcccctgagaggaggtcgaatgggtaaaggagcatttttttattcagcagactttctctgtgtatgagtgtgaatgatcaagtcctttgtgaatattttcaactatgtaggtaaattcttaatgttcacatagtgaaataaattctgattcttctaaattaaa

SEQ ID NO: 313589 - DNA, 2016 bp, Homo sapiens
  misc_feature (1673)..(1673): n is a, c, g, or t
  misc_feature (1701)..(1701): n is a, c, g, or t
  misc_feature (1705)..(1705): n is a, c, g, or t
  misc_feature (1786)..(1786): n is a, c, g, or t
  misc_feature (1802)..(1802): n is a, c, g, or t
  misc_feature (1817)..(1817): n is a, c, g, or t
  misc_feature (1851)..(1851): n is a, c, g, or t
  misc_feature (1864)..(1864): n is a, c, g, or t
  misc_feature (1872)..(1872): n is a, c, g, or t
tgctacgcctgcgcagtaggcctccggtcgccgttccccttccccggctctagcaggccggcttctctgtccaatgcccacccggagctgggaggaggagtctgcgtaatgtgcgtgtgaagagactgggggagctggccggggctcacggtgtttgacccgtcggtcgtgcgtgagaggaaagggaaggaggaggtcccgaatagcggtcgccgaaatgttccggtgtggaggcctggcggcgggtgctttgaagcagaagctggtgcccttggtgcggaccgtgtgcgtccgaagcccgaggcagaggaaccggctcccaggcaacttgttccagcgatggcatgttcctctagaactccagatgacaagacaaatggctagctctggtgcatcagggggcaaaatcgataattctgtgttagtccttattgtgggcttatcaacagtaggagctggtgcctatgcctacaagactatgaaagaggatgaaaaaagatacaatgaaagaatttcagggttagggctgacaccagaacagaaacagaaaaaggccgcgttatctgcttcagaaggagaggaagttcctcaagacaaggcgccaagtcatgttcctttcctgctaattggtggaggcacagctgcttttgctgcagccagatccatccgggctcgggatcctggggccagggtactgattgtatctgaagatcctgagctgccgtacatgcgacctcctctttcaaaagaactgtggttttcagatgacccaaatgtcacaaagacactgcgattcaaacagtggaatggaaaagagagaagcatatatttccagccaccttctttctatgtctctgctcaggacctgcctcatattgagaatggtggtgtggctgtcctcactgggaagaaggtagtacagctggatgtgagagacaacatggtgaaacttaatgatggctctcaaataacctatgaaaagtgcttgattgcaacaggaggtactccaagaagtctgtctgccattgatagggctggagcagaggtgaagagtagaacaacgcttttcagaaagattggagactttagaagcttggagaagatttcacgggaagtcaaatcaattacgattatcggtgggggcttccttggtagcgaactggcctgtgctcttggcagaaaggctcgagccttgggcacagaagtgattcaactcttccccgagaaaggaaatatgggaaagatcctccccgaatacctcagcaactggaccatggaaaaagtcagacgagagggggttaaggtgatgcccaatgctattgtgcaatccgttggagtcagcagtggcaagttacttatcaagctgaaagacggcaggaaggtagaaactgaccacatagtggcagctgtgggcctggagcccaatgttgagttggccaagactggtggcctggaaatagactcagattttggtggcttccgggtaaatgcagagctacaagcacgctctaacatctgggtggcaggagatgctgcatgcttctacgatataaagttgggaaggaggcgggtagagcaccatgatcacgctgttgtgagtggaagattggctggagaaaatatgactggagctgctaagccgtactggcatcagtcaatgttctgagtgattngggcccgatgttgctatgagctatggtnctgngacagtagttgccacagttgtgttttgaaagcactgacagacacccaattgcacaagcatcagactgtatcgtcaagaggnacagatcgagcctagntactatctcagaccngcagtccggtcgtcagggagctcggaagtgactnactaggcaatgcnggatgctngacttacgatcatcaggacctagcggcctaactatgagcactacattgacggcacgatgacctagcgagggaggaggtttcacttcgaggagcactgattcatgatatctgactgtcggcccccccttgttaaggtacggacgc

SEQ ID NO: 313590 - DNA, 1862 bp, Homo sapiens
tgctacgcctgcgcagtaggcctccggtcgccgttccccttccccggctctagcaggccggcttctctgtccaatgcccacccggagctgggaggaggagtctgcgtaatgtgcgtgtgaagagactgggggagctggccggggctcacggtgtttgacccgtcggtcgtgcgtgagaggaaagggaaggaggaggtcccgaatagcggtcgccgaaatgttccggtgtggaggcctggcggcgggtgctttgaagcagaagctggtgcccttggtgcggaccgtgtgcgtccgaagcccgaggcagaggaaccggctcccaggcaacttgttccagcgatggcatgttcctctagaactccagatgacaagacaaatggctagctctggtgcatcagggggcaaaatcgataattctgtgttagtccttattgtgggcttatcaacagtaggagctggtgcctatgcctacaagactatgaaagaggatgaaaaaagatacaatgaaagaatttcagggttagggctgacaccagaacagaaacagaaaaaggccgcgttatctgcttcagaaggagaggaagttcctcaagacaaggcgccaagtcatgttcctttcctgctaattggtggaggcacagctgcttttgctgcagccagatccatccgggctcgggatcctggggccagggtactgattgtatctgaagatcctgagctgccgtacatgcgacctcctctttcaaaagaactgtggttttcagatgacccaaatgtcacaaagacactgcgattcaaacagtggaatggaaaagagagaagcatatatttccagccaccttctttctatgtctctgctcaggacctgcctcatattgagaatggtggtgtggctgtcctcactgggaagaaggtagtacagctggatgtgagagacaacatggtgaaacttaatgatggctctcaaataacctatgaaaagtgcttgattgcaacaggaggtactccaagaagtctgtctgccattgatagggctggagcagaggtgaagagtagaacaacgcttttcagaaagattggagactttagaagcttggagaagatttcacgggaagtcaaatcaattacgattatcggtgggggcttccttggtagcgaactggcctgtgctcttggcagaaaggctcgagccttgggcacagaagtgattcaactcttccccgagaaaggaaatatgggaaagatcctccccgaatacctcagcaactggaccatggaaaaagtcagacgagagggggttaaggtgatgcccaatgctattgtgcaatccgttggagtcagcagtggcaagttacttatcaagctgaaagacggcaggaaggtagaaactgaccacatagtggcagctgtgggcctggagcccaatgttgagttggccaagactggtggcctggaaatagactcagattttggtggcttccgggtaaatgcagagctacaagcacgctctaacatctgggtggcaggagatgctgcatgcttctacgatataaagttgggaaggaggcgggtagagcaccatgatcacgctgttgtgagtggaagattggctggagaaaatatgactggagctgctaagccgtactggcatcagtcaatgttctggagtgatttgggccccgatgttggccaactcaacattgggctccaggcccacagctgccactgtgtggtcagtttctaccttcctgccgtctttcagcttgataagtaacttgccactgctgactccaacggattgcacaatagcattgggcatcaccttaaccccctctcgtctgactttttccatggtccagttg

SEQ ID NO: 313591 - DNA, 1054 bp, Homo sapiens
tgctacgcctgcgcagtaggcctccggtcgccgttccccttccccggctctagcaggccggcttctctgtccaatgcccacccggagctgggaggaggagtctgcgtaatgtgcgtgtgaagagactgggggagctggccggggctcacggtgtttgacccgtcggtcgtgcgtgagaggaaagggaaggaggaggtcccgaatagcggtcgccgaaatgttccggtgtggaggcctggcggcgggtgctttgaagcagaagctggtgcccttggtgcggaccgtgtgcgtccgaagcccgaggcagaggaaccggctcccaggcaacttgttccagcgatggcatgttcctctagaactccagatgacaagacaaatggctagctctggtgcatcagggggcaaaatcgataattctgtgttagtccttattgtgggcttatcaacagtaggagctggtgcctatgcctacaagactatgaaagaggatgaaaaaagatacaatgaaagaatttcagggttagggctgacaccagaacagaaacagaaaaaggccgcgttatctgcttcagaaggagaggaagttcctcaagacaaggcgccaagtcatgttcctttcctgctaattggtggaggcacagctgcttttgctgcagccagatccatccgggctcgggatcctggggccagggtactgattgtatctgaagatcctgagctgccgtacatgcgacctcctctttcaaaagaactgtggttttcagatgacccaaatgtcacaaagacactgcgattcaaacagtggaatggaaaagagagaagcatatatttccagccaccttctttctatgtctctgctcaggacctgcctcatattgagaatggtggtgtggctgtcctcactgggaagaaggtagtacagctggatgtgagagacaacatggtgaaacttaatgatggctctcaaataacctatggggctggagcagaggtgaagagtagaacaacgcttttcaggattggagactttagaagcttggaggatttccggggt

SEQ ID NO: 313592 - DNA, 2949 bp, Homo sapiens
agcgggggggggccagcggcgcgggcgggtgagaggccgcggcggcaggtccacctgggcttgcgaaggcacagattccccgtccacagctcacgaccagatgcaccagcaggagtccacatcgaggacgtcctccgggcactcccacgaccagtgaccaggagttaaactttgggatgtgcccgtgatgttggaccacaaggacttagaggccgaaatccaccccttgaaaaatgaagaaagaaaatcgcaggaaaatctgggaaatccatcaaaaaatgaggataacgtgaaaagcgcgcctccacagtcccggctctcccggtgccgagcggcggcgttttttctttcattgtttctctgcctttttgtggtgttcgtcgtctcattcgtcatcccgtgtccagaccggccggcgtcacagcgaatgtggaggatagactacagtgccgctgttatctatgactttctggctgtggatgatataaacggggacaggatccaagatgttctttttctttataaaaacaccaacagcagcaacaatttcagccgatcctgtgtggacgaaggcttttcctctccctgcacctttgcagctgctgtgtcgggggccaacggcagcacgctctgggagagacctgtggcccaagacgtggccctcgtggagtgtgctgtgccccagccaagaggcagtgaggcaccttctgcctgcatcctggtgggcagacccagttctttcattgcagtcaacttgttcacaggggaaaccctgtggaaccacagcagcagcttcagcgggaatgcgtccatcctgagccctctgctgcaggtgcctgatgtggacggcgatggggccccagacctgctggttctcacccaggagcgggaggaggttagtggccacctctactccggcagcaccgggcaccagattggcctcagaggcagccttggtgtggacggggaaagtggcttcctccttcacgtcaccaggacaggtgcccactacatcctctttccctgcgcaagctccctctgcggctgctctgtgaagggtctctacgagaaggtgaccgggagcggcggcccgttcaagagtgacccgcactgggagagcatgctcaatgccaccacccgcaggatgctttcccacagctctggagcagtgcgctacctgatgcatgtcccagggaacgccggtgcagatgtgcttcttgtgggctcagaggccttcgtgctgctggacgggcaggagctgacgcctcgctggacacccaaggcagcccatgtcctgagaaaacccatcttcggccgctacaaaccagacaccttggctgtagccgttgaaaacggaactggcaccgacagacagatcctgtttctggaccttggcactggagccgtcctgtgtagcctagccctcccgagcctccctgggggtccactgtccgccagcctgccgaccgcagaccaccgctcagccttcttcttctggggcctccacgagctggggagcaccagcgagacggagaccggggaggcccggcacagcctgtacatgttccaccccaccctgccgcgcgtgctgctggagctggccaatgtctctacccacattgtcgcctttgacgccgtcctgtttgagccaagccgccacgccgcctacatccttctgacaggcccggcagactcagaggcacccggcctggtctctgtgatcaagcacaaggtgcgggaccttgtcccaagcagcagggtggtccgcctgggtgagggtgggccagacagtgaccaagccatcagggaccggttctcccggctgcggtaccagagtgaggcgtagaggcacgccagccagagcctgtggagagactccgcctgctgacactaaacgtcctgggaagtgggcccttccctgggtctctgcactgactcccccactcctgaccctggtgatggtcgccactgggcagcagcagccttaccagtcctccatgatcacacccagggacctgcatgggtgaggggacaccctgggcctctctcccgcccagcatcctccctgagtccccacacagggcctcactctgcaccccaccagggtcccgctcacaccaggcagccttcatagtggtctccctggccaccttgggcagagctgggtcatgcagcaccccatccttacccggtgccctctccttgccagcttctccccaggccagagcggccatcgcgtagaaagaaccagggtgtccccgggacaggccgtcccccaccccatcctgtagaagtccattccccttttccctcctgtgctctgtcccccaaggagtcatggaactcagggtactgggcctcaacgggaacctgagacagctccagcttcgcagcccttcccggagctacagggggatcctctagcatggggggtgtgacttggttcctttgaccaggtcctgtgaggaagcctggagcaagggtctcccccagcaggatgggtggggcctgctctggagctgagcccgtggccgctcacaggtgtccttagtggtgttgcagctgtctactggctgcatgtgctgtgaatatcccaaggaactggctgtggaatgcgtgtttgggtcagtctgtgccctctcagtagacactggagctgctctgtccctgaagaggccccgtgccccaggcatggcaagcgcctgcctctccccttccggtgctcacacgcccacgccgtgccacccgatgcaggactcacctctgtgccttgctgctcctgaggcccaagggcagccatggtgctctgtactgctcgggccgcccaggtcacagagcctgagcttcgtagccaaagcagcctgatgacccacccaccaaggaagaaagcagaataaacatttttgcactgcctgaaaaaccccggtggtcaggcgtgagcctagcgtg

SEQ ID NO: 313593 - DNA, 526 bp, Homo sapiens
cacacctctcctaggccacagcccctcccgccaggtggatctcctgtatcttgcaggctcccggggctctaatgctgaccccacggggctcaggggccagggagaggtgtgaggaaaacagacctggaacagcacatgctggggctggccggcctgcctgcccagatggtgcaacagtgaggtgccggtgtctctccctacaggcttttcctctccctgcacctttgcagctgctgtgtcgggggccaacggcagcacgctctgggagagacctgtggcccaagacgtggccctcgtggagtgtgctgtgccccagccaagaggcagtgaggcaccttctgcctgcatcctggtgggcagacccagttctttcattgcagtcaacttgttcacaggtaggccagccaggcagcggggttctcactgagggcctctcacctgagccacctcaccctgagggctaatgccaggaggccgcgacgaggctcagccctgtgatcttgagggtggctggatgggaaggaag

SEQ ID NO: 313594 - DNA, 2922 bp, Homo sapiens
agcgggggggggccagcggcgcgggcgggtgagaggccgcggcggcaggtccacctgggcttgcgaaggcacagattccccgtccacagctcacgaccagatgcaccagcaggagtccacatcgaggacgtcctccgggcactcccacgaccagtgaccaggagttaaactttgggatgtgcccgtgatgttggaccacaaggacttagaggccgaaatccaccccttgaaaaatgaagaaagaaaatcgcaggaaaatctgggaaatccatcaaaaaatgaggataacgtgaaaagcgcgcctccacagtcccggctctcccggtgccgagcggcggcgttttttctttcattgtttctctgcctttttgtggtgttcgtcgtctcattcgtcatcccgtgtccagaccggccggcgtcacagcgaatgtggaggatagactacagtgccgctgttatctatgactttctggctgtggatgatataaacggggacaggatccaagatgttctttttctttataaaaacaccaacagcagcaacaatttcagccgatcctgtgtggacgaagctgctgtgtcgggggccaacggcagcacgctctgggagagacctgtggcccaagacgtggccctcgtggagtgtgctgtgccccagccaagaggcagtgaggcaccttctgcctgcatcctggtgggcagacccagttctttcattgcagtcaacttgttcacaggggaaaccctgtggaaccacagcagcagcttcagcgggaatgcgtccatcctgagccctctgctgcaggtgcctgatgtggacggcgatggggccccagacctgctggttctcacccaggagcgggaggaggttagtggccacctctactccggcagcaccgggcaccagattggcctcagaggcagccttggtgtggacggggaaagtggcttcctccttcacgtcaccaggacaggtgcccactacatcctctttccctgcgcaagctccctctgcggctgctctgtgaagggtctctacgagaaggtgaccgggagcggcggcccgttcaagagtgacccgcactgggagagcatgctcaatgccaccacccgcaggatgctttcccacagctctggagcagtgcgctacctgatgcatgtcccagggaacgccggtgcagatgtgcttcttgtgggctcagaggccttcgtgctgctggacgggcaggagctgacgcctcgctggacacccaaggcagcccatgtcctgagaaaacccatcttcggccgctacaaaccagacaccttggctgtagccgttgaaaacggaactggcaccgacagacagatcctgtttctggaccttggcactggagccgtcctgtgtagcctagccctcccgagcctccctgggggtccactgtccgccagcctgccgaccgcagaccaccgctcagccttcttcttctggggcctccacgagctggggagcaccagcgagacggagaccggggaggcccggcacagcctgtacatgttccaccccaccctgccgcgcgtgctgctggagctggccaatgtctctacccacattgtcgcctttgacgccgtcctgtttgagccaagccgccacgccgcctacatccttctgacaggcccggcagactcagaggcacccggcctggtctctgtgatcaagcacaaggtgcgggaccttgtcccaagcagcagggtggtccgcctgggtgagggtgggccagacagtgaccaagccatcagggaccggttctcccggctgcggtaccagagtgaggcgtagaggcacgccagccagagcctgtggagagactccgcctgctgacactaaacgtcctgggaagtgggcccttccctgggtctctgcactgactcccccactcctgaccctggtgatggtcgccactgggcagcagcagccttaccagtcctccatgatcacacccagggacctgcatgggtgaggggacaccctgggcctctctcccgcccagcatcctccctgagtccccacacagggcctcactctgcaccccaccagggtcccgctcacaccaggcagccttcatagtggtctccctggccaccttgggcagagctgggtcatgcagcaccccatccttacccggtgccctctccttgccagcttctccccaggccagagcggccatcgcgtagaaagaaccagggtgtccccgggacaggccgtcccccaccccatcctgtagaagtccattccccttttccctcctgtgctctgtcccccaaggagtcatggaactcagggtactgggcctcaacgggaacctgagacagctccagcttcgcagcccttcccggagctacagggggatcctctagcatggggggtgtgacttggttcctttgaccaggtcctgtgaggaagcctggagcaagggtctcccccagcaggatgggtggggcctgctctggagctgagcccgtggccgctcacaggtgtccttagtggtgttgcagctgtctactggctgcatgtgctgtgaatatcccaaggaactggctgtggaatgcgtgtttgggtcagtctgtgccctctcagtagacactggagctgctctgtccctgaagaggccccgtgccccaggcatggcaagcgcctgcctctccccttccggtgctcacacgcccacgccgtgccacccgatgcaggactcacctctgtgccttgctgctcctgaggcccaagggcagccatggtgctctgtactgctcgggccgcccaggtcacagagcctgagcttcgtagccaaagcagcctgatgacccacccaccaaggaagaaagcagaataaacatttttgcactgcctgaaaaaccccggtggtcaggcgtgagcctagcgtg

SEQ ID NO: 313595 - DNA, 3246 bp, Homo sapiens
agcgggggggggccagcggcgcgggcgggtgagaggccgcggcggcaggtccacctgggcttgcgaaggcacagattccccgtccacagctcacgaccagatgcaccagcaggagtccacatcgaggacgtcctccgggcactcccacgaccagtgaccaggagttaaactttgggatgtgcccgtgatgttggaccacaaggacttagaggccgaaatccaccccttgaaaaatgaagaaagaaaatcgcaggaaaatctgggaaatccatcaaaaaatgaggataacgtgaaaagcgcgcctccacagtcccggctctcccggtgccgagcggcggcgttttttctttcattgtttctctgcctttttgtggtgttcgtcgtctcattcgtcatcccgtgtccagaccggccggcgtcacagcgaatgtggaggatagactacagtgccgctgttatctatgactttctggctgtggatgatataaacggggacaggatccaagatgttctttttctttataaaaacaccaacagcagcaacaatttcagccgatcctgtgtggacgaaggcttttcctctccctgcacctttgcagctgctgtgtcgggggccaacggcagcacgctctgggagagacctgtggcccaagacgtggccctcgtggagtgtgctgtgccccagccaagaggcagtgaggcaccttctgcctgcatcctggtgggcagacccagttctttcattgcagtcaacttgttcacaggggaaaccctgtggaaccacagcagcagcttcagcgggaatgcgtccatcctgagccctctgctgcaggtgcctgatgtggacggcgatggggccccagacctgctggttctcacccaggagcgggaggaggttagtggccacctctactccggcagcaccgggcaccagattggcctcagaggcagccttggtgtggacggggaaagtggcttcctccttcacgtcaccaggacaggtgcccactacatcctctttccctgcgcaagctccctctgcggctgctctgtgaagggtctctacgagaaggtgaccgggagcggcggcccgttcaagagtgacccgcactgggagagcatgctcaatgccaccacccgcaggatgctttcccacagctctggagcagtgcgctacctgatgcatgtcccagggaacgccggtgcagatgtgcttcttgtgggctcagaggccttcgtgctgctggacgggcaggagctgacgcctcgctggacacccaaggcagcccatgtcctgaggtacagggtttccccaaggaccgcgcaggtgctgcaccccttcccggcatcccgggcacatcccgttggctggcgaggagacagcgctgggggtggggccggagccgtggtgctgctgcccgggcttcttgcctgtctctggtacttgccccttgccccagacgtcggctccgtgtcctgggccctggtccagatgtggccatgggagactgaggggcggacgtgttcctgggtgcttccttcatctcagtctcctcactgagacccctcgtgagcgcttcctccatattgttccagaaaacccatcttcggccgctacaaaccagacaccttggctgtagccgttgaaaacggaactggcaccgacagacagatcctgtttctggaccttggcactggagccgtcctgtgtagcctagccctcccgagcctccctgggggtccactgtccgccagcctgccgaccgcagaccaccgctcagccttcttcttctggggcctccacgagctggggagcaccagcgagacggagaccggggaggcccggcacagcctgtacatgttccaccccaccctgccgcgcgtgctgctggagctggccaatgtctctacccacattgtcgcctttgacgccgtcctgtttgagccaagccgccacgccgcctacatccttctgacaggcccggcagactcagaggcacccggcctggtctctgtgatcaagcacaaggtgcgggaccttgtcccaagcagcagggtggtccgcctgggtgagggtgggccagacagtgaccaagccatcagggaccggttctcccggctgcggtaccagagtgaggcgtagaggcacgccagccagagcctgtggagagactccgcctgctgacactaaacgtcctgggaagtgggcccttccctgggtctctgcactgactcccccactcctgaccctggtgatggtcgccactgggcagcagcagccttaccagtcctccatgatcacacccagggacctgcatgggtgaggggacaccctgggcctctctcccgcccagcatcctccctgagtccccacacagggcctcactctgcaccccaccagggtcccgctcacaccaggcagccttcatagtggtctccctggccaccttgggcagagctgggtcatgcagcaccccatccttacccggtgccctctccttgccagcttctccccaggccagagcggccatcgcgtagaaagaaccagggtgtccccgggacaggccgtcccccaccccatcctgtagaagtccattccccttttccctcctgtgctctgtcccccaaggagtcatggaactcagggtactgggcctcaacgggaacctgagacagctccagcttcgcagcccttcccggagctacagggggatcctctagcatggggggtgtgacttggttcctttgaccaggtcctgtgaggaagcctggagcaagggtctcccccagcaggatgggtggggcctgctctggagctgagcccgtggccgctcacaggtgtccttagtggtgttgcagctgtctactggctgcatgtgctgtgaatatcccaaggaactggctgtggaatgcgtgtttgggtcagtctgtgccctctcagtagacactggagctgctctgtccctgaagaggccccgtgccccaggcatggcaagcgcctgcctctccccttccggtgctcacacgcccacgccgtgccacccgatgcaggactcacctctgtgccttgctgctcctgaggcccaagggcagccatggtgctctgtactgctcgggccgcccaggtcacagagcctgagcttcgtagccaaagcagcctgatgacccacccaccaaggaagaaagcagaataaacatttttgcactgcctgaaaaaccccggtggtcaggcgtgagcctagcgtg

SEQ ID NO: 313596 - DNA, 3486 bp, Homo sapiens
agcgggggggggccagcggcgcgggcgggtgagaggccgcggcggcaggtccacctgggcttgcgaaggcacagattccccgtccacagctcacgaccagatgcaccagcaggagtccacatcgaggacgtcctccgggcactcccacgaccagtgaccaggagttaaactttgggatgtgcccgtgatgttggaccacaaggacttagaggccgaaatccaccccttgaaaaatgaagaaagaaaatcgcaggaaaatctgggaaatccatcaaaaaatgaggataacgtgaaaagcgcgcctccacagtcccggctctcccggtgccgagcggcggcgttttttctttcattgtttctctgcctttttgtggtgttcgtcgtctcattcgtcatcccgtgtccagaccggccggcgtcacagcgaatgtggaggatagactacagtgccgctgttatctatgactttctggctgtggatgatataaacggggacaggatccaagatgttctttttctttataaaaacaccaacagcagcaacaatttcagccgatcctgtgtggacgaaggcttttcctctccctgcacctttgcagctgctgtgtcgggggccaacggcagcacgctctgggagagacctgtggcccaagacgtggccctcgtggagtgtgctgtgccccagccaagaggcagtgaggcaccttctgcctgcatcctggtgggcagacccagttctttcattgcagtcaacttgttcacaggggaaaccctgtggaaccacagcagcagcttcagcgggaatgcgtccatcctgagccctctgctgcaggtgcctgatgtggacggcgatggggccccagacctgctggttctcacccaggagcgggaggaggttagtggccacctctactccggcagcaccgggcaccagattggcctcagaggcagccttggtgtggacggggaaagtggcttcctccttcacgtcaccaggacaggtgcccactacatcctctttccctgcgcaagctccctctgcggctgctctgtgaagggtctctacgagaaggtgaccgggagcggcggcccgttcaagagtgacccgcactgggagagcatgctcaatgccaccacccgcaggatgctttcccacagctctggagcagtgcgctacctgatgcatgtcccagggaacgccggtgcagatgtgcttcttgtgggctcagaggccttcgtgctgctggacgggcaggagctgacgcctcgctggacacccaaggcagcccatgtcctgaggtacagggtttccccaaggaccgcgcaggtgctgcaccccttcccggcatcccgggcacatcccgttggctggcgaggagacagcgctgggggtggggccggagccgtggtgctgctgcccgggcttcttgcctgtctctggtacttgccccttgccccagacgtcggctccgtgtcctgggccctggtccagatgtggccatgggagactgaggggcggacgtgttcctgggtgcttccttcatctcagtctcctcactgagacccctcgtgagcgcttcctccatattgttccagaaaacccatcttcggccgctacaaaccagacaccttggctgtagccgttgaaaacggaactggcaccgacagacaggttcgttgttcttccttcggaggtggcacctttgttcttagctgaggatagactggtctgaaagcagacggggctgcggcccaggaggctgctgccgtcagagctgctgagaaggttctgcctccctcagagcatctgcctccagggctggcatggctgagggcacgtgtgcctgtgcaagcctcgagcttttcccggtagcccccacgttggcccccacagtgtcccctccctccccagatcctgtttctggaccttggcactggagccgtcctgtgtagcctagccctcccgagcctccctgggggtccactgtccgccagcctgccgaccgcagaccaccgctcagccttcttcttctggggcctccacgagctggggagcaccagcgagacggagaccggggaggcccggcacagcctgtacatgttccaccccaccctgccgcgcgtgctgctggagctggccaatgtctctacccacattgtcgcctttgacgccgtcctgtttgagccaagccgccacgccgcctacatccttctgacaggcccggcagactcagaggcacccggcctggtctctgtgatcaagcacaaggtgcgggaccttgtcccaagcagcagggtggtccgcctgggtgagggtgggccagacagtgaccaagccatcagggaccggttctcccggctgcggtaccagagtgaggcgtagaggcacgccagccagagcctgtggagagactccgcctgctgacactaaacgtcctgggaagtgggcccttccctgggtctctgcactgactcccccactcctgaccctggtgatggtcgccactgggcagcagcagccttaccagtcctccatgatcacacccagggacctgcatgggtgaggggacaccctgggcctctctcccgcccagcatcctccctgagtccccacacagggcctcactctgcaccccaccagggtcccgctcacaccaggcagccttcatagtggtctccctggccaccttgggcagagctgggtcatgcagcaccccatccttacccggtgccctctccttgccagcttctccccaggccagagcggccatcgcgtagaaagaaccagggtgtccccgggacaggccgtcccccaccccatcctgtagaagtccattccccttttccctcctgtgctctgtcccccaaggagtcatggaactcagggtactgggcctcaacgggaacctgagacagctccagcttcgcagcccttcccggagctacagggggatcctctagcatggggggtgtgacttggttcctttgaccaggtcctgtgaggaagcctggagcaagggtctcccccagcaggatgggtggggcctgctctggagctgagcccgtggccgctcacaggtgtccttagtggtgttgcagctgtctactggctgcatgtgctgtgaatatcccaaggaactggctgtggaatgcgtgtttgggtcagtctgtgccctctcagtagacactggagctgctctgtccctgaagaggccccgtgccccaggcatggcaagcgcctgcctctccccttccggtgctcacacgcccacgccgtgccacccgatgcaggactcacctctgtgccttgctgctcctgaggcccaagggcagccatggtgctctgtactgctcgggccgcccaggtcacagagcctgagcttcgtagccaaagcagcctgatgacccacccaccaaggaagaaagcagaataaacatttttgcactgcctgaaaaaccccggtggtcaggcgtgagcctagcgtg

SEQ ID NO: 313597 - DNA, 2364 bp, Homo sapiens
cacgagcacaggagtgccgccctcccctcctgttggcatctgctctgagtgtgcagtgagccgtgggctcacgagggtgatgcctcaacaggagcctgcctgtcacaggccttgcagttgccgggctgctgttgaaggggactcagggccacgttccgtgaccgtgtgcttgattctaggggaaaccctgtggaaccacagcagcagcttcagcgggaatgcgtccatcctgagccctctgctgcaggtgcctgatgtggacggcgatggggccccagacctgctggttctcacccaggagcgggaggaggttagtggccacctctactccggcagcaccgggcaccagattggcctcagaggcagccttggtgtggacggggaaagtggcttcctccttcacgtcaccaggacaggtgcccactacatcctctttccctgcgcaagctccctctgcggctgctctgtgaagggtctctacgagaaggtgaccgggagcggcggcccgttcaagagtgacccgcactgggagagcatgctcaatgccaccacccgcaggatgctttcccacagctctggagcagtgcgctacctgatgcatgtcccagggaacgccggtgcagatgtgcttcttgtgggctcagaggccttcgtgctgctggacgggcaggagctgacgcctcgctggacacccaaggcagcccatgtcctgagaaaacccatcttcggccgctacaaaccagacaccttggctgtagccgttgaaaacggaactggcaccgacagacagatcctgtttctggaccttggcactggagccgtcctgtgtagcctagccctcccgagcctccctgggggtccactgtccgccagcctgccgaccgcagaccaccgctcagccttcttcttctggggcctccacgagctggggagcaccagcgagacggagaccggggaggcccggcacagcctgtacatgttccaccccaccctgccgcgcgtgctgctggagctggccaatgtctctacccacattgtcgcctttgacgccgtcctgtttgagccaagccgccacgccgcctacatccttctgacaggcccggcagactcagaggcacccggcctggtctctgtgatcaagcacaaggtgcgggaccttgtcccaagcagcagggtggtccgcctgggtgagggtgggccagacagtgaccaagccatcagggaccggttctcccggctgcggtaccagagtgaggcgtagaggcacgccagccagagcctgtggagagactccgcctgctgacactaaacgtcctgggaagtgggcccttccctgggtctctgcactgactcccccactcctgaccctggtgatggtcgccactgggcagcagcagccttaccagtcctccatgatcacacccagggacctgcatgggtgaggggacaccctgggcctctctcccgcccagcatcctccctgagtccccacacagggcctcactctgcaccccaccagggtcccgctcacaccaggcagccttcatagtggtctccctggccaccttgggcagagctgggtcatgcagcaccccatccttacccggtgccctctccttgccagcttctccccaggccagagcggccatcgcgtagaaagaaccagggtgtccccgggacaggccgtcccccaccccatcctgtagaagtccattccccttttccctcctgtgctctgtcccccaaggagtcatggaactcagggtactgggcctcaacgggaacctgagacagctccagcttcgcagcccttcccggagctacagggggatcctctagcatggggggtgtgacttggttcctttgaccaggtcctgtgaggaagcctggagcaagggtctcccccagcaggatgggtggggcctgctctggagctgagcccgtggccgctcacaggtgtccttagtggtgttgcagctgtctactggctgcatgtgctgtgaatatcccaaggaactggctgtggaatgcgtgtttgggtcagtctgtgccctctcagtagacactggagctgctctgtccctgaagaggccccgtgccccaggcatggcaagcgcctgcctctccccttccggtgctcacacgcccacgccgtgccacccgatgcaggactcacctctgtgccttgctgctcctgaggcccaagggcagccatggtgctctgtactgctcgggccgcccaggtcacagagcctgagcttcgtagccaaagcagcctgatgacccacccaccaaggaagaaagcagaataaacatttttgcactgcctgaaaaaccccggtggtcaggcgtgagcctagcgtg

SEQ ID NO: 313598 - DNA, 1901 bp, Homo sapiens
agcgggggggggccagcggcgcgggcgggtgagaggccgcggcggcaggtccacctgggcttgcgaaggcacagattccccgtccacagctcacgaccagatgcaccagcaggagtccacatcgaggacgtcctccgggcactcccacgaccagtgaccaggagttaaactttgggatgtgcccgtgatgttggaccacaaggacttagaggccgaaatccaccccttgaaaaatgaagaaagaaaatcgcaggaaaatctgggaaatccatcaaaaaatgaggataacgtgaaaagcgcgcctccacagtcccggctctcccggtgccgagcggcggcgttttttctttcattgtttctctgcctttttgtggtgttcgtcgtctcattcgtcatcccgtgtccagaccggccggcgtcacagcgaatgtggaggatagactacagtgccgctgttatctatgactttctggctgtggatgatataaacggggacaggatccaagatgttctttttctttataaaaacaccaacagcagcaacaatttcagccgatcctgtgtggacgaaggcttttcctctccctgcacctttgcagctgctgtgtcgggggccaacggcagcacgctctgggagagacctgtggcccaagacgtggccctcgtggagtgtgctgtgccccagccaagaggcagtgaggcaccttctgcctgcatcctggtgggcagacccagttctttcattgcagtcaacttgttcacaggggaaaccctgtggaaccacagcagcagcttcagcgggaatgcgtccatcctgagccctctgctgcaggtgcctgatgtggacggcgatggggccccagacctgctggttctcacccaggagcgggaggaggttagtggccacctctactccggcagcaccgggcaccagattggcctcagaggcagccttggtgtggacggggaaagtggcttcctccttcacgtcaccaggacaggtgcccactacatcctctttccctgcgcaagctccctctgcggctgctctgtgaagggtctctacgagaaggtgaccgggagcggcggcccgttcaagagtgacccgcactgggagagcatgctcaatgccaccacccgcaggatgctttcccacagctctggagcagtgcgctacctgatgcatgtcccagggaacgccggtgcagatgtgcttcttgtgggctcagaggccttcgtgctgctggacgggcaggagctgacgcctcgctggacacccaaggcagcccatgtcctgagaaaacccatcttcggccgctacaaaccagacaccttggctgtagccgttgaaaacggaactggcaccgacagacagatcctgtttctggaccttggcactggagccgtcctgtgtagcctagccctcccgagcctccctgggggtccactgtccgccagcctgccgaccgcagaccaccgctcagccttcttcttctggggcctccacgagctggggagcaccagcgagacggagaccggggaggcccggcacagcctgtacatgttccaccccaccctgccgcgcgtgctgctggagctggccaatgtctctacccacattgtcgcctttgacgccgtcctgtttgagccaagccgccacgccgcctacatccttctgacaggcccggcagactcagaggcacccggcctggtctctgtgccttgctgctcctgaggcccaagggcagccatggtgctctgtactgctcgggccgcccaggtcacagagcctgagcttcgtagccaaagcagcctgatgacccacccaccaaggaagaaagcagaataaacatttttgcactgcctgaaaaaccccggtggtcaggcgtgagcctagcgtg

SEQ ID NO: 313599 - DNA, 1827 bp, Homo sapiens
agcgggggggggccagcggcgcgggcgggtgagaggccgcggcggcaggtccacctgggcttgcgaaggcacagattccccgtccacagctcacgaccagatgcaccagcaggagtccacatcgaggacgtcctccgggcactcccacgaccagtgaccaggagttaaactttgggatgtgcccgtgatgttggaccacaaggacttagaggccgaaatccaccccttgaaaaatgaagaaagaaaatcgcaggaaaatctgggaaatccatcaaaaaatgaggataacgtgaaaagcgcgcctccacagtcccggctctcccggtgccgagcggcggcgttttttctttcattgtttctctgcctttttgtggtgttcgtcgtctcattcgtcatcccgtgtccagaccggccggcgtcacagcgaatgtggaggatagactacagtgccgctgttatctatgactttctggctgtggatgatataaacggggacaggatccaagatgttctttttctttataaaaacaccaacagcagcaacaatttcagccgatcctgtgtggacgaaggcttttcctctccctgcacctttgcagctgctgtgtcgggggccaacggcagcacgctctgggagagacctgtggcccaagacgtggccctcgtggagtgtgctgtgccccagccaagaggcagtgaggcaccttctgcctgcatcctggtgggcagacccagttctttcattgcagtcaacttgttcacaggggaaaccctgtggaaccacagcagcagcttcagcgggaatgcgtccatcctgagccctctgctgcaggtgcctgatgtggacggcgatggggccccagacctgctggttctcacccaggagcgggaggaggttagtggccacctctactccggcagcaccgggcaccagattggcctcagaggcagccttggtgtggacggggaaagtggcttcctccttcacgtcaccaggacaggtgcccactacatcctctttccctgcgcaagctccctctgcggctgctctgtgaagggtctctacgagaaggtgaccgggagcggcggcccgttcaagagtgacccgcactgggagagcatgctcaatgccaccacccgcaggatgctttcccacagctctggagcagtgcgctacctgatgcatgtcccagggaacgccggtgcagatgtgcttcttgtgggctcagaggccttcgtgctgctggacgggcaggagctgacgcctcgctggacacccaaggcagcccatgtcctgagaaaacccatcttcggccgctacaaaccagacaccttggctgtagccgttgaaaacggaactggcaccgacagacaggttcgttgttcttccttcggaggtggcacctttgttcttagctgaggatagactggtctgaaagcagacggggctgcggcccaggaggctgctgccgtcagagctgctgagaaggttctgcctccctcagagcatctgcctccagggctggcatggctgagggcacgtgtgcctgtgcaagcctcgagcttttcccggtagcccccacgttggcccccacagtgtcccctccctccccagatcctgtttctggaccttggcactggagccgtcctgtgtagcctagccctcccgagcctccctgggggtccactgtccgccagcctgccgaccgcagaccaccgctcagccttcttcttctggggcctccacgagctggggagcaccagcgagacggtacgggagccaccctcggagcagccatgctgggagccggggccagagacccaggc

SEQ ID NO: 313600 - DNA, 660 bp, Homo sapiens
agcgggggggggccagcggcgcgggcgggtgagaggccgcggcggcaggtccacctgggcttgcgaaggcacagattccccgtccacagctcacgaccagatgcaccagcaggagtccacatcgaggacgtcctccgggcactcccacgaccagtgaccaggagttaaactttgggatgtgcccgtgatgttggaccacaaggacttagaggccgaaatccaccccttgaaaaatgaagaaagaaaatcgcaggaaaatctgggaaatccatcaaaaaatgaggataacgtgaaaagcgcgcctccacagtcccggctctcccggtgccgagcggcggcgttttttctttcattgtttctctgcctttttgtggtgttcgtcgtctcattcgtcatcccgtgtccagaccggccggcgtcacagcgaatgtggaggatagactacagtgccgctgttatctatgactttctggctgtggatgatataaacggggacaggatccaagatgttctttttctttataaaaacaccaacagcagcaacaatttcagccgatcctgtgtggacgaaggtcacagagcctgagcttcgtagccaaagcagcctgatgacccacccaccaaggaagaaagcagaataaacatttttgcactgcctga

SEQ ID NO: 313601 - DNA, 524 bp, Homo sapiens
gagacccctcgtgagcgcttcctccatattgttccagaaaacccatcttcggccgctacaaaccagacaccttggctgtagccgttgaaaacggaactggcaccgacagacaggttcgttgttcttccttcggaggtggcacctttgttcttagctgaggatagactggtctgaaagcagacggggctgcggcccaggaggctgctgccgtcagagctgctgagaaggttctgcctccctcagagcatctgcctccagggctggcatggctgagggcacgtgtgcctgtgcaagcctcgagcttttcccggtagcccccacgttggcccccacagtgtcccctccctccccagatcctgtttctggaccttggcactggagccgtcctgtgtagcctagccctcccgagcctccctgggggtccactgtccgccagcctgccgaccgcagaccaccgctcagccttcttcttctggggcctccacgagctggggagcaccagcgagacggtacgggagccaccc

SEQ ID NO: 313602 - DNA, 2916 bp, Homo sapiens
agcgggggggggccagcggcgcgggcgggtgagaggccgcggcggcaggtccacctgggcttgcgaaggcacagattccccgtccacagctcacgaccagatgcaccagcaggagtccacatcgaggacgtcctccgggcactcccacgaccagtgaccaggagttaaactttgggatgtgcccgtgatgttggaccacaaggacttagaggccgaaatccaccccttgaaaaatgaagaaagaaaatcgcaggaaaatctgggaaatccatcaaaaaatgaggataacgtgaaaagcgcgcctccacagtcccggctctcccggtgccgagcggcggcgttttttctttcattgtttctctgcctttttgtggtgttcgtcgtctcattcgtcatcccgtgtccagaccggccggcgtcacagcgaatgtggaggatagactacagtgccgctgttatctatgactttctggctgtggatgatataaacggggacaggatccaagatgttctttttctttataaaaacaccaacagcagcaacaatttcagccgatcctgtgtggacgaaggcttttcctctccctgcacctttgcagctgctgtgtcgggggccaacggcagcacgctctgggagagacctgtggcccaagacgtggccctcgtggagtgtgctgtgccccagccaagaggcagtgaggcaccttctgcctgcatcctggtgggcagacccagttctttcattgcagtcaacttgttcacaggggaaaccctgtggaaccacagcagcagcttcagcgggaatgcgtccatcctgagccctctgctgcaggtgcctgatgtggacggcgatggggccccagacctgctggttctcacccaggagcgggaggaggttagtggccacctctactccggcagcaccgggcaccagattggcctcagaggcagccttggtgtggacggggaaagtggcttcctccttcacgtcaccaggacaggtgcccactacatcctctttccctgcgcaagctccctctgcggctgctctgtgaagggtctctacgagaaggtgaccgggagcggcggcccgttcaagagtgacccgcactgggagagcatgctcaatgccaccacccgcaggatgctttcccacagctctggagcagtgcgctacctgatgcatgtcccagggaacgccggtgcagatgtgcttcttgtgggctcagaggccttcgtgctgctggacgggcaggagctgacgcctcgctggacacccaaggcagcccatgtcctgagaaaacccatcttcggccgctacaaaccagacaccttggctgtagccgttgaaaacggaactggcaccgacagacagatcctgtttctggaccttggcactggagccgtcctgtgtagcctagccctcccgagcctccctgggggtccactgtccgccagcctgccgaccgcagaccaccgctcagccttcttcttctggggcctccacgagctggggagcaccagcgagacggagaccggggaggcccggcacagcctgtacatgttccaccccaccctgccgcgcgtgctgctggagctggccaatgtctctacccacattgtcgcctttgacgccgtcctgtttgagccaagccgccacgccgcctacatccttctgacaggcccggcagactcagaggcacccggcctggtctctgtgatcaagcacaaggtgcgggaccttgtcccaagcagcagggtggtccgcctgggtgagggtgggccagacagtgaccaagccatcagggaccggttctcccggctgcggtaccagagtgaggcgtagaggcacgccagccagagcctgtggagagactccgcctgctgacactaaacgtcctgggaagtgggcccttccctgggtctctgcactgactcccccactcctgaccctggtgatggtcgccactgggcagcagcagccttaccagtcctccatgatcacacccagggacctgcatgggtgaggggacaccctgggcctctctcccgcccagcatcctccctgagtccccacacagggcctcactctgcaccccaccagggtcccgctcacaccaggcagccttcatagtggtctccctggccaccttgggcagagctgggtcatgcagcaccccatccttacccggtgccctctccttgccagcttctccccaggccagagcggccatcgcgtagaaagaaccagggtgtccccgggacaggccgtcccccaccccatcctgtagaagtccattccccttttccctcctgtgctctgtcccccaaggagtcatggaactcagggtactgggcctcaacgggaacctgagacagctccagcttcgcagcccttcccggagctacagggggatcctctagcatggggggtgtgacttggttcctttgaccaggtcctgtgaggaagcctggagcaagggtctcccccagcaggatgggtggggcctgctctggagctgagcccgtggccgctcacaggtgtccttagtggtgttgcagctgtctactggctgcatgtgctgtgaatatcccaaggaactggctgtggaatgcgtgtttgggtcagtctgtgccctctcagtagacactggagctgctctgtccctgaagaggccccgtgccccaggcatggcaagcgcctgcctctccccttccggtgctcacacgcccacgccgtgccacccgatgcaggactcacctctgtgccttgctgctcctgaggcccaagggcagccatggtgctctgtactgctcgggccgcccaggtcacagagcctgagcttcgtagccaaagcagcctgatgacccacccaccaaggaagaaagcagaataaacatttttgcactgcctga

SEQ ID NO: 313603 - DNA, 3189 bp, Homo sapiens
agcgggggggggccagcggcgcgggcgggtgagaggccgcggcggcaggtccacctgggcttgcgaaggcacagattccccgtccacagctcacgaccagatgcaccagcaggagtccacatcgaggacgtcctccgggcactcccacgaccagtgaccaggagttaaactttgggatgtgcccgtgatgttggaccacaaggacttagaggccgaaatccaccccttgaaaaatgaagaaagaaaatcgcaggaaaatctgggaaatccatcaaaaaatgaggataacgtgaaaagcgcgcctccacagtcccggctctcccggtgccgagcggcggcgttttttctttcattgtttctctgcctttttgtggtgttcgtcgtctcattcgtcatcccgtgtccagaccggccggcgtcacagcgaatgtggaggatagactacagtgccgctgttatctatgactttctggctgtggatgatataaacggggacaggatccaagatgttctttttctttataaaaacaccaacagcagcaacaatttcagccgatcctgtgtggacgaaggcttttcctctccctgcacctttgcagctgctgtgtcgggggccaacggcagcacgctctgggagagacctgtggcccaagacgtggccctcgtggagtgtgctgtgccccagccaagaggcagtgaggcaccttctgcctgcatcctggtgggcagacccagttctttcattgcagtcaacttgttcacaggggaaaccctgtggaaccacagcagcagcttcagcgggaatgcgtccatcctgagccctctgctgcaggtgcctgatgtggacggcgatggggccccagacctgctggttctcacccaggagcgggaggaggttagtggccacctctactccggcagcaccgggcaccagattggcctcagaggcagccttggtgtggacggggaaagtggcttcctccttcacgtcaccaggacaggtgcccactacatcctctttccctgcgcaagctccctctgcggctgctctgtgaagggtctctacgagaaggtgaccgggagcggcggcccgttcaagagtgacccgcactgggagagcatgctcaatgccaccacccgcaggatgctttcccacagctctggagcagtgcgctacctgatgcatgtcccagggaacgccggtgcagatgtgcttcttgtgggctcagaggccttcgtgctgctggacgggcaggagctgacgcctcgctggacacccaaggcagcccatgtcctgagaaaacccatcttcggccgctacaaaccagacaccttggctgtagccgttgaaaacggaactggcaccgacagacaggttcgttgttcttccttcggaggtggcacctttgttcttagctgaggatagactggtctgaaagcagacggggctgcggcccaggaggctgctgccgtcagagctgctgagaaggttctgcctccctcagagcatctgcctccagggctggcatggctgagggcacgtgtgcctgtgcaagcctcgagcttttcccggtagcccccacgttggcccccacagtgtcccctccctccccagatcctgtttctggaccttggcactggagccgtcctgtgtagcctagccctcccgagcctccctgggggtccactgtccgccagcctgccgaccgcagaccaccgctcagccttcttcttctggggcctccacgagctggggagcaccagcgagacggagaccggggaggcccggcacagcctgtacatgttccaccccaccctgccgcgcgtgctgctggagctggccaatgtctctacccacattgtcgcctttgacgccgtcctgtttgagccaagccgccacgccgcctacatccttctgacaggcccggcagactcagaggcacccggcctggtctctgtgatcaagcacaaggtgcgggaccttgtcccaagcagcagggtggtccgcctgggtgagggtgggccagacagtgaccaagccatcagggaccggttctcccggctgcggtaccagagtgaggcgtagaggcacgccagccagagcctgtggagagactccgcctgctgacactaaacgtcctgggaagtgggcccttccctgggtctctgcactgactcccccactcctgaccctggtgatggtcgccactgggcagcagcagccttaccagtcctccatgatcacacccagggacctgcatgggtgaggggacaccctgggcctctctcccgcccagcatcctccctgagtccccacacagggcctcactctgcaccccaccagggtcccgctcacaccaggcagccttcatagtggtctccctggccaccttgggcagagctgggtcatgcagcaccccatccttacccggtgccctctccttgccagcttctccccaggccagagcggccatcgcgtagaaagaaccagggtgtccccgggacaggccgtcccccaccccatcctgtagaagtccattccccttttccctcctgtgctctgtcccccaaggagtcatggaactcagggtactgggcctcaacgggaacctgagacagctccagcttcgcagcccttcccggagctacagggggatcctctagcatggggggtgtgacttggttcctttgaccaggtcctgtgaggaagcctggagcaagggtctcccccagcaggatgggtggggcctgctctggagctgagcccgtggccgctcacaggtgtccttagtggtgttgcagctgtctactggctgcatgtgctgtgaatatcccaaggaactggctgtggaatgcgtgtttgggtcagtctgtgccctctcagtagacactggagctgctctgtccctgaagaggccccgtgccccaggcatggcaagcgcctgcctctccccttccggtgctcacacgcccacgccgtgccacccgatgcaggactcacctctgtgccttgctgctcctgaggcccaagggcagccatggtgctctgtactgctcgggccgcccaggtcacagagcctgagcttcgtagccaaagcagcctgatgacccacccaccaaggaagaaagcagaataaacatttttgcactgcctgaaaaaccccggtggtcaggcgtgagcctagcgtg

SEQ ID NO: 313604 - DNA, 2793 bp, Homo sapiens
agcgggggggggccagcggcgcgggcgggtgagaggccgcggcggcaggtccacctgggcttgcgaaggcacagattccccgtccacagctcacgaccagatgcaccagcaggagtccacatcgaggacgtcctccgggcactcccacgaccagtgaccaggagttaaactttgggatgtgcccgtgatgttggaccacaaggacttagaggccgaaatccaccccttgaaaaatgaagaaagaaaatcgcaggaaaatctgggaaatccatcaaaaaatgaggataacgtgaaaagcgcgcctccacagtcccggctctcccggtgccgagcggcggcgttttttctttcattgtttctctgcctttttgtggtgttcgtcgtctcattcgtcatcccgtgtccagaccggccggcgtcacagcgaatgtggaggatagactacagtgccgctgttatctatgactttctggctgtggatgatataaacggggacaggatccaagatgttctttttctttataaaaacaccaacagcagcaacaatttcagccgatcctgtgtggacgaaggcttttcctctccctgcacctttgcagctgctgtgtcgggggccaacggcagcacgctctgggagagacctgtggcccaagacgtggccctcgtggagtgtgctgtgccccagccaagaggcagtgaggcaccttctgcctgcatcctggtgggcagacccagttctttcattgcagtcaacttgttcacaggggaaaccctgtggaaccacagcagcagcttcagcgggaatgcgtccatcctgagccctctgctgcaggtgcctgatgtggacggcgatggggccccagacctgctggttctcacccaggagcgggaggaggttagtggccacctctactccggcagcaccgggcaccagattggcctcagaggcagccttggtgtggacggggaaagtggcttcctccttcacgtcaccaggacaggtgcccactacatcctctttccctgcgcaagctccctctgcggctgctctgtgaagggtctctacgagaaggtgaccgggagcggcggcccgttcaagagtgacccgcactgggagagcatgctcaatgccaccacccgcaggatgctttcccacagctctggagcagtgcgctacctgatgcatgtcccagggaacgccggtgcagatgtgcttcttgtgggctcagaggccttcgtgctgctggacgggcaggagctgacgcctcgctggacacccaaggcagcccatgtcctgagaaaacccatcttcggccgctacaaaccagacaccttggctgtagccgttgaaaacggaactggcaccgacagacaggagaccggggaggcccggcacagcctgtacatgttccaccccaccctgccgcgcgtgctgctggagctggccaatgtctctacccacattgtcgcctttgacgccgtcctgtttgagccaagccgccacgccgcctacatccttctgacaggcccggcagactcagaggcacccggcctggtctctgtgatcaagcacaaggtgcgggaccttgtcccaagcagcagggtggtccgcctgggtgagggtgggccagacagtgaccaagccatcagggaccggttctcccggctgcggtaccagagtgaggcgtagaggcacgccagccagagcctgtggagagactccgcctgctgacactaaacgtcctgggaagtgggcccttccctgggtctctgcactgactcccccactcctgaccctggtgatggtcgccactgggcagcagcagccttaccagtcctccatgatcacacccagggacctgcatgggtgaggggacaccctgggcctctctcccgcccagcatcctccctgagtccccacacagggcctcactctgcaccccaccagggtcccgctcacaccaggcagccttcatagtggtctccctggccaccttgggcagagctgggtcatgcagcaccccatccttacccggtgccctctccttgccagcttctccccaggccagagcggccatcgcgtagaaagaaccagggtgtccccgggacaggccgtcccccaccccatcctgtagaagtccattccccttttccctcctgtgctctgtcccccaaggagtcatggaactcagggtactgggcctcaacgggaacctgagacagctccagcttcgcagcccttcccggagctacagggggatcctctagcatggggggtgtgacttggttcctttgaccaggtcctgtgaggaagcctggagcaagggtctcccccagcaggatgggtggggcctgctctggagctgagcccgtggccgctcacaggtgtccttagtggtgttgcagctgtctactggctgcatgtgctgtgaatatcccaaggaactggctgtggaatgcgtgtttgggtcagtctgtgccctctcagtagacactggagctgctctgtccctgaagaggccccgtgccccaggcatggcaagcgcctgcctctccccttccggtgctcacacgcccacgccgtgccacccgatgcaggactcacctctgtgccttgctgctcctgaggcccaagggcagccatggtgctctgtactgctcgggccgcccaggtcacagagcctgagcttcgtagccaaagcagcctgatgacccacccaccaaggaagaaagcagaataaacatttttgcactgcctgaaaaaccccggtggtcaggcgtgagcctagcgtg

SEQ ID NO: 313605 - DNA, 1977 bp, Homo sapiens
taacctgcgcccttctcccaactcgcgtgcctcacagaacccaggtgctgcacagccccgagatgtggcccttcttcaggaaagagcaaataagttggtcaagtacttgatgcttaaggactacacaaaggtgcccatcaagcgctcagaaatgctgagagatatcatccgtgaatacactgatgtttatccagaaatcattgaactgatgcatgtcccagggaacgccggtgcagatgtgcttcttgtgggctcagaggccttcgtgctgctggacgggcaggagctgacgcctcgctggacacccaaggcagcccatgtcctgagaaaacccatcttcggccgctacaaaccagacaccttggctgtagccgttgaaaacggaactggcaccgacagacagatcctgtttctggaccttggcactggagccgtcctgtgtagcctagccctcccgagcctccctgggggtccactgtccgccagcctgccgaccgcagaccaccgctcagccttcttcttctggggcctccacgagctggggagcaccagcgagacggagaccggggaggcccggcacagcctgtacatgttccaccccaccctgccgcgcgtgctgctggagctggccaatgtctctacccacattgtcgcctttgacgccgtcctgtttgagccaagccgccacgccgcctacatccttctgacaggcccggcagactcagaggcacccggcctggtctctgtgatcaagcacaaggtgcgggaccttgtcccaagcagcagggtggtccgcctgggtgagggtgggccagacagtgaccaagccatcagggaccggttctcccggctgcggtaccagagtgaggcgtagaggcacgccagccagagcctgtggagagactccgcctgctgacactaaacgtcctgggaagtgggcccttccctgggtctctgcactgactcccccactcctgaccctggtgatggtcgccactgggcagcagcagccttaccagtcctccatgatcacacccagggacctgcatgggtgaggggacaccctgggcctctctcccgcccagcatcctccctgagtccccacacagggcctcactctgcaccccaccagggtcccgctcacaccaggcagccttcatagtggtctccctggccaccttgggcagagctgggtcatgcagcaccccatccttacccggtgccctctccttgccagcttctccccaggccagagcggccatcgcgtagaaagaaccagggtgtccccgggacaggccgtcccccaccccatcctgtagaagtccattccccttttccctcctgtgctctgtcccccaaggagtcatggaactcagggtactgggcctcaacgggaacctgagacagctccagcttcgcagcccttcccggagctacagggggatcctctagcatggggggtgtgacttggttcctttgaccaggtcctgtgaggaagcctggagcaagggtctcccccagcaggatgggtggggcctgctctggagctgagcccgtggccgctcacaggtgtccttagtggtgttgcagctgtctactggctgcatgtgctgtgaatatcccaaggaactggctgtggaatgcgtgtttgggtcagtctgtgccctctcagtagacactggagctgctctgtccctgaagaggccccgtgccccaggcatggcaagcgcctgcctctccccttccggtgctcacacgcccacgccgtgccacccgatgcaggactcacctctgtgccttgctgctcctgaggcccaagggcagccatggtgctctgtactgctcgggccgcccaggtcacagagcctgagcttcgtagccaaagcagcctgatgacccacccaccaaggaagaaagcagaataaacatttttgcactgcctgaaaaaccccggtggtcaggcgtgagcctagcgtg

SEQ ID NO: 313606 - DNA, 1135 bp, Homo sapiens
agcgggggggggccagcggcgcgggcgggtgagaggccgcggcggcaggtccacctgggcttgcgaaggcacagattccccgtccacagctcacgaccagatgcaccagcaggagtccacatcgaggacgtcctccgggcactcccacgaccagtgaccaggagttaaactttgggatgtgcccgtgatgttggaccacaaggacttagaggccgaaatccaccccttgaaaaatgaagaaagaaaatcgcaggaaaatctgggaaatccatcaaaaaatgaggataacgtgaaaagcgcgcctccacagtcccggctctcccggtgccgagcggcggcgttttttctttcattgtttctctgcctttttgtggtgttcgtcgtctcattcgtcatcccgtgtccagaccggccggcgtcacagcgaatgtggaggatagactacagtgccgctgttatctatgactttctggctgtggatgatataaacggggacaggatccaagatgttctttttctttataaaaacaccaacagcagcaacaatttcagccgatcctgtgtggacgaaggcttttcctctccctgcacctttgcagctgctgtgtcgggggccaacggcagcacgctctgggagagacctgtggcccaagacgtggccctcgtggagtgtgctgtgccccagccaagaggcagtgaggcaccttctgcctgcatcctggtgggcagacccagttctttcattgcagtcaacttgttcacaggggcagtccgatgtcacctgccatggggtagcagagaggaggagcggcttggcccccggctgctcctggggtgtcagtggtggcagtgcccagggcgagcccagaacatgaaccagcactcggcccgtcaggggagatcggggcctgtcagtgcccctaagcctgaaggtgcaggtctccgagccccagcggagccggcctcgtggaaggacgagggaaagaatgcgtggtgcacggggccatgtgtgtgtgtgggctccttgcacctcatcgcggtctggaagatttctgtgcctagatttggtgaatgttcatatttcccttacaagctgtcattttaaggatatggaggagaataaagagcaggctga

SEQ ID NO: 313607 - DNA, 908 bp, Homo sapiens
aagcaggggcggggcctctggtggcggtcgggaactcggtgggaggcggcaacattgtttcaagttggccaaattgacaagagcgagaggtatactgcgttccatcccgacccggggccacggtactgggccctgtttccccctcctcggcccccgagagccaggtccgccttctgcagggttcccaggcccccgctccagggccgggctgacccgactcgctggcgcttcatggagaacttccaaaaggtggaaaagatcggagagggcacgtacggagttgtgtacaaagccagaaacaagttgacgggagaggtggtggcgcttaagaaaatccgcctggacacgtgagtggcctctgtacccgggactcctaactggggacctccttgattgtcccccccaaccccccacgggcgggtagccgtccagggaccggaagagagcagggagggacttctttagaagtggagaggtgggttgggggccagtagaaggtgaagagtatacttatactccctggggagagtatagggtggtgtggaatccatggaaaactttcttcccaaactgagccggatcgtgcccccaaatgtgcgactacagactcggggagagaaaggaggtctctgagatgaggtccaagactctccatggagtggagttatgtgggaaccggcgagaatcgcctttctgaatgaagagccctcttcactgccccaccctcaccttagaattctctcctctttccaaagaatggcagttgaacctcactggcccctctggggaggctgggggctactcctgcattttttcccctccattacagtctccctgcttcaccttcaccaggcggctttacttacctacccctgggaaaagaggagataatggccttaatatatcca

SEQ ID NO: 313608 - DNA, 2190 bp, Homo sapiens
aagcaggggcggggcctctggtggcggtcgggaactcggtgggaggcggcaacattgtttcaagttggccaaattgacaagagcgagaggtatactgcgttccatcccgacccggggccacggtactgggccctgtttccccctcctcggcccccgagagccaggtccgccttctgcagggttcccaggcccccgctccagggccgggctgacccgactcgctggcgcttcatggagaacttccaaaaggtggaaaagatcggagagggcacgtacggagttgtgtacaaagccagaaacaagttgacgggagaggtggtggcgcttaagaaaatccgcctggacactgagactgagggtgtgcccagtactgccatccgagagatctctctgcttaaggagcttaaccatcctaatattgtcaagctgctggatgtcattcacacagaaaataaactctacctggtttttgaatttctgcaccaagatctcaagaaattcatggatgcctctgctctcactggcattcctcttcccctcatcaagagctatctgttccagctgctccagggcctagctttctgccattctcatcgggtcctccaccgagaccttaaacctcagaatctgcttattaacacagagggggccatcaagctagcagactttggactagccagagcttttggagtccctgttcgtacttacacccatgaggtgactcgccgggccctattccctggagattctgagattgaccagctcttccggatctttcggactctggggaccccagatgaggtggtgtggccaggagttacttctatgcctgattacaagccaagtttccccaagtgggcccggcaagattttagtaaagttgtacctcccctggatgaagatggacggagcttgttatcgcaaatgctgcactacgaccctaacaagcggatttcggccaaggcagccctggctcaccctttcttccaggatgtgaccaagccagtaccccatcttcgactctgatagccttcttgaagcccccagccctaatctcaccctctcctccagtgtgggcttgaccaggcttggccttgggctatttggactcaggtgggccctctgaacttgccttaaacactcaccttctagtcttggccagccaactctgggaatacaggggtgaaaggggggaaccagtgaaaatgaaaggaagtttcagtattagatgcacttaagttagcctccaccaccctttcccccttctcttagttattgctgaagagggttggtataaaaataattttaaaaaagccttcctacacgttagatttgccgtaccaatctctgaatgccccataattattatttccagtgtttgggatgaccaggatcccaagcctcctgctgccacaatgtttataaaggccaaatgatagcgggggctaagttggtgcttttgagaaccaagtaaaacaaaaccactgggaggagtctattttaaagaattcggttgaaaaaatagatccaatcagtttataccctagttagtgttttgcctcacctaataggctgggagactgaagactcagcccgggtggggctgcagaaaaatgattggccccagtccccttgtttgtcccttctacaggcatgaggaatctgggaggccctgagacagggattgtgcttcattccaatctattgcttcaccatggccttatgaggcaggtgagagatgtttgaatttttctcttccttttagtattcttagttgttcagttgccaaggatccctgatcccattttcctctgacgtccacctcctaccccataggagttagaagttagggtttaggcatcattttgagaatgctgacactttttcagggctgtgattgagtgagggcatgggtaaaaatatttctttaaaagaaggatgaacaattatatttatatttcaggttatatccaatagtagagttggctttttttttttttttttggtcatagtgggtggatttgttgccatgtgcaccttggggttttgtaatgacagtgctaaaaaaaaaaagcattttttttttatgatttgtctctgtcacccttgtccttgagtgctcttgctattaacgttatttgtaatttagtttgtagctcattaaaaaaatgtgcctagttttatagttca

SEQ ID NO: 313609 - DNA, 2271 bp, Homo sapiens
aagcaggggcggggcctctggtggcggtcgggaactcggtgggaggcggcaacattgtttcaagttggccaaattgacaagagcgagaggtatactgcgttccatcccgacccggggccacggtactgggccctgtttccccctcctcggcccccgagagccaggtccgccttctgcagggttcccaggcccccgctccagggccgggctgacccgactcgctggcgcttcatggagaacttccaaaaggtggaaaagatcggagagggcacgtacggagttgtgtacaaagccagaaacaagcttaagaaaatccgcctggacactgagactgagggtgtgcccagtactgccatccgagagatctctctgcttaaggagcttaaccatcctaatattgtcaagctgctggatgtcattcacacagaaaataaactctacctggtttttgaatttctgcaccaagatctcaagaaattcatggatgcctctgctctcactggcattcctcttcccctcatcaagagctatctgttccagctgctccagggcctagctttctgccattctcatcgggtcctccaccgagaccttaaacctcagaatctgcttattaacacagagggggccatcaagctagcagactttggactagccagagcttttggagtccctgttcgtacttacacccatgaggtggtgaccctgtggtaccgagctcctgaaatcctcctgggctgcaaatattattccacagctgtggacatctggagcctgggctgcatctttgctgagatggtgactcgccgggccctattccctggagattctgagattgaccagctcttccggatctttcggactctggggaccccagatgaggtggtgtggccaggagttacttctatgcctgattacaagccaagtttccccaagtgggcccggcaagattttagtaaagttgtacctcccctggatgaagatggacggagcttgttatcgcaaatgctgcactacgaccctaacaagcggatttcggccaaggcagccctggctcaccctttcttccaggatgtgaccaagccagtaccccatcttcgactctgatagccttcttgaagcccccagccctaatctcaccctctcctccagtgtgggcttgaccaggcttggccttgggctatttggactcaggtgggccctctgaacttgccttaaacactcaccttctagtcttggccagccaactctgggaatacaggggtgaaaggggggaaccagtgaaaatgaaaggaagtttcagtattagatgcacttaagttagcctccaccaccctttcccccttctcttagttattgctgaagagggttggtataaaaataattttaaaaaagccttcctacacgttagatttgccgtaccaatctctgaatgccccataattattatttccagtgtttgggatgaccaggatcccaagcctcctgctgccacaatgtttataaaggccaaatgatagcgggggctaagttggtgcttttgagaaccaagtaaaacaaaaccactgggaggagtctattttaaagaattcggttgaaaaaatagatccaatcagtttataccctagttagtgttttgcctcacctaataggctgggagactgaagactcagcccgggtggggctgcagaaaaatgattggccccagtccccttgtttgtcccttctacaggcatgaggaatctgggaggccctgagacagggattgtgcttcattccaatctattgcttcaccatggccttatgaggcaggtgagagatgtttgaatttttctcttccttttagtattcttagttgttcagttgccaaggatccctgatcccattttcctctgacgtccacctcctaccccataggagttagaagttagggtttaggcatcattttgagaatgctgacactttttcagggctgtgattgagtgagggcatgggtaaaaatatttctttaaaagaaggatgaacaattatatttatatttcaggttatatccaatagtagagttggctttttttttttttttttggtcatagtgggtggatttgttgccatgtgcaccttggggttttgtaatgacagtgctaaaaaaaaaaagcattttttttttatgatttgtctctgtcacccttgtccttgagtgctcttgctattaacgttatttgtaatttagtttgtagctcattaaaaaaatgtgcctagttttatagttca

SEQ ID NO: 313610 - DNA, 2292 bp, Homo sapiens
aagcaggggcggggcctctggtggcggtcgggaactcggtgggaggcggcaacattgtttcaagttggccaaattgacaagagcgagaggtatactgcgttccatcccgacccggggccacggtactgggccctgtttccccctcctcggcccccgagagccaggtccgccttctgcagggttcccaggcccccgctccagggccgggctgacccgactcgctggcgcttcatggagaacttccaaaaggtggaaaagatcggagagggcacgtacggagttgtgtacaaagccagaaacaagttgacgggagaggtggtggcgcttaagaaaatccgcctggacactgagactgagggtgtgcccagtactgccatccgagagatctctctgcttaaggagcttaaccatcctaatattgtcaagctgctggatgtcattcacacagaaaataaactctacctggtttttgaatttctgcaccaagatctcaagaaattcatggatgcctctgctctcactggcattcctcttcccctcatcaagagctatctgttccagctgctccagggcctagctttctgccattctcatcgggtcctccaccgagaccttaaacctcagaatctgcttattaacacagagggggccatcaagctagcagactttggactagccagagcttttggagtccctgttcgtacttacacccatgaggtggtgaccctgtggtaccgagctcctgaaatcctcctgggctgcaaatattattccacagctgtggacatctggagcctgggctgcatctttgctgagatggtgactcgccgggccctattccctggagattctgagattgaccagctcttccggatctttcggactctggggaccccagatgaggtggtgtggccaggagttacttctatgcctgattacaagccaagtttccccaagtgggcccggcaagattttagtaaagttgtacctcccctggatgaagatggacggagcttgttatcgcaaatgctgcactacgaccctaacaagcggatttcggccaaggcagccctggctcaccctttcttccaggatgtgaccaagccagtaccccatcttcgactctgatagccttcttgaagcccccagccctaatctcaccctctcctccagtgtgggcttgaccaggcttggccttgggctatttggactcaggtgggccctctgaacttgccttaaacactcaccttctagtcttggccagccaactctgggaatacaggggtgaaaggggggaaccagtgaaaatgaaaggaagtttcagtattagatgcacttaagttagcctccaccaccctttcccccttctcttagttattgctgaagagggttggtataaaaataattttaaaaaagccttcctacacgttagatttgccgtaccaatctctgaatgccccataattattatttccagtgtttgggatgaccaggatcccaagcctcctgctgccacaatgtttataaaggccaaatgatagcgggggctaagttggtgcttttgagaaccaagtaaaacaaaaccactgggaggagtctattttaaagaattcggttgaaaaaatagatccaatcagtttataccctagttagtgttttgcctcacctaataggctgggagactgaagactcagcccgggtggggctgcagaaaaatgattggccccagtccccttgtttgtcccttctacaggcatgaggaatctgggaggccctgagacagggattgtgcttcattccaatctattgcttcaccatggccttatgaggcaggtgagagatgtttgaatttttctcttccttttagtattcttagttgttcagttgccaaggatccctgatcccattttcctctgacgtccacctcctaccccataggagttagaagttagggtttaggcatcattttgagaatgctgacactttttcagggctgtgattgagtgagggcatgggtaaaaatatttctttaaaagaaggatgaacaattatatttatatttcaggttatatccaatagtagagttggctttttttttttttttttggtcatagtgggtggatttgttgccatgtgcaccttggggttttgtaatgacagtgctaaaaaaaaaaagcattttttttttatgatttgtctctgtcacccttgtccttgagtgctcttgctattaacgttatttgtaatttagtttgtagctcattaaaaaaatgtgcctagttttatagttca

SEQ ID NO: 313611 - DNA, 2201 bp, Homo sapiens
aagcaggggcggggcctctggtggcggtcgggaactcggtgggaggcggcaacattgtttcaagttggccaaattgacaagagcgagaggtatactgcgttccatcccgacccggggccacggtactgggccctgtttccccctcctcggcccccgagagccaggtccgccttctgcagggttcccaggcccccgctccagggccgggctgacccgactcgctggcgcttcatggagaacttccaaaaggtggaaaagatcggagagggcacgtacggagttgtgtacaaagccagaaacaagttgacgggagaggtggtggcgcttaagaaaatccgcctggacactgagactgagggtgtgcccagtactgccatccgagagatctctctgcttaaggagcttaaccatcctaatattgtcaagctgctggatgtcattcacacagaaaataaactctacctggtttttgaatttctgcaccaagatctcaagaaattcatggatgcctctgctctcactggcattcctcttcccctcatcaagagctatctgttccagctgctccagggcctagctttctgccattctcatcgggtcctccaccgagaccttaaacctcagaatctgcttattaacacagagggggccatcaagctagcagactttggactagccagagcttttggagtccctgttcgtacttacacccatgaggtggtgaccctgtggtaccgagctcctgaaatcctcctgggctgcaaatattattccacagctgtggacatctggagcctgggctgcatctttgctgagatggtgactcgccgggccctattccctggagattctgagattgaccagctcttccggatctttcggactctggggaccccagatgaggtggtgtggccaggagttacttctatgcctgattacaagccaagtttccccaagtgggcccggcaagattttagtaaagttgtacctcccctggatgaagatggacggagcttgttatcgcaaatgctgcactacgaccctaacaagcggatttcggccaaggcagccctggctcaccctttcttccaggatgtgaccaagccagtaccccatcttcgactctgatagccttcttgaagcccccagccctaatctcaccctctcctccagtgtgggcttgaccaggcttggccttgggctatttggactcaggtgggccctctgaacttgccttaaacactcaccttctagtcttggccagccaactctgggaatacaggggtgaaaggggggaaccagtgaaaatgaaaggaagtttcagtattagatgcacttaagttagcctccaccaccctttcccccttctcttagttattgctgaagagggttggtataaaaataattttaaaaaagccttcctacacgttagatttgccgtaccaatctctgaatgccccataattattatttccagtgtttgggatgaccaggatcccaagcctcctgctgccacaatgtttataaaggccaaatgatagcgggggctaagttggtgcttttgagaaccaagtaaaacaaaaccactgggaggagtctattttaaagaattcggttgaaaaaatagatccaatcagtttataccctagttagtgttttgcctcacctaataggctgggagactgaagactcagcccgggtggggctgcagaaaaatgattggccccagtccccttgtttgtcccttctacaggcatgaggaatctgggaggccctgagacagggattgtgcttcattccaatctattgcttcaccatggccttatgaggcaggtgagagatgtttgaatttttctcttccttttagtattcttagttgttcagttgccaaggatccctgatcccattttcctctgacgtccacctcctaccccataggagttagaagttagggtttaggcatcattttgagaatgctgacactttttcagggctgtgattgagtgagggcatgggtaaaaatatttctttaaaagaaggatgaacaattatatttatatttcaggttatatccaatagtagagttggctttttttttttttttttggtcatagtgggtggaatagcaggttatacccctttcactagtataagaaaagcacgtgtggcaaggggatagggtggtatcaggggtcccccga

SEQ ID NO: 313612 - DNA, 718 bp, Homo sapiens
aagcaggggcggggcctctggtggcggtcgggaactcggtgggaggcggcaacattgtttcaagttggccaaattgacaagagcgagaggtatactgcgttccatcccgacccggggccacggtactgggccctgtttccccctcctcggcccccgagagccaggtccgccttctgcagggttcccaggcccccgctccagggccgggctgacccgactcgctggcgcttcatggagaacttccaaaaggtggaaaagatcggagagggcacgtacggagttgtgtacaaagccagaaacaagttgacgggagaggtggtggcgcttaagaaaatccgcctggacactgagactgagggtgtgcccagtactgccatccgagagatctctctgcttaaggagcttaaccatcctaatattgtcaagtaagtatgcgtctgagagaaaatatttctttaaaagaaggatgaacaattatatttatatttcaggttatatccaatagtagagttggctttttttttttttttttggtcatagtgggtggatttgttgccatgtgcaccttggggttttgtaatgacagtgctaaaaaaaaaaagcattttttttttatgatttgtctctgtcacccttgtccttgagtgctcttgctattaacgttatttgtaatttagtttgtagctcattaaaaaaatgtgcctagttttatagttca

SEQ ID NO: 313613 - DNA, 1342 bp, Homo sapiens
tctttcaccccaaaatataaaatcctatgcttataattttaaaatcctcagtgagctatggaatattgtgcatatttaatacccaccagcaacctagaagtagatggcatccatgtgtctgtcacaccgactttccaaacaacctcattcacccattactgactgctctggccctgggcgctctgacttcctcagaaaccacctctttggaaccttcctttccacaactttttttttaaaacttcacctcgagctttctccatcatcccagcctctctgcctgattccatctcatgtaaagtaaactcgtctgagaacctgcgatcaccttttaccaagcacatgataagccgtagcaacctagggactatgataactctggccttggcctaagtttacataagaacatgatagtttgctgacctcgtggagggaaatctaaatgaaatcaatatcttataacaaaactagccaagatcaggtatttccattctgagtataaaagcaactgatcttaagcaacaggcagagatgttaatgcagaagatatatttgtacaatcaaactcttgtgtgctggtgaaagactttacccccaaagtcaagtcaagtcaagacaaaaccaaagcaaaatggagaatgagtcgatgtaacaatgcgataaaaagaacagcattcaagcttcttgctgcaaatactgaactggaatctttttctttacaagtttgactagaagacagcagtgacacttccctaataagggaataccttcaggccacacctgtgttctgaagcaattcaaagttcaaggaatattggggggtggaggtgggggctgatatacattttgtcagtgaaaatggcccaaaaaacccaaagtaccccagtcgacctaaagtcagtgattcaactggaaggaaacctcaatgctgcctccagagctttttggaaatactcagatcctggccgcctttgtaaccttctctaaacgtcaggcctggacttaaaagattttttaaaacctccataagtagtccaggggcggtggctcacgcctgtaatcccagcactttgggaggccgaggcaggcggatcacaaggtcaacgagatcgagaccatcctggccaacatggtgaaaccctgtctgtaccaaaaatacaaaaattaattgggcatggtggtggacacctgtaatcccagctactagggaggctgaggcaggagaattgcttgaacctgggaggcggaggttgcagtgagccactgcactccagcctgatgacagagcaagactcagtctcaaaaataaataaaaataataaaacctccataagtaatcctg

SEQ ID NO: 313614 - DNA, 5486 bp, Homo sapiens
  misc_feature (3276)..(3276): n is a, c, g, or t
ggcttgctcgcgcgtgcgcaccagaagccagcagtggggttgcacacgcgcctcttcacgaggtggaaacaagatggaggattcggcctcggcctcgctgtcttctgcagccgctactggaacctccacctcgactccagcggccccgacagcacggaagcagctggataaagaacaggttagaaaggcagtggacgctctcttgacgcattgcaagtccaggaaaaacaattatgggttgcttttgaatgagaatgaaagtttatttttaatggtggtattatggaaaattccaagtaaagaactgagggtcagattgaccttgcctcatagtattcgatcagattcagaagatatctgtttatttacgaaggatgaacccaattcaactcctgaaaagacagaacagttttatagaaagcttttaaacaagcatggaattaaaaccgtttctcagattatctccctccaaactctaaagaaggaatataaatcctatgaagccaagctccgccttctgagcagttttgatttcttccttactgatgccagaattaggcggctcttaccctcactcattgggagacatttctatcaaagaaagaaagttccagtatctgtaaaccttctgtccaagaatttatcaagagagatcaatgactgtataggtggaacggtcttaaacatttctaaaagtggttcttgcagtgctatacgtattggtcacgttggaatgcaaattgagcacatcattgaaaacattgttgctgtcaccaaaggactttcagaaaaattgccagagaagtgggagagcgtgaaactcctgtttgtgaaaactgagaaatcggctgcacttcccatcttttcctcgtttgtcagcaattgggatgaagccaccaaaagatctttgcttaataagaagaaaaaagaggcaaggagaaaacgaagagaaagaaattttgaaaaacaaaaggagaggaagaagaagaggcagcaggctaggaagactgcatcagttcttagtaaagatgatgtggcacctgaaagtggtgatactacagtgaagaaacctgaatcaaagaaggaacagaccccagagcatgggaagaaaaaacgtggcagaggaaaagcccaagttaaagcaacaaatgaatccgaagacgaaatcccacagctggtaccaataggaaagaagactccagctaatgaaaaagtagagattcaaaaacatgccacaggaaagaagtctccagcaaagagtcctaatcccagcacacctcgtgggaagaaaagaaaggctttgccagcatctgagaccccaaaagctgcagagtctgagaccccagggaaaagcccagagaagaagccaaaaatcaaagaagaggcagtgaaggaaaaaagtccttcgctggggaaaaaagatgcgagacagactccaaaaaagccagaggccaagtttttcaccactcctagtaaatctgtgagaaaagcttcccacacccccaaaaaatggcccaaaaaacccaaagtaccccagtcgacctaaagtcagtgattcaactggaaggaaacctcaatgctgcctccagagctttttggaaatactcagatcctggccgcctttgtaaccttctctaaacgtcaggcctggacttaaaagattttttaaaacctccataagtagtccaggggcggtggctcacgcctgtaatcccagcactttgggaggccgaggcaggcggatcacaaggtcaacgagatcgagaccatcctggccaacatggtgaaaccctgtctgtaccaaaaatacaaaaattaattgggcatggtggtggacacctgtaatcccagctactagggaggctgaggcaggagaattgcttgaacctgggaggcggaggttgcagtgagccactgcactccagcctgatgacagagcaagactcagtctcaaaaataaataaaaataataaaacctccataagtaatcctgacatatgttcctgggtataatctgtttctaaattgtccttctgtgtatttgctaatgtaatagagggaaaaatagagtgcttctctgtggttgttcagcactttaggtagccaaggtgagaggattgcttgaggccaggagtttgagactagcctgggcaacttggtaaaaccccatctctacaaaagaaaaaaaaaaattagtgtggcatggtggcatgcatctgtgctcccagctcctcacgaggctgaggtggaaggatcaagtgagcgcaagaggttgaggctccagtgagccacgatcaccccactgtgctgtagcctgggtgacagtgtgagattctgtctcagaaaaaacaaagtataacattgctttgcttctgagtatactgttggctttccaaatcagtgggtctgacttgaggtctgtgatgtgacccttttcctcacctgctcaaccattattcacatggactccatcatattcatttgtagtcattcccagagtggcccagtgagggtctcgctgtatgagagtcggctacggaatttaggagaaacagaagtttcttggctttcatgctgagcttgttggtctaagcttatgagtcactggattagcatccatatgggaagggaaattaacatggagtcatttatacagggactaaattgaatcctacctaccggaggcaagaacatgatttatcttccataagccttatcctcttcctccttattcctcagtccatatggatttgcttatgtatgacaactccaaggaatcttggaagagtagattgctaacgtttccacaattgtcaagtatattctgaggcagtaaacacctttttaggtacgtggcctttcactggttgtgaattggtatgcatccgtagtagtaagttcacagattcactgcagtgcaggaatgttcttgcatgccaaagactcaactgctttcaaagataatgtgggtgctagatgcagtggcttacatctgtaaccctgttagggtgaccagacccaacaccaggtcgtgggggtgacaaagtccagtggagtcaaaggattgagaaaaagacagtttgagagagaagtaggaccagcagaccatcgggatggtggaggctgtgaaggccgtgagctctgggagcccacactatttattggtaatccaacaaagaaacagatggtgagaatgtgaaggtcagaagggcaccttgcattaagcacatgatttacagctgtgatggtttagcatttgctctgctacttgagatnatggagagcaggttcttttaactcaagttacagtcgatcctgggagagcaaggagccagcaagtctagacattccagagccacaggccctggattctatccaagccacgagggattttatgccctgggcttagattatggtgcgtcagggcagccttccaccctttagcacagagcttggtgttccaaagaccacaaggggttttagacccttgaccctggacatattccaagactcttttacattatgtcagaatgcaagccctgcctcagcttctcccaacactcagcttttcgcaacataatcccagcactttggaacgctgggtggattgcttgaacccaggagttcgagaccatcctgggcaatatggcaaaaccccatctttaccaaaaataagctgggtgtggtggaacatgcctgtggtcccagcttcttgggaggctgaggtgggaggattgcttgaacccgggaggtagaggctgcaatgggccatgatcacgatcctgcactccagcctgggcaacagagagagacagtccctggcccactgcccccttccctggcccagtctcaaaaaaaatgaggctgggcgtggtggctcacatctgtaatcccagccaaggctggcagatcacttgaggccaggagttctgagaccagcctggcttacatggtgaaaccccatctctactaaaaatacaaaaactagccaggcatggtgggaggcacctgtaatcccagctacttgggaggctgaagcaggagaatcactttaacccgggaggtggaggttgcagtgagctgagatcacaccactgcactccagcctgggcggcagagcaaaactgaaaaaaagagaaaaaaaaaaacatctagctctccctgaaattagaggagtctagcctgcttttgctgtttttttggtagcgagagtagcgggcagtgggggagatggtcttactctgttccccaggctggagtgcactagtgtcatcacagctccagcctcaatttcctgggctcaaggcgatcttcccacctcagcctcccaagtagctcagactacaggggcatgccatcacagctggccagtttttacgtcttgcgtagagatgggttttccctgtgttccctaggctgggctcgaactcctgggctcaagtcctcctgcctcagcctcccaaaatgttcagattacaggcatgaggcagcatgccaatcctgtttttgcattttagtaacacaaattgtaatgttaactttttaaattatgaaagcatctaaaatataaaattatttgtaaccccactgtccttttgggcttctataaatgaatatacatctaaaatgtgggggtttagcttaattgattgttttccatagaaactaggttttatgggaagatggttggatagacttgtttcacttaaaggtctgatttgtgtaggacaaacccacatatgtaatcgtgccagtctgttctctgcatgacataattttccagcaatagctgtgtggtttttgtaatcctatcatctagtcagttcaagatcttgcaacactgtgtgattctttgctccgtagttcagtcttgttgaacatgacacaggtgtttactttcctgttcttgcatctagtttcattctaataatgttctctgttgaaaaagctggcttcaatttattgagcaagatgctggtgttatcatctaacataaaacctatcttataataaagtgttgacacatgtaatgagtactgtactgaaaaatggtggtatgtatatggtttgtactgattatgtatcgcttttataccatcaaaaagttgaaaaatcataaagttgaatcatcctaaaatgggtacattctgtactatgtttccaaggcttcggaagtgttgcatacacattcctagccagctgatagtgctaggagccaacagtagtctcccccgggggccaagaggagggcgaaatctctactatggtatatgatgttctcgtgggccaagtatgagggtgatatttcattgttggcactgggtttctggaatccatcctcttcaccagggagatttaatgaaccaaatgagatctgatgggagaaatttgagtgtaacgtttttgttctgaaggaagtaattgagttttagttcatttgttttttaggaatcgtaataattaaaatttcattttaaatgccatga

SEQ ID NO: 313615 - DNA, 2670 bp, Homo sapiens
  misc_feature (2222)..(2222): n is a, c, g, or t
ggcttgctcgcgcgtgcgcaccagaagccagcagtggggttgcacacgcgcctcttcacgaggtggaaacaagatggaggattcggcctcggcctcgctgtcttctgcagccgctactggaacctccacctcgactccagcggccccgacagcacggaagcagctggataaagaacaggttagaaaggcagtggacgctctcttgacgcattgcaagtccaggaaaaacaattatgggttgcttttgaatgagaatgaaagtttatttttaatggtggtattatggaaaattccaagtaaagaactgagggtcagattgaccttgcctcatagtattcgatcagattcagaagatatctgtttatttacgaaggatgaacccaattcaactcctgaaaagacagaacagttttatagaaagcttttaaacaagcatggaattaaaaccgtttctcagattatctccctccaaactctaaagaaggaatataaatcctatgaagccaagctccgccttctgagcagttttgatttcttccttactgatgccagaattaggcggctcttaccctcactcattgggagacatttctatcaaagaaagaaagttccagtatctgtaaaccttctgtccaagaatttatcaagagagatcaatgactgtataggtggaacggtcttaaacatttctaaaagtggttcttgcagtgctatacgtattggtcacgttggaatgcaaattgagcacatcattgaaaacattgttgctgtcaccaaaggactttcagaaaaattgccagagaagtgggagagcgtgaaactcctgtttgtgaaaactgagaaatcggctgcacttcccatcttttcctcgtttgtcagcaattgggatgaagccaccaaaagatctttgcttaataagaagaaaaaagaggcaaggagaaaacgaagagaaagaaattttgaaaaacaaaaggagaggaagaagaagaggcagcaggctaggaagactgcatcagttcttagtaaagatgatgtggcacctgaaagtggtgatactacagtgaagaaacctgaatcaaagaaggaacagaccccagagcatgggaagaaaaaacgtggcagaggaaaagcccaagttaaagcaacaaatgaatccgaagacgaaatcccacagctggtaccaataggaaagaagactccagctaatgaaaaagtagagattcaaaaacatgccacaggaaagaagtctccagcaaagagtcctaatcccagcacacctcgtgggaagaaaagaaaggctttgccagcatctgagaccccaaaagctgcagagtctgagaccccagggaaaagcccagagaagaagccaaaaatcaaagaagaggcagtgaaggaaaaaagtccttcgctggggaaaaaagatgcgagacagactccaaaaaagccagaggccaagtttttcaccactcctagtaaatctgtgagaaaagcttcccacacccccaaaaaatggcccaaaaaacccaaagtaccccagtcgacctaaagtcagtgattcaactggaaggaaacctcaatgctgcctccagagctttttggaaatactcagatcctggccgcctttgtaaccttctctaaacgtcaggcctggacttaaaagattttttaaaacctccataagtagtccaggggcggtggctcacgcctgtaatcccagcactttgggaggccgaggcaggcggatcacaaggtcaacgagatcgagaccatcctggccaacatggtgaaaccctgtctgtaccaaaaatacaaaaattaattgggcatggtggtggacacctgtaatcccagctactagggaggctgaggcaggagaattgcttgaacctgggaggcggaggttgcagtgagccactgcactccagcctgatgacagagcaagactcagtctcaaaaataaataaaaataataaaacctccataagtaatcctgacatatgttcctgggtataatctgtttctaaattgtccttctgtgtatttgctaatgtaatagagggaaaaatagagtgcttctctgtggtgatactacagtgaagaaacctgaatcaaagaaggaacagaccccagagcatgggaagaaaaaacgtggcagaggaaaagcccaagttaaagcaacaaatgaatccgaagacgaaatcccacagctggtaccaataggnaagaagactccagctaatgaaaaagtagagattcaaaatcatgccacaggaaagaagtctccagcaaagagtcctaatcccagcacacctcgtgggaagaaaagaaaggcttagccagcatctgagaccccaaaagctgcagagtttgagaccccagggaaaagcccagagaagaagccaaaaatcaaagaagaggcagtgaaggaaaaaagtccttcgctggggaaaaaaggtgcgagacagactccaaaaaaagccagaggccaagtctttcaccactcctagtaaatctgtgagaaaagcttcccacacccccaaaaaatggccaaaaaaacccaaagtaccccagtcgacctaaagtcagtgattcaactggaaggaaacctcaatgctgcctccagaagtgctgaaattacaggtgtgagccaccatccccagtcgtaataca

SEQ ID NO: 313616 - DNA, 5433 bp, Homo sapiens
  misc_feature (3223)..(3223): n is a, c, g, or t
ggcttgctcgcgcgtgcgcaccagaagccagcagtggggttgcacacgcgcctcttcacgaggtggaaacaagatggaggattcggcctcggcctcgctgtcttctgcagccgctactggaacctccacctcgactccagcggccccgacagcacggaagcagctggataaagaacaggttagaaaggcagtggacgctctcttgacgcattgcaagtccaggaaaaacaattatgggttgcttttgaatgagaatgaaagtttatttttaatggtggtattatggaaaattccaagtaaagaactgagggtcagattgaccttgcctcatagtattcgatcagattcagaagatatctgtttatttacgaaggatgaacccaattcaactcctgaaaagacagaacagttttatagaaagcttttaaacaagcatggaattaaaaccgtttctcagattatctccctccaaactctaaagaaggaatataaatcctatgaagccaagctccgccttctgagcagttttgatttcttccttactgatgccagaattaggcggctcttaccctcactcattgggagacatttctatcaaagaaagaaagttccagtatctgtaaaccttctgtccaagaatttatcaagagagatcaatgactgtataggtggaacggtcttaaacatttctaaaagtggttcttgcagtgctatacgtattggtcacgttggaatgcaaattgagcacatcattgaaaacattgttgctgtcaccaaaggactttcagaaaaattgccagagaagtgggagagcgtgaaactcctgtttgtgaaaactgagaaatcggctgcacttcccatcttttcctcgtttgtcagcaattgggatgaagccaccaaaagatctttgcttaataagaagaaaaaagaggcaaggagaaaacgaagagaaagaaattttgaaaaacaaaaggagaggaagaagaagaggcagcaggctaggaagactgcatcagttcttagtaaagatgatgtggcacctgaaagtggtgatactacagtgaagaaacctgaatcaaagaaggaacagaccccagagcatgggaagaaaaaacgtggcagaggaaaagcccaagttaaagcaacaaatgaatccgaagacgaaatcccacagctggtaccaataggaaagaagactccagctaatgaaaaagtagagattcaaaaacatgccacaggaaagaagtctccagcaaagagtcctaatcccagcacacctcgtgggaagaaaagaaaggctttgccagcatctgagaccccaaaagctgcagagtctgagaccccagggaaaagcccagagaagaagccaaaaatcaaagaagaggcagtgaaggaaaaaagtccttcgctggggaaaaaagatgcgagacagactccaaaaaagccagaggccaagtttttcaccactcctagtaaatctgtgagaaaagcttcccacacccccaaaaaatggcccaaaaaacccaaagtaccccagtcgacctaaagtcagtgattcaactggaaggaaacctcaatgctgcctccagagctttttggaaatactcagatcctggccgcctttgtaaccttctctaaacgtcaggcctggactgtaatcccagcactttgggaggccgaggcaggcggatcacaaggtcaacgagatcgagaccatcctggccaacatggtgaaaccctgtctgtaccaaaaatacaaaaattaattgggcatggtggtggacacctgtaatcccagctactagggaggctgaggcaggagaattgcttgaacctgggaggcggaggttgcagtgagccactgcactccagcctgatgacagagcaagactcagtctcaaaaataaataaaaataataaaacctccataagtaatcctgacatatgttcctgggtataatctgtttctaaattgtccttctgtgtatttgctaatgtaatagagggaaaaatagagtgcttctctgtggttgttcagcactttaggtagccaaggtgagaggattgcttgaggccaggagtttgagactagcctgggcaacttggtaaaaccccatctctacaaaagaaaaaaaaaaattagtgtggcatggtggcatgcatctgtgctcccagctcctcacgaggctgaggtggaaggatcaagtgagcgcaagaggttgaggctccagtgagccacgatcaccccactgtgctgtagcctgggtgacagtgtgagattctgtctcagaaaaaacaaagtataacattgctttgcttctgagtatactgttggctttccaaatcagtgggtctgacttgaggtctgtgatgtgacccttttcctcacctgctcaaccattattcacatggactccatcatattcatttgtagtcattcccagagtggcccagtgagggtctcgctgtatgagagtcggctacggaatttaggagaaacagaagtttcttggctttcatgctgagcttgttggtctaagcttatgagtcactggattagcatccatatgggaagggaaattaacatggagtcatttatacagggactaaattgaatcctacctaccggaggcaagaacatgatttatcttccataagccttatcctcttcctccttattcctcagtccatatggatttgcttatgtatgacaactccaaggaatcttggaagagtagattgctaacgtttccacaattgtcaagtatattctgaggcagtaaacacctttttaggtacgtggcctttcactggttgtgaattggtatgcatccgtagtagtaagttcacagattcactgcagtgcaggaatgttcttgcatgccaaagactcaactgctttcaaagataatgtgggtgctagatgcagtggcttacatctgtaaccctgttagggtgaccagacccaacaccaggtcgtgggggtgacaaagtccagtggagtcaaaggattgagaaaaagacagtttgagagagaagtaggaccagcagaccatcgggatggtggaggctgtgaaggccgtgagctctgggagcccacactatttattggtaatccaacaaagaaacagatggtgagaatgtgaaggtcagaagggcaccttgcattaagcacatgatttacagctgtgatggtttagcatttgctctgctacttgagatnatggagagcaggttcttttaactcaagttacagtcgatcctgggagagcaaggagccagcaagtctagacattccagagccacaggccctggattctatccaagccacgagggattttatgccctgggcttagattatggtgcgtcagggcagccttccaccctttagcacagagcttggtgttccaaagaccacaaggggttttagacccttgaccctggacatattccaagactcttttacattatgtcagaatgcaagccctgcctcagcttctcccaacactcagcttttcgcaacataatcccagcactttggaacgctgggtggattgcttgaacccaggagttcgagaccatcctgggcaatatggcaaaaccccatctttaccaaaaataagctgggtgtggtggaacatgcctgtggtcccagcttcttgggaggctgaggtgggaggattgcttgaacccgggaggtagaggctgcaatgggccatgatcacgatcctgcactccagcctgggcaacagagagagacagtccctggcccactgcccccttccctggcccagtctcaaaaaaaatgaggctgggcgtggtggctcacatctgtaatcccagccaaggctggcagatcacttgaggccaggagttctgagaccagcctggcttacatggtgaaaccccatctctactaaaaatacaaaaactagccaggcatggtgggaggcacctgtaatcccagctacttgggaggctgaagcaggagaatcactttaacccgggaggtggaggttgcagtgagctgagatcacaccactgcactccagcctgggcggcagagcaaaactgaaaaaaagagaaaaaaaaaaacatctagctctccctgaaattagaggagtctagcctgcttttgctgtttttttggtagcgagagtagcgggcagtgggggagatggtcttactctgttccccaggctggagtgcactagtgtcatcacagctccagcctcaatttcctgggctcaaggcgatcttcccacctcagcctcccaagtagctcagactacaggggcatgccatcacagctggccagtttttacgtcttgcgtagagatgggttttccctgtgttccctaggctgggctcgaactcctgggctcaagtcctcctgcctcagcctcccaaaatgttcagattacaggcatgaggcagcatgccaatcctgtttttgcattttagtaacacaaattgtaatgttaactttttaaattatgaaagcatctaaaatataaaattatttgtaaccccactgtccttttgggcttctataaatgaatatacatctaaaatgtgggggtttagcttaattgattgttttccatagaaactaggttttatgggaagatggttggatagacttgtttcacttaaaggtctgatttgtgtaggacaaacccacatatgtaatcgtgccagtctgttctctgcatgacataattttccagcaatagctgtgtggtttttgtaatcctatcatctagtcagttcaagatcttgcaacactgtgtgattctttgctccgtagttcagtcttgttgaacatgacacaggtgtttactttcctgttcttgcatctagtttcattctaataatgttctctgttgaaaaagctggcttcaatttattgagcaagatgctggtgttatcatctaacataaaacctatcttataataaagtgttgacacatgtaatgagtactgtactgaaaaatggtggtatgtatatggtttgtactgattatgtatcgcttttataccatcaaaaagttgaaaaatcataaagttgaatcatcctaaaatgggtacattctgtactatgtttccaaggcttcggaagtgttgcatacacattcctagccagctgatagtgctaggagccaacagtagtctcccccgggggccaagaggagggcgaaatctctactatggtatatgatgttctcgtgggccaagtatgagggtgatatttcattgttggcactgggtttctggaatccatcctcttcaccagggagatttaatgaaccaaatgagatctgatgggagaaatttgagtgtaacgtttttgttctgaaggaagtaattgagttttagttcatttgttttttaggaatcgtaataattaaaatttcattttaaatgccatga

SEQ ID NO: 313617 - DNA, 1834 bp, Homo sapiens
ggcttgctcgcgcgtgcgcaccagaagccagcagtggggttgcacacgcgcctcttcacgaggtggaaacaagatggaggattcggcctcggcctcgctgtcttctgcagccgctactggaacctccacctcgactccagcggccccgacagcacggaagcagctggataaagaacaggttagaaaggcagtggacgctctcttgacgcattgcaagtccaggaaaaacaattatgggttgcttttgaatgagaatgaaagtttatttttaatggtggtattatggaaaattccaagtaaagaactgagggtcagattgaccttgcctcatagtattcgatcagattcagaagatatctgtttatttacgaaggatgaacccaattcaactcctgaaaagacagaacagttttatagaaagcttttaaacaagcatggaattaaaaccgtttctcagattatctccctccaaactctaaagaaggaatataaatcctatgaagccaagctccgccttctgagcagttttgatttcttccttactgatgccagaattaggcggctcttaccctcactcattgggagacatttctatcaaagaaagaaagttccagtatctgtaaaccttctgtccaagaatttatcaagagagatcaatgactgtataggtggaacggtcttaaacatttctaaaagtggttcttgcagtgctatacgtattggtcacgttggaatgcaaattgagcacatcattgaaaacattgttgctgtcaccaaaggactttcagaaaaattgccagagaagtgggagagcgtgaaactcctgtttgtgaaaactgagaaatcggctgcacttcccatcttttcctcgtttgtcagcaattgggatgaagccaccaaaagatctttgcttaataagaagaaaaaagaggcaaggagaaaacgaagagaaagaaattttgaaaaacaaaaggagaggaagaagaagaggcagcaggctaggaagactgcatcagttcttagtaaagatgatgtggcacctgaaagtggtgatactacagtgaagaaacctgaatcaaagaaggaacagaccccagagcatgggaagaaaaaacgtggcagaggaaaagcccaagttaaagcaacaaatgaatccgaagacgaaatcccacagctggtaccaataggaaagaagactccagctaatgaaaaagtagagattcaaaaacatgccacaggaaagaagtctccagcaaagagtcctaatcccagcacacctcgtgggaagaaaagaaaggctttgccagcatctgagaccccaaaagctgcagagtctgagaccccagggaaaagcccagagaagaagccaaaaatcaaagaagaggcagtgaaggaaaaaagtccttcgctggggaaaaaagatgcgagacagactccaaaaaagccagaggccaagtttttcaccactcctagtaaatctgtgagaaaagcttcccacacccccaaaaaatggcccaaaaaacccaaagtaccccagtcgacctaaagtcagtgattcaactggaaggaaacctcaatgctgcctccagagctttttggaaatactcagatcctggccaacatggtgaaaccctgtctgtaccaaaaatacaaaaattaattgggcatggtggtggacacctgtaatcccagctactagggaggctgaggcaggagaattgcttgaacctgggaggcggaggttgcagtgagccactgcactccagcctgatgacagagcaagactcagtctcaaaaataaataaaaataataaaacctccataagtaatcctg

SEQ ID NO: 313618 - DNA, 1518 bp, Homo sapiens
ggcttgctcgcgcgtgcgcaccagaagccagcagtggggttgcacacgcgcctcttcacgaggtggaaacaagatggaggattcggcctcggcctcgctgtcttctgcagccgctactggaacctccacctcgactccagcggccccgacagcacggaagcagctggataaagaacaggttagaaaggcagtggacgctctcttgacgcattgcaagtccaggaaaaacaattatgggttgcttttgaatgagaatgaaagtttatttttaatggtggtattatggaaaattccaagtaaagaactgagggtcagattgaccttgcctcatagtattcgatcagattcagaagatatctgtttatttacgaaggatgaacccaattcaactcctgaaaagacagaacagttttatagaaagcttttaaacaagcatggaattaaaaccgtttctcagattatctccctccaaactctaaagaaggaatataaatcctatgaagccaagctccgccttctgagcagttttgatttcttccttactgatgccagaattaggcggctcttaccctcactcattgggagacatttctatcaaagaaagaaagttccagtatctgtaaaccttctgtccaagaatttatcaagagagatcaatgactgtataggtggaacggtcttaaacatttctaaaagtggttcttgcagtgctatacgtattggtcacgttggaatgcaaattgagcacatcattgaaaacattgttgctgtcaccaaaggactttcagaaaaattgccagagaagtgggagagcgtgaaactcctgtttgtgaaaactgagaaatcggctgcacttcccatcttttcctcgtttgtcagcaattgggatgaagccaccaaaagatctttgcttaataagaagaaaaaagaggcaaggagaaaacgaagagaaagaaattttgaaaaacaaaaggagaggaagaagaagaggcagcaggctaggaagactgcatcagttcttagtaaagatgatgtggcacctgaaagtggtgatactacagtgaagaaacctgaatcaaagaaggaacagaccccagagcatgggaagaaaaaacgtggcagaggaaaagcccaagttaaagcaacaaatgaatccgaagacgaaatcccacagctggtaccaataggaaagaagactccagctaatgaaaaagtagagattcaaaaacatgccacaggaaagaagtctccagcaaagagtcctaatcccagcacacctcgtgggaagaaaagaaaggctttgccagcatctgagaccccaaaagctgcagagtctgagaccccagggaaaagcccagagaagaagccaaaaatcaaagaagaggcagtgaaggaaaaaagtccttcgctggggaaaaaagatgcgagacagactccaaaaaagccagaggccaagtttttcaccatgttggccaggatggtctcgatctcgttgaccttgtgatccgcctgcctcgg

SEQ ID NO: 313619 - DNA, 2438 bp, Homo sapiens
ggcttgctcgcgcgtgcgcaccagaagccagcagtggggttgcacacgcgcctcttcacgaggtggaaacaagatggaggattcggcctcggcctcgctgtcttctgcagccgctactggaacctccacctcgactccagcggccccgacagcacggaagcagctggataaagaacaggttagaaaggcagtggacgctctcttgacgcattgcaagtccaggaaaaacaattatgggttgcttttgaatgagaatgaaagtttatttttaatggtggtattatggaaaattccaagtaaagaactgagggtcagattgaccttgcctcatagtattcgatcagattcagaagatatctgtttatttacgaaggatgaacccaattcaactcctgaaaagacagaacagttttatagaaagcttttaaacaagcatggaattaaaaccgtttctcagattatctccctccaaactctaaagaaggaatataaatcctatgaagccaagctccgccttctgagcagttttgatttcttccttactgatgccagaattaggcggctcttaccctcactcattgggagacatttctatcaaagaaagaaagttccagtatctgtaaaccttctgtccaagaatttatcaagagagatcaatgactgtataggtggaacggtcttaaacatttctaaaagtggttcttgcagtgctatacgtattggtcacgttggaatgcaaattgagcacatcattgaaaacattgttgctgtcaccaaaggactttcagaaaaattgccagagaagtgggagagcgtgaaactcctgtttgtgaaaactgagaaatcggctgcacttcccatcttttcctcgtttgtcagcaattgggatgaagccaccaaaagatctttgcttaataagaagaaaaaagaggcaaggagaaaacgaagagaaagaaattttgaaaaacaaaaggagaggaagaagaagagcaggagaatcactttaacccgggaggtggaggttgcagtgagctgagatcacaccactgcactccagcctgggcggcagagcaaaactgaaaaaaagagaaaaaaaaaaacatctagctctccctgaaattagaggagtctagcctgcttttgctgtttttttggtagcgagagtagcgggcagtgggggagatggtcttactctgttccccaggctggagtgcactagtgtcatcacagctccagcctcaatttcctgggctcaaggcgatcttcccacctcagcctcccaagtagctcagactacaggggcatgccatcacagctggccagtttttacgtcttgcgtagagatgggttttccctgtgttccctaggctgggctcgaactcctgggctcaagtcctcctgcctcagcctcccaaaatgttcagattacaggcatgaggcagcatgccaatcctgtttttgcattttagtaacacaaattgtaatgttaactttttaaattatgaaagcatctaaaatataaaattatttgtaaccccactgtccttttgggcttctataaatgaatatacatctaaaatgtgggggtttagcttaattgattgttttccatagaaactaggttttatgggaagatggttggatagacttgtttcacttaaaggtctgatttgtgtaggacaaacccacatatgtaatcgtgccagtctgttctctgcatgacataattttccagcaatagctgtgtggtttttgtaatcctatcatctagtcagttcaagatcttgcaacactgtgtgattctttgctccgtagttcagtcttgttgaacatgacacaggtgtttactttcctgttcttgcatctagtttcattctaataatgttctctgttgaaaaagctggcttcaatttattgagcaagatgctggtgttatcatctaacataaaacctatcttataataaagtgttgacacatgtaatgagtactgtactgaaaaatggtggtatgtatatggtttgtactgattatgtatcgcttttataccatcaaaaagttgaaaaatcataaagttgaatcatcctaaaatgggtacattctgtactatgtttccaaggcttcggaagtgttgcatacacattcctagccagctgatagtgctaggagccaacagtagtctcccccgggggccaagaggagggcgaaatctctactatggtatatgatgttctcgtgggccaagtatgagggtgatatttcattgttggcactgggtttctggaatccatcctcttcaccagggagatttaatgaaccaaatgagatctgatgggagaaatttgagtgtaacgtttttgttctgaaggaagtaattgagttttagttcatttgttttttaggaatcgtaataattaaaatttcattttaaatgccatga

SEQ ID NO: 313620 - DNA, 5430 bp, Homo sapiens
  misc_feature (3220)..(3220): n is a, c, g, or t
ttttctcttcgttttctccttgcctcttttttcttcttattaagcaaagatcttttggtggcttcatcccaattgctgacaaacgaggaaaagatgggaagtgcagccgatttctcagttttcacaaacaggagtttcacgctctcttgacgcattgcaagtccaggaaaaacaattatgggttgcttttgaatgagaatgaaagtttatttttaatggtggtattatggaaaattccaagtaaagaactgagggtcagattgaccttgcctcatagtattcgatcagattcagaagatatctgtttatttacgaaggatgaacccaattcaactcctgaaaagacagaacagttttatagaaagcttttaaacaagcatggaattaaaaccgtttctcagattatctccctccaaactctaaagaaggaatataaatcctatgaagccaagctccgccttctgagcagttttgatttcttccttactgatgccagaattaggcggctcttaccctcactcattgggagacatttctatcaaagaaagaaagttccagtatctgtaaaccttctgtccaagaatttatcaagagagatcaatgactgtataggtggaacggtcttaaacatttctaaaagtggttcttgcagtgctatacgtattggtcacgttggaatgcaaattgagcacatcattgaaaacattgttgctgtcaccaaaggactttcagaaaaattgccagagaagtgggagagcgtgaaactcctgtttgtgaaaactgagaaatcggctgcacttcccatcttttcctcgtttgtcagcaattgggatgaagccaccaaaagatctttgcttaataagaagaaaaaagaggcaaggagaaaacgaagagaaagaaattttgaaaaacaaaaggagaggaagaagaagaggcagcaggctaggaagactgcatcagttcttagtaaagatgatgtggcacctgaaagtggtgatactacagtgaagaaacctgaatcaaagaaggaacagaccccagagcatgggaagaaaaaacgtggcagaggaaaagcccaagttaaagcaacaaatgaatccgaagacgaaatcccacagctggtaccaataggaaagaagactccagctaatgaaaaagtagagattcaaaaacatgccacaggaaagaagtctccagcaaagagtcctaatcccagcacacctcgtgggaagaaaagaaaggctttgccagcatctgagaccccaaaagctgcagagtctgagaccccagggaaaagcccagagaagaagccaaaaatcaaagaagaggcagtgaaggaaaaaagtccttcgctggggaaaaaagatgcgagacagactccaaaaaagccagaggccaagtttttcaccactcctagtaaatctgtgagaaaagcttcccacacccccaaaaaatggcccaaaaaacccaaagtaccccagtcgacctaaagtcagtgattcaactggaaggaaacctcaatgctgcctccagagctttttggaaatactcagatcctggccgcctttgtaaccttctctaaacgtcaggcctggacttaaaagattttttaaaacctccataagtagtccaggggcggtggctcacgcctgtaatcccagcactttgggaggccgaggcaggcggatcacaaggtcaacgagatcgagaccatcctggccaacatggtgaaaccctgtctgtaccaaaaatacaaaaattaattgggcatggtggtggacacctgtaatcccagctactagggaggctgaggcaggagaattgcttgaacctgggaggcggaggttgcagtgagccactgcactccagcctgatgacagagcaagactcagtctcaaaaataaataaaaataataaaacctccataagtaatcctgacatatgttcctgggtataatctgtttctaaattgtccttctgtgtatttgctaatgtaatagagggaaaaatagagtgcttctctgtggttgttcagcactttaggtagccaaggtgagaggattgcttgaggccaggagtttgagactagcctgggcaacttggtaaaaccccatctctacaaaagaaaaaaaaaaattagtgtggcatggtggcatgcatctgtgctcccagctcctcacgaggctgaggtggaaggatcaagtgagcgcaagaggttgaggctccagtgagccacgatcaccccactgtgctgtagcctgggtgacagtgtgagattctgtctcagaaaaaacaaagtataacattgctttgcttctgagtatactgttggctttccaaatcagtgggtctgacttgaggtctgtgatgtgacccttttcctcacctgctcaaccattattcacatggactccatcatattcatttgtagtcattcccagagtggcccagtgagggtctcgctgtatgagagtcggctacggaatttaggagaaacagaagtttcttggctttcatgctgagcttgttggtctaagcttatgagtcactggattagcatccatatgggaagggaaattaacatggagtcatttatacagggactaaattgaatcctacctaccggaggcaagaacatgatttatcttccataagccttatcctcttcctccttattcctcagtccatatggatttgcttatgtatgacaactccaaggaatcttggaagagtagattgctaacgtttccacaattgtcaagtatattctgaggcagtaaacacctttttaggtacgtggcctttcactggttgtgaattggtatgcatccgtagtagtaagttcacagattcactgcagtgcaggaatgttcttgcatgccaaagactcaactgctttcaaagataatgtgggtgctagatgcagtggcttacatctgtaaccctgttagggtgaccagacccaacaccaggtcgtgggggtgacaaagtccagtggagtcaaaggattgagaaaaagacagtttgagagagaagtaggaccagcagaccatcgggatggtggaggctgtgaaggccgtgagctctgggagcccacactatttattggtaatccaacaaagaaacagatggtgagaatgtgaaggtcagaagggcaccttgcattaagcacatgatttacagctgtgatggtttagcatttgctctgctacttgagatnatggagagcaggttcttttaactcaagttacagtcgatcctgggagagcaaggagccagcaagtctagacattccagagccacaggccctggattctatccaagccacgagggattttatgccctgggcttagattatggtgcgtcagggcagccttccaccctttagcacagagcttggtgttccaaagaccacaaggggttttagacccttgaccctggacatattccaagactcttttacattatgtcagaatgcaagccctgcctcagcttctcccaacactcagcttttcgcaacataatcccagcactttggaacgctgggtggattgcttgaacccaggagttcgagaccatcctgggcaatatggcaaaaccccatctttaccaaaaataagctgggtgtggtggaacatgcctgtggtcccagcttcttgggaggctgaggtgggaggattgcttgaacccgggaggtagaggctgcaatgggccatgatcacgatcctgcactccagcctgggcaacagagagagacagtccctggcccactgcccccttccctggcccagtctcaaaaaaaatgaggctgggcgtggtggctcacatctgtaatcccagccaaggctggcagatcacttgaggccaggagttctgagaccagcctggcttacatggtgaaaccccatctctactaaaaatacaaaaactagccaggcatggtgggaggcacctgtaatcccagctacttgggaggctgaagcaggagaatcactttaacccgggaggtggaggttgcagtgagctgagatcacaccactgcactccagcctgggcggcagagcaaaactgaaaaaaagagaaaaaaaaaaacatctagctctccctgaaattagaggagtctagcctgcttttgctgtttttttggtagcgagagtagcgggcagtgggggagatggtcttactctgttccccaggctggagtgcactagtgtcatcacagctccagcctcaatttcctgggctcaaggcgatcttcccacctcagcctcccaagtagctcagactacaggggcatgccatcacagctggccagtttttacgtcttgcgtagagatgggttttccctgtgttccctaggctgggctcgaactcctgggctcaagtcctcctgcctcagcctcccaaaatgttcagattacaggcatgaggcagcatgccaatcctgtttttgcattttagtaacacaaattgtaatgttaactttttaaattatgaaagcatctaaaatataaaattatttgtaaccccactgtccttttgggcttctataaatgaatatacatctaaaatgtgggggtttagcttaattgattgttttccatagaaactaggttttatgggaagatggttggatagacttgtttcacttaaaggtctgatttgtgtaggacaaacccacatatgtaatcgtgccagtctgttctctgcatgacataattttccagcaatagctgtgtggtttttgtaatcctatcatctagtcagttcaagatcttgcaacactgtgtgattctttgctccgtagttcagtcttgttgaacatgacacaggtgtttactttcctgttcttgcatctagtttcattctaataatgttctctgttgaaaaagctggcttcaatttattgagcaagatgctggtgttatcatctaacataaaacctatcttataataaagtgttgacacatgtaatgagtactgtactgaaaaatggtggtatgtatatggtttgtactgattatgtatcgcttttataccatcaaaaagttgaaaaatcataaagttgaatcatcctaaaatgggtacattctgtactatgtttccaaggcttcggaagtgttgcatacacattcctagccagctgatagtgctaggagccaacagtagtctcccccgggggccaagaggagggcgaaatctctactatggtatatgatgttctcgtgggccaagtatgagggtgatatttcattgttggcactgggtttctggaatccatcctcttcaccagggagatttaatgaaccaaatgagatctgatgggagaaatttgagtgtaacgtttttgttctgaaggaagtaattgagttttagttcatttgttttttaggaatcgtaataattaaaatttcattttaaatgccatga

SEQ ID NO: 313621 - DNA, 5384 bp, Homo sapiens
  misc_feature (3174)..(3174): n is a, c, g, or t
ggcttgctcgcgcgtgcgcaccagaagccagcagtggggttgcacacgcgcctcttcacgaggtggaaacaagatggaggattcggcctcggcctcgctgtcttctgcagccgctactggaacctccacctcgactccagcggccccgacagcacggaagcagctggataaagaacaggttagaaaggcagtggacgctctcttgacgcattgcaagtccaggaaaaacaattatgggttgcttttgaatgagaatgaaagtttatttttaatggtggtattatggaaaattccaagtaaagaactgagggtcagattgaccttgcctcatagtattcgatcagattcagaagatatctgtttatttacgaaggatgaacccaattcaactcctgaaaagacagaacagttttatagaaagcttttaaacaagcatggaattaaaaccgtttctcagattatctccctccaaactctaaagaaggaatataaatcctatgaagccaagctccgccttctgagcagttttgatttcttccttactgatgccagaattaggcggctcttaccctcactcattgggagacatttctatcaaagaaagaatgctatacgtattggtcacgttggaatgcaaattgagcacatcattgaaaacattgttgctgtcaccaaaggactttcagaaaaattgccagagaagtgggagagcgtgaaactcctgtttgtgaaaactgagaaatcggctgcacttcccatcttttcctcgtttgtcagcaattgggatgaagccaccaaaagatctttgcttaataagaagaaaaaagaggcaaggagaaaacgaagagaaagaaattttgaaaaacaaaaggagaggaagaagaagaggcagcaggctaggaagactgcatcagttcttagtaaagatgatgtggcacctgaaagtggtgatactacagtgaagaaacctgaatcaaagaaggaacagaccccagagcatgggaagaaaaaacgtggcagaggaaaagcccaagttaaagcaacaaatgaatccgaagacgaaatcccacagctggtaccaataggaaagaagactccagctaatgaaaaagtagagattcaaaaacatgccacaggaaagaagtctccagcaaagagtcctaatcccagcacacctcgtgggaagaaaagaaaggctttgccagcatctgagaccccaaaagctgcagagtctgagaccccagggaaaagcccagagaagaagccaaaaatcaaagaagaggcagtgaaggaaaaaagtccttcgctggggaaaaaagatgcgagacagactccaaaaaagccagaggccaagtttttcaccactcctagtaaatctgtgagaaaagcttcccacacccccaaaaaatggcccaaaaaacccaaagtaccccagtcgacctaaagtcagtgattcaactggaaggaaacctcaatgctgcctccagagctttttggaaatactcagatcctggccgcctttgtaaccttctctaaacgtcaggcctggacttaaaagattttttaaaacctccataagtagtccaggggcggtggctcacgcctgtaatcccagcactttgggaggccgaggcaggcggatcacaaggtcaacgagatcgagaccatcctggccaacatggtgaaaccctgtctgtaccaaaaatacaaaaattaattgggcatggtggtggacacctgtaatcccagctactagggaggctgaggcaggagaattgcttgaacctgggaggcggaggttgcagtgagccactgcactccagcctgatgacagagcaagactcagtctcaaaaataaataaaaataataaaacctccataagtaatcctgacatatgttcctgggtataatctgtttctaaattgtccttctgtgtatttgctaatgtaatagagggaaaaatagagtgcttctctgtggttgttcagcactttaggtagccaaggtgagaggattgcttgaggccaggagtttgagactagcctgggcaacttggtaaaaccccatctctacaaaagaaaaaaaaaaattagtgtggcatggtggcatgcatctgtgctcccagctcctcacgaggctgaggtggaaggatcaagtgagcgcaagaggttgaggctccagtgagccacgatcaccccactgtgctgtagcctgggtgacagtgtgagattctgtctcagaaaaaacaaagtataacattgctttgcttctgagtatactgttggctttccaaatcagtgggtctgacttgaggtctgtgatgtgacccttttcctcacctgctcaaccattattcacatggactccatcatattcatttgtagtcattcccagagtggcccagtgagggtctcgctgtatgagagtcggctacggaatttaggagaaacagaagtttcttggctttcatgctgagcttgttggtctaagcttatgagtcactggattagcatccatatgggaagggaaattaacatggagtcatttatacagggactaaattgaatcctacctaccggaggcaagaacatgatttatcttccataagccttatcctcttcctccttattcctcagtccatatggatttgcttatgtatgacaactccaaggaatcttggaagagtagattgctaacgtttccacaattgtcaagtatattctgaggcagtaaacacctttttaggtacgtggcctttcactggttgtgaattggtatgcatccgtagtagtaagttcacagattcactgcagtgcaggaatgttcttgcatgccaaagactcaactgctttcaaagataatgtgggtgctagatgcagtggcttacatctgtaaccctgttagggtgaccagacccaacaccaggtcgtgggggtgacaaagtccagtggagtcaaaggattgagaaaaagacagtttgagagagaagtaggaccagcagaccatcgggatggtggaggctgtgaaggccgtgagctctgggagcccacactatttattggtaatccaacaaagaaacagatggtgagaatgtgaaggtcagaagggcaccttgcattaagcacatgatttacagctgtgatggtttagcatttgctctgctacttgagatnatggagagcaggttcttttaactcaagttacagtcgatcctgggagagcaaggagccagcaagtctagacattccagagccacaggccctggattctatccaagccacgagggattttatgccctgggcttagattatggtgcgtcagggcagccttccaccctttagcacagagcttggtgttccaaagaccacaaggggttttagacccttgaccctggacatattccaagactcttttacattatgtcagaatgcaagccctgcctcagcttctcccaacactcagcttttcgcaacataatcccagcactttggaacgctgggtggattgcttgaacccaggagttcgagaccatcctgggcaatatggcaaaaccccatctttaccaaaaataagctgggtgtggtggaacatgcctgtggtcccagcttcttgggaggctgaggtgggaggattgcttgaacccgggaggtagaggctgcaatgggccatgatcacgatcctgcactccagcctgggcaacagagagagacagtccctggcccactgcccccttccctggcccagtctcaaaaaaaatgaggctgggcgtggtggctcacatctgtaatcccagccaaggctggcagatcacttgaggccaggagttctgagaccagcctggcttacatggtgaaaccccatctctactaaaaatacaaaaactagccaggcatggtgggaggcacctgtaatcccagctacttgggaggctgaagcaggagaatcactttaacccgggaggtggaggttgcagtgagctgagatcacaccactgcactccagcctgggcggcagagcaaaactgaaaaaaagagaaaaaaaaaaacatctagctctccctgaaattagaggagtctagcctgcttttgctgtttttttggtagcgagagtagcgggcagtgggggagatggtcttactctgttccccaggctggagtgcactagtgtcatcacagctccagcctcaatttcctgggctcaaggcgatcttcccacctcagcctcccaagtagctcagactacaggggcatgccatcacagctggccagtttttacgtcttgcgtagagatgggttttccctgtgttccctaggctgggctcgaactcctgggctcaagtcctcctgcctcagcctcccaaaatgttcagattacaggcatgaggcagcatgccaatcctgtttttgcattttagtaacacaaattgtaatgttaactttttaaattatgaaagcatctaaaatataaaattatttgtaaccccactgtccttttgggcttctataaatgaatatacatctaaaatgtgggggtttagcttaattgattgttttccatagaaactaggttttatgggaagatggttggatagacttgtttcacttaaaggtctgatttgtgtaggacaaacccacatatgtaatcgtgccagtctgttctctgcatgacataattttccagcaatagctgtgtggtttttgtaatcctatcatctagtcagttcaagatcttgcaacactgtgtgattctttgctccgtagttcagtcttgttgaacatgacacaggtgtttactttcctgttcttgcatctagtttcattctaataatgttctctgttgaaaaagctggcttcaatttattgagcaagatgctggtgttatcatctaacataaaacctatcttataataaagtgttgacacatgtaatgagtactgtactgaaaaatggtggtatgtatatggtttgtactgattatgtatcgcttttataccatcaaaaagttgaaaaatcataaagttgaatcatcctaaaatgggtacattctgtactatgtttccaaggcttcggaagtgttgcatacacattcctagccagctgatagtgctaggagccaacagtagtctcccccgggggccaagaggagggcgaaatctctactatggtatatgatgttctcgtgggccaagtatgagggtgatatttcattgttggcactgggtttctggaatccatcctcttcaccagggagatttaatgaaccaaatgagatctgatgggagaaatttgagtgtaacgtttttgttctgaaggaagtaattgagttttagttcatttgttttttaggaatcgtaataattaaaatttcattttaaatgccatga

SEQ ID NO: 313622 - DNA, 4885 bp, Homo sapiens
  misc_feature (2675)..(2675): n is a, c, g, or t
ggcttgctcgcgcgtgcgcaccagaagccagcagtggggttgcacacgcgcctcttcacgaggtggaaacaagatggaggattcggcctcggcctcgctgtcttctgcagccgctactggaacctccacctcgactccagcggccccgacagcacggaagcagctggataaagaacaggactttcagaaaaattgccagagaagtgggagagcgtgaaactcctgtttgtgaaaactgagaaatcggctgcacttcccatcttttcctcgtttgtcagcaattgggatgaagccaccaaaagatctttgcttaataagaagaaaaaagaggcaaggagaaaacgaagagaaagaaattttgaaaaacaaaaggagaggaagaagaagaggcagcaggctaggaagactgcatcagttcttagtaaagatgatgtggcacctgaaagtggtgatactacagtgaagaaacctgaatcaaagaaggaacagaccccagagcatgggaagaaaaaacgtggcagaggaaaagcccaagttaaagcaacaaatgaatccgaagacgaaatcccacagctggtaccaataggaaagaagactccagctaatgaaaaagtagagattcaaaaacatgccacaggaaagaagtctccagcaaagagtcctaatcccagcacacctcgtgggaagaaaagaaaggctttgccagcatctgagaccccaaaagctgcagagtctgagaccccagggaaaagcccagagaagaagccaaaaatcaaagaagaggcagtgaaggaaaaaagtccttcgctggggaaaaaagatgcgagacagactccaaaaaagccagaggccaagtttttcaccactcctagtaaatctgtgagaaaagcttcccacacccccaaaaaatggcccaaaaaacccaaagtaccccagtcgacctaaagtcagtgattcaactggaaggaaacctcaatgctgcctccagagctttttggaaatactcagatcctggccgcctttgtaaccttctctaaacgtcaggcctggacttaaaagattttttaaaacctccataagtagtccaggggcggtggctcacgcctgtaatcccagcactttgggaggccgaggcaggcggatcacaaggtcaacgagatcgagaccatcctggccaacatggtgaaaccctgtctgtaccaaaaatacaaaaattaattgggcatggtggtggacacctgtaatcccagctactagggaggctgaggcaggagaattgcttgaacctgggaggcggaggttgcagtgagccactgcactccagcctgatgacagagcaagactcagtctcaaaaataaataaaaataataaaacctccataagtaatcctgacatatgttcctgggtataatctgtttctaaattgtccttctgtgtatttgctaatgtaatagagggaaaaatagagtgcttctctgtggttgttcagcactttaggtagccaaggtgagaggattgcttgaggccaggagtttgagactagcctgggcaacttggtaaaaccccatctctacaaaagaaaaaaaaaaattagtgtggcatggtggcatgcatctgtgctcccagctcctcacgaggctgaggtggaaggatcaagtgagcgcaagaggttgaggctccagtgagccacgatcaccccactgtgctgtagcctgggtgacagtgtgagattctgtctcagaaaaaacaaagtataacattgctttgcttctgagtatactgttggctttccaaatcagtgggtctgacttgaggtctgtgatgtgacccttttcctcacctgctcaaccattattcacatggactccatcatattcatttgtagtcattcccagagtggcccagtgagggtctcgctgtatgagagtcggctacggaatttaggagaaacagaagtttcttggctttcatgctgagcttgttggtctaagcttatgagtcactggattagcatccatatgggaagggaaattaacatggagtcatttatacagggactaaattgaatcctacctaccggaggcaagaacatgatttatcttccataagccttatcctcttcctccttattcctcagtccatatggatttgcttatgtatgacaactccaaggaatcttggaagagtagattgctaacgtttccacaattgtcaagtatattctgaggcagtaaacacctttttaggtacgtggcctttcactggttgtgaattggtatgcatccgtagtagtaagttcacagattcactgcagtgcaggaatgttcttgcatgccaaagactcaactgctttcaaagataatgtgggtgctagatgcagtggcttacatctgtaaccctgttagggtgaccagacccaacaccaggtcgtgggggtgacaaagtccagtggagtcaaaggattgagaaaaagacagtttgagagagaagtaggaccagcagaccatcgggatggtggaggctgtgaaggccgtgagctctgggagcccacactatttattggtaatccaacaaagaaacagatggtgagaatgtgaaggtcagaagggcaccttgcattaagcacatgatttacagctgtgatggtttagcatttgctctgctacttgagatnatggagagcaggttcttttaactcaagttacagtcgatcctgggagagcaaggagccagcaagtctagacattccagagccacaggccctggattctatccaagccacgagggattttatgccctgggcttagattatggtgcgtcagggcagccttccaccctttagcacagagcttggtgttccaaagaccacaaggggttttagacccttgaccctggacatattccaagactcttttacattatgtcagaatgcaagccctgcctcagcttctcccaacactcagcttttcgcaacataatcccagcactttggaacgctgggtggattgcttgaacccaggagttcgagaccatcctgggcaatatggcaaaaccccatctttaccaaaaataagctgggtgtggtggaacatgcctgtggtcccagcttcttgggaggctgaggtgggaggattgcttgaacccgggaggtagaggctgcaatgggccatgatcacgatcctgcactccagcctgggcaacagagagagacagtccctggcccactgcccccttccctggcccagtctcaaaaaaaatgaggctgggcgtggtggctcacatctgtaatcccagccaaggctggcagatcacttgaggccaggagttctgagaccagcctggcttacatggtgaaaccccatctctactaaaaatacaaaaactagccaggcatggtgggaggcacctgtaatcccagctacttgggaggctgaagcaggagaatcactttaacccgggaggtggaggttgcagtgagctgagatcacaccactgcactccagcctgggcggcagagcaaaactgaaaaaaagagaaaaaaaaaaacatctagctctccctgaaattagaggagtctagcctgcttttgctgtttttttggtagcgagagtagcgggcagtgggggagatggtcttactctgttccccaggctggagtgcactagtgtcatcacagctccagcctcaatttcctgggctcaaggcgatcttcccacctcagcctcccaagtagctcagactacaggggcatgccatcacagctggccagtttttacgtcttgcgtagagatgggttttccctgtgttccctaggctgggctcgaactcctgggctcaagtcctcctgcctcagcctcccaaaatgttcagattacaggcatgaggcagcatgccaatcctgtttttgcattttagtaacacaaattgtaatgttaactttttaaattatgaaagcatctaaaatataaaattatttgtaaccccactgtccttttgggcttctataaatgaatatacatctaaaatgtgggggtttagcttaattgattgttttccatagaaactaggttttatgggaagatggttggatagacttgtttcacttaaaggtctgatttgtgtaggacaaacccacatatgtaatcgtgccagtctgttctctgcatgacataattttccagcaatagctgtgtggtttttgtaatcctatcatctagtcagttcaagatcttgcaacactgtgtgattctttgctccgtagttcagtcttgttgaacatgacacaggtgtttactttcctgttcttgcatctagtttcattctaataatgttctctgttgaaaaagctggcttcaatttattgagcaagatgctggtgttatcatctaacataaaacctatcttataataaagtgttgacacatgtaatgagtactgtactgaaaaatggtggtatgtatatggtttgtactgattatgtatcgcttttataccatcaaaaagttgaaaaatcataaagttgaatcatcctaaaatgggtacattctgtactatgtttccaaggcttcggaagtgttgcatacacattcctagccagctgatagtgctaggagccaacagtagtctcccccgggggccaagaggagggcgaaatctctactatggtatatgatgttctcgtgggccaagtatgagggtgatatttcattgttggcactgggtttctggaatccatcctcttcaccagggagatttaatgaaccaaatgagatctgatgggagaaatttgagtgtaacgtttttgttctgaaggaagtaattgagttttagttcatttgttttttaggaatcgtaataattaaaatttcattttaaatgccatga

SEQ ID NO: 313623 - DNA, 4831 bp, Homo sapiens
  misc_feature (2621)..(2621): n is a, c, g, or t
cagactgtgtttcacaaaagtctcttaactgtatactttagatagtcagattctgaaatgccggtatataatttactgcataaaatgcatgtttggctgtgagtcaaaaactgcggttgaggttccagtgctggttagggagtttgttctctgtatagatcgaggtccatttaggggcttatggataatcaaaactgcacgtggtacatctatgccgtttgttaaccaacagaactgttcctgctaaaatgtttgtatggtgttttttggtaggaggcaaggagaaaacgaagagaaagaaattttgaaaaacaaaaggagaggaagaagaagaggcagcaggctaggaagactgcatcagttcttagtaaagatgatgtggcacctgaaagtggtgatactacagtgaagaaacctgaatcaaagaaggaacagaccccagagcatgggaagaaaaaacgtggcagaggaaaagcccaagttaaagcaacaaatgaatccgaagacgaaatcccacagctggtaccaataggaaagaagactccagctaatgaaaaagtagagattcaaaaacatgccacaggaaagaagtctccagcaaagagtcctaatcccagcacacctcgtgggaagaaaagaaaggctttgccagcatctgagaccccaaaagctgcagagtctgagaccccagggaaaagcccagagaagaagccaaaaatcaaagaagaggcagtgaaggaaaaaagtccttcgctggggaaaaaagatgcgagacagactccaaaaaagccagaggccaagtttttcaccactcctagtaaatctgtgagaaaagcttcccacacccccaaaaaatggcccaaaaaacccaaagtaccccagtcgacctaaagtcagtgattcaactggaaggaaacctcaatgctgcctccagagctttttggaaatactcagatcctggccgcctttgtaaccttctctaaacgtcaggcctggacttaaaagattttttaaaacctccataagtagtccaggggcggtggctcacgcctgtaatcccagcactttgggaggccgaggcaggcggatcacaaggtcaacgagatcgagaccatcctggccaacatggtgaaaccctgtctgtaccaaaaatacaaaaattaattgggcatggtggtggacacctgtaatcccagctactagggaggctgaggcaggagaattgcttgaacctgggaggcggaggttgcagtgagccactgcactccagcctgatgacagagcaagactcagtctcaaaaataaataaaaataataaaacctccataagtaatcctgacatatgttcctgggtataatctgtttctaaattgtccttctgtgtatttgctaatgtaatagagggaaaaatagagtgcttctctgtggttgttcagcactttaggtagccaaggtgagaggattgcttgaggccaggagtttgagactagcctgggcaacttggtaaaaccccatctctacaaaagaaaaaaaaaaattagtgtggcatggtggcatgcatctgtgctcccagctcctcacgaggctgaggtggaaggatcaagtgagcgcaagaggttgaggctccagtgagccacgatcaccccactgtgctgtagcctgggtgacagtgtgagattctgtctcagaaaaaacaaagtataacattgctttgcttctgagtatactgttggctttccaaatcagtgggtctgacttgaggtctgtgatgtgacccttttcctcacctgctcaaccattattcacatggactccatcatattcatttgtagtcattcccagagtggcccagtgagggtctcgctgtatgagagtcggctacggaatttaggagaaacagaagtttcttggctttcatgctgagcttgttggtctaagcttatgagtcactggattagcatccatatgggaagggaaattaacatggagtcatttatacagggactaaattgaatcctacctaccggaggcaagaacatgatttatcttccataagccttatcctcttcctccttattcctcagtccatatggatttgcttatgtatgacaactccaaggaatcttggaagagtagattgctaacgtttccacaattgtcaagtatattctgaggcagtaaacacctttttaggtacgtggcctttcactggttgtgaattggtatgcatccgtagtagtaagttcacagattcactgcagtgcaggaatgttcttgcatgccaaagactcaactgctttcaaagataatgtgggtgctagatgcagtggcttacatctgtaaccctgttagggtgaccagacccaacaccaggtcgtgggggtgacaaagtccagtggagtcaaaggattgagaaaaagacagtttgagagagaagtaggaccagcagaccatcgggatggtggaggctgtgaaggccgtgagctctgggagcccacactatttattggtaatccaacaaagaaacagatggtgagaatgtgaaggtcagaagggcaccttgcattaagcacatgatttacagctgtgatggtttagcatttgctctgctacttgagatnatggagagcaggttcttttaactcaagttacagtcgatcctgggagagcaaggagccagcaagtctagacattccagagccacaggccctggattctatccaagccacgagggattttatgccctgggcttagattatggtgcgtcagggcagccttccaccctttagcacagagcttggtgttccaaagaccacaaggggttttagacccttgaccctggacatattccaagactcttttacattatgtcagaatgcaagccctgcctcagcttctcccaacactcagcttttcgcaacataatcccagcactttggaacgctgggtggattgcttgaacccaggagttcgagaccatcctgggcaatatggcaaaaccccatctttaccaaaaataagctgggtgtggtggaacatgcctgtggtcccagcttcttgggaggctgaggtgggaggattgcttgaacccgggaggtagaggctgcaatgggccatgatcacgatcctgcactccagcctgggcaacagagagagacagtccctggcccactgcccccttccctggcccagtctcaaaaaaaatgaggctgggcgtggtggctcacatctgtaatcccagccaaggctggcagatcacttgaggccaggagttctgagaccagcctggcttacatggtgaaaccccatctctactaaaaatacaaaaactagccaggcatggtgggaggcacctgtaatcccagctacttgggaggctgaagcaggagaatcactttaacccgggaggtggaggttgcagtgagctgagatcacaccactgcactccagcctgggcggcagagcaaaactgaaaaaaagagaaaaaaaaaaacatctagctctccctgaaattagaggagtctagcctgcttttgctgtttttttggtagcgagagtagcgggcagtgggggagatggtcttactctgttccccaggctggagtgcactagtgtcatcacagctccagcctcaatttcctgggctcaaggcgatcttcccacctcagcctcccaagtagctcagactacaggggcatgccatcacagctggccagtttttacgtcttgcgtagagatgggttttccctgtgttccctaggctgggctcgaactcctgggctcaagtcctcctgcctcagcctcccaaaatgttcagattacaggcatgaggcagcatgccaatcctgtttttgcattttagtaacacaaattgtaatgttaactttttaaattatgaaagcatctaaaatataaaattatttgtaaccccactgtccttttgggcttctataaatgaatatacatctaaaatgtgggggtttagcttaattgattgttttccatagaaactaggttttatgggaagatggttggatagacttgtttcacttaaaggtctgatttgtgtaggacaaacccacatatgtaatcgtgccagtctgttctctgcatgacataattttccagcaatagctgtgtggtttttgtaatcctatcatctagtcagttcaagatcttgcaacactgtgtgattctttgctccgtagttcagtcttgttgaacatgacacaggtgtttactttcctgttcttgcatctagtttcattctaataatgttctctgttgaaaaagctggcttcaatttattgagcaagatgctggtgttatcatctaacataaaacctatcttataataaagtgttgacacatgtaatgagtactgtactgaaaaatggtggtatgtatatggtttgtactgattatgtatcgcttttataccatcaaaaagttgaaaaatcataaagttgaatcatcctaaaatgggtacattctgtactatgtttccaaggcttcggaagtgttgcatacacattcctagccagctgatagtgctaggagccaacagtagtctcccccgggggccaagaggagggcgaaatctctactatggtatatgatgttctcgtgggccaagtatgagggtgatatttcattgttggcactgggtttctggaatccatcctcttcaccagggagatttaatgaaccaaatgagatctgatgggagaaatttgagtgtaacgtttttgttctgaaggaagtaattgagttttagttcatttgttttttaggaatcgtaataattaaaatttcattttaaatgccatga

SEQ ID NO: 313624 - DNA, 564 bp, Homo sapiens
ggcttgctcgcgcgtgcgcaccagaagccagcagtggggttgcacacgcgcctcttcacgaggtggaaacaagatggaggattcggcctcggcctcgctgtcttctgcagccgctactggaacctccacctcgactccagcggccccgacagcacggaagcagctggataaagaacaggttagaaaggcagtggacgctctcttgacgcattgcaagtccaggaaaaacaattatgggttgcttttgaatgagaatgaaagtttatttttaatggtggtattatggaaaattccaagtaaagaactgagggtcagattagacgagatcttgcgctgttgcccagctggagtacaatagtgagatctgtgttcactgcaacctcaacctccctgacctgactcaagtgatcctcccacctcagctactagggaggctgaggcaggagaattgcttgaacctgggaggcggaggttgcagtgagccactgcactccagcctgatgacagagcaagactcagtctcaaaaataaataaaaataataaaacctccataagtaatcctg

SEQ ID NO: 313625 - DNA, 1993 bp, Homo sapiens
ggcttgctcgcgcgtgcgcaccagaagccagcagtggggttgcacacgcgcctcttcacgaggtggaaacaagatggaggattcggcctcggcctcgctgtcttctgcagccgctactggaacctccacctcgactccagcggccccgacagcacggaagcagctggataaagaacaggttagaaaggcagtggacgctctcttgacgcattgcaagtccaggaaaaacaattatgggttgcttttgaatgagaatgaaagtttatttttaatggtggtattatggaaaattccaagtaaagaactgagggtcagattgaccttgcctcatagtattcgatcagattcagaagatatctgtttatttacgaaggatgaacccaattcaactcctgaaaagacagaacagttttatagaaagcttttaaacaagcatggaattaaaaccgtttctcagattatctccctccaaactctaaagaaggaatataaatcctatgaagccaagctccgccttctgagcagttttgatttcttccttactgatgccagaattaggcggctcttaccctcactcattgggagacatttctatcaaagaaagaaagttccagtatctgtaaaccttctgtccaagaatttatcaagagagatcaatgactgtataggtggaacggtcttaaacatttctaaaagtggttcttgcagtgctatacgtattggtcacgttggaatgcaaattgagcacatcattgaaaacattgttgctgtcaccaaaggactttcagaaaaattgccagagaagtgggagagcgtgaaactcctgtttgtgaaaactgagaaatcggctgcacttcccatcttttcctcgtttgtcagcaattgggatgaagccaccaaaagatctttgcttaataagaagaaaaaagaggcaaggagaaaacgaagagaaagaaattttgaaaaacaaaaggagaggaagaagaagaggcagcaggctaggaagactgcatcagttcttagtaaagatgatgtggcacctgaaagtggtgatactacagtgaagaaacctgaatcaaagaaggaacagaccccagagcatgggaagaaaaaacgtggcagaggaaaagcccaagttaaagcaacaaatgaatccgaagacgaaatcccacagctggtaccaataggaaagaagactccagctaatgaaaaagtagagattcaaaaacatgccacaggaaagaagtctccagcaaagagtcctaatcccagcacacctcgtgggaagaaaagaaaggctttgccagcatctgagaccccaaaagctgcagagtctgagaccccagggaaaagcccagagaagaagccaaaaatcaaagaagaggcagtgaaggaaaaaagtccttcgctggggaaaaaagatgcgagacagactccaaaaaagccagaggccaagtttttcaccactcctagtaaatctgtgagaaaagcttcccacacccccaaaaaatggcccaaaaaacccaaagtaccccagtcgacctaaagtcagtgattcaactggaaggaaacctcaatgctgcctccagagctttttggaaatactcagatcctggccgcctttgtaaccttctctaaacgtcaggcctggacttaaaagattttttaaaacctccataagtagtccaggggcggtggctcacgcctgtaatcccagcactttgggaggccgaggcaggcggatcacaaggtcaacgagatcgagaccatcctggccaacatggtgaaaccctgtctgtaccaaaaatacaaaaattaattgggcatggtggtggacacctgtaatcccagctactagggaggctgaggcaggagaattgcttgaacctgggaggcggaggttgcagtgagccactgcactccagcctgatgacagagcaagactcagtctcaaaaataaataaaaataataaaacctccataagtaatcctg

SEQ ID NO: 313626 - DNA, 5175 bp, Homo sapiens
  misc_feature (3276)..(3276): n is a, c, g, or t
ggcttgctcgcgcgtgcgcaccagaagccagcagtggggttgcacacgcgcctcttcacgaggtggaaacaagatggaggattcggcctcggcctcgctgtcttctgcagccgctactggaacctccacctcgactccagcggccccgacagcacggaagcagctggataaagaacaggttagaaaggcagtggacgctctcttgacgcattgcaagtccaggaaaaacaattatgggttgcttttgaatgagaatgaaagtttatttttaatggtggtattatggaaaattccaagtaaagaactgagggtcagattgaccttgcctcatagtattcgatcagattcagaagatatctgtttatttacgaaggatgaacccaattcaactcctgaaaagacagaacagttttatagaaagcttttaaacaagcatggaattaaaaccgtttctcagattatctccctccaaactctaaagaaggaatataaatcctatgaagccaagctccgccttctgagcagttttgatttcttccttactgatgccagaattaggcggctcttaccctcactcattgggagacatttctatcaaagaaagaaagttccagtatctgtaaaccttctgtccaagaatttatcaagagagatcaatgactgtataggtggaacggtcttaaacatttctaaaagtggttcttgcagtgctatacgtattggtcacgttggaatgcaaattgagcacatcattgaaaacattgttgctgtcaccaaaggactttcagaaaaattgccagagaagtgggagagcgtgaaactcctgtttgtgaaaactgagaaatcggctgcacttcccatcttttcctcgtttgtcagcaattgggatgaagccaccaaaagatctttgcttaataagaagaaaaaagaggcaaggagaaaacgaagagaaagaaattttgaaaaacaaaaggagaggaagaagaagaggcagcaggctaggaagactgcatcagttcttagtaaagatgatgtggcacctgaaagtggtgatactacagtgaagaaacctgaatcaaagaaggaacagaccccagagcatgggaagaaaaaacgtggcagaggaaaagcccaagttaaagcaacaaatgaatccgaagacgaaatcccacagctggtaccaataggaaagaagactccagctaatgaaaaagtagagattcaaaaacatgccacaggaaagaagtctccagcaaagagtcctaatcccagcacacctcgtgggaagaaaagaaaggctttgccagcatctgagaccccaaaagctgcagagtctgagaccccagggaaaagcccagagaagaagccaaaaatcaaagaagaggcagtgaaggaaaaaagtccttcgctggggaaaaaagatgcgagacagactccaaaaaagccagaggccaagtttttcaccactcctagtaaatctgtgagaaaagcttcccacacccccaaaaaatggcccaaaaaacccaaagtaccccagtcgacctaaagtcagtgattcaactggaaggaaacctcaatgctgcctccagagctttttggaaatactcagatcctggccgcctttgtaaccttctctaaacgtcaggcctggacttaaaagattttttaaaacctccataagtagtccaggggcggtggctcacgcctgtaatcccagcactttgggaggccgaggcaggcggatcacaaggtcaacgagatcgagaccatcctggccaacatggtgaaaccctgtctgtaccaaaaatacaaaaattaattgggcatggtggtggacacctgtaatcccagctactagggaggctgaggcaggagaattgcttgaacctgggaggcggaggttgcagtgagccactgcactccagcctgatgacagagcaagactcagtctcaaaaataaataaaaataataaaacctccataagtaatcctgacatatgttcctgggtataatctgtttctaaattgtccttctgtgtatttgctaatgtaatagagggaaaaatagagtgcttctctgtggttgttcagcactttaggtagccaaggtgagaggattgcttgaggccaggagtttgagactagcctgggcaacttggtaaaaccccatctctacaaaagaaaaaaaaaaattagtgtggcatggtggcatgcatctgtgctcccagctcctcacgaggctgaggtggaaggatcaagtgagcgcaagaggttgaggctccagtgagccacgatcaccccactgtgctgtagcctgggtgacagtgtgagattctgtctcagaaaaaacaaagtataacattgctttgcttctgagtatactgttggctttccaaatcagtgggtctgacttgaggtctgtgatgtgacccttttcctcacctgctcaaccattattcacatggactccatcatattcatttgtagtcattcccagagtggcccagtgagggtctcgctgtatgagagtcggctacggaatttaggagaaacagaagtttcttggctttcatgctgagcttgttggtctaagcttatgagtcactggattagcatccatatgggaagggaaattaacatggagtcatttatacagggactaaattgaatcctacctaccggaggcaagaacatgatttatcttccataagccttatcctcttcctccttattcctcagtccatatggatttgcttatgtatgacaactccaaggaatcttggaagagtagattgctaacgtttccacaattgtcaagtatattctgaggcagtaaacacctttttaggtacgtggcctttcactggttgtgaattggtatgcatccgtagtagtaagttcacagattcactgcagtgcaggaatgttcttgcatgccaaagactcaactgctttcaaagataatgtgggtgctagatgcagtggcttacatctgtaaccctgttagggtgaccagacccaacaccaggtcgtgggggtgacaaagtccagtggagtcaaaggattgagaaaaagacagtttgagagagaagtaggaccagcagaccatcgggatggtggaggctgtgaaggccgtgagctctgggagcccacactatttattggtaatccaacaaagaaacagatggtgagaatgtgaaggtcagaagggcaccttgcattaagcacatgatttacagctgtgatggtttagcatttgctctgctacttgagatnatggagagcaggttcttttaactcaagttacagtcgatcctgggagagcaaggagccagcaagtctagacattccagagccacaggccctggattctatccaagccacgagggattttatgccctgggcttagattatggtgcgtcagggcagccttccaccctttagcacagagcttggtgttccaaagaccacaaggggttttagacccttgaccctggacatattccaagactcttttacattatgtcagaatgcaagccctgcctcagcttctcccaacactcagcttttcgcaacataatcccagcactttggaacgctgggtggattgcttgaacccaggagttcgagaccatcctgggcaatatggcaaaaccccatctttaccaaaaataagctgggtgtggtggaacatgcctgtggtcccagcttcttgggaggctgaggtgggaggattgcttgaacccgggaggtagaggctgcaatgggccatgatcacgatcctgcactccagcctgggcaacagagagagacagtccctggcccactgcccccttccctggcccagtctcaaaaaaaatgaggctgggcgtggtggctcacatctgtaatcccagccaaggctggcagatcacttgaggccaggagttctgagaccagcctggcttacatggtgaaaccccatctctactaaaaatacaaaaactagccaggcatggtgggaggcacctgtaatcccaagtagctcagactacaggggcatgccatcacagctggccagtttttacgtcttgcgtagagatgggttttccctgtgttccctaggctgggctcgaactcctgggctcaagtcctcctgcctcagcctcccaaaatgttcagattacaggcatgaggcagcatgccaatcctgtttttgcattttagtaacacaaattgtaatgttaactttttaaattatgaaagcatctaaaatataaaattatttgtaaccccactgtccttttgggcttctataaatgaatatacatctaaaatgtgggggtttagcttaattgattgttttccatagaaactaggttttatgggaagatggttggatagacttgtttcacttaaaggtctgatttgtgtaggacaaacccacatatgtaatcgtgccagtctgttctctgcatgacataattttccagcaatagctgtgtggtttttgtaatcctatcatctagtcagttcaagatcttgcaacactgtgtgattctttgctccgtagttcagtcttgttgaacatgacacaggtgtttactttcctgttcttgcatctagtttcattctaataatgttctctgttgaaaaagctggcttcaatttattgagcaagatgctggtgttatcatctaacataaaacctatcttataataaagtgttgacacatgtaatgagtactgtactgaaaaatggtggtatgtatatggtttgtactgattatgtatcgcttttataccatcaaaaagttgaaaaatcataaagttgaatcatcctaaaatgggtacattctgtactatgtttccaaggcttcggaagtgttgcatacacattcctagccagctgatagtgctaggagccaacagtagtctcccccgggggccaagaggagggcgaaatctctactatggtatatgatgttctcgtgggccaagtatgagggtgatatttcattgttggcactgggtttctggaatccatcctcttcaccagggagatttaatgaaccaaatgagatctgatgggagaaatttgagtgtaacgtttttgttctgaaggaagtaattgagttttagttcatttgttttttaggaatcgtaataattaaaatttcattttaaatgccatga

SEQ ID NO: 313627 - DNA, 5327 bp, Homo sapiens
  misc_feature (3117)..(3117): n is a, c, g, or t
ggcttgctcgcgcgtgcgcaccagaagccagcagtggggttgcacacgcgcctcttcacgaggtggaaacaagatggaggattcggcctcggcctcgctgtcttctgcagccgctactggaacctccacctcgactccagcggccccgacagcacggaagcagctggataaagaacaggttagaaaggcagtggacgctctcttgacgcattgcaagtccaggaaaaacaattatgggttgcttttgaatgagaatgaaagtttatttttaatggtggtattatggaaaattccaagtaaagaactgagggtcagattgaccttgcctcatagtattcgatcagattcagaagatatctgtttatttacgaaggatgaacccaattcaactcctgaaaagacagaacagttttatagaaagcttttaaacaagcatggaattaaaaccgtttctcagattatctccctccaaactctaaagaaggaatataaatcctatgaagccaagctccgccttctgagcagttttgatttcttccttactgatgccagaattaggcggctcttaccctcactcattgggagacatttctatcaaagaaagaaagttccagtatctgtaaaccttctgtccaagaatttatcaagagagatcaatgactgtataggtggaacggtcttaaacatttctaaaagtggttcttgcagtgctatacgtattggtcacgttggaatgcaaattgagcacatcattgaaaacattgttgctgtcaccaaaggactttcagaaaaattgccagagaagtgggagagcgtgaaactcctgtttgtgaaaactgagaaatcggctgcacttcccatcttttcctcgtttgtcagcaattgggatgaagccaccaaaagatctttgcttaataagaagaaaaaagaggcaaggagaaaacgaagagaaagaaattttgaaaaacaaaaggagaggaagaagaagaggcagcaggctaggaagactgcatcagttcttagtaaagatgatgtggcacctgaaagtggtgatactacagtgaagaaacctgaatcaaagaaggaacagaccccagagcatgggaagaaaaaacgtggcagaggaaaagcccaagttaaagcaacaaatgaatccgaagacgaaatcccacagctggtaccaataggaaagaagactccagctaatgaaaaagtagagattcaaaaacatgccacaggaaagaagtctccagcaaagagtcctaatcccagcacacctcgtgggaagaaaagaaaggctttgccagcatctgagaccccaaaagctgcagagtctgagaccccagggaaaagcccagagaagaagccaaaaatcaaagaagaggcagtgaaggaaaaaagtccttcgctggggaaaaaagatgcgagacagactccaaaaaagccagaggccaagtttttcaccactcctagtaaatctgtgagaaaagcttcccacacccccaaaaaatggcccaaaaaacccaaagtaccccagtcgacctaaagtcagtgattcaactggaaggaaacctcaatgctgcctccagagctttttggaaatactcagatcctggccaacatggtgaaaccctgtctgtaccaaaaatacaaaaattaattgggcatggtggtggacacctgtaatcccagctactagggaggctgaggcaggagaattgcttgaacctgggaggcggaggttgcagtgagccactgcactccagcctgatgacagagcaagactcagtctcaaaaataaataaaaataataaaacctccataagtaatcctgacatatgttcctgggtataatctgtttctaaattgtccttctgtgtatttgctaatgtaatagagggaaaaatagagtgcttctctgtggttgttcagcactttaggtagccaaggtgagaggattgcttgaggccaggagtttgagactagcctgggcaacttggtaaaaccccatctctacaaaagaaaaaaaaaaattagtgtggcatggtggcatgcatctgtgctcccagctcctcacgaggctgaggtggaaggatcaagtgagcgcaagaggttgaggctccagtgagccacgatcaccccactgtgctgtagcctgggtgacagtgtgagattctgtctcagaaaaaacaaagtataacattgctttgcttctgagtatactgttggctttccaaatcagtgggtctgacttgaggtctgtgatgtgacccttttcctcacctgctcaaccattattcacatggactccatcatattcatttgtagtcattcccagagtggcccagtgagggtctcgctgtatgagagtcggctacggaatttaggagaaacagaagtttcttggctttcatgctgagcttgttggtctaagcttatgagtcactggattagcatccatatgggaagggaaattaacatggagtcatttatacagggactaaattgaatcctacctaccggaggcaagaacatgatttatcttccataagccttatcctcttcctccttattcctcagtccatatggatttgcttatgtatgacaactccaaggaatcttggaagagtagattgctaacgtttccacaattgtcaagtatattctgaggcagtaaacacctttttaggtacgtggcctttcactggttgtgaattggtatgcatccgtagtagtaagttcacagattcactgcagtgcaggaatgttcttgcatgccaaagactcaactgctttcaaagataatgtgggtgctagatgcagtggcttacatctgtaaccctgttagggtgaccagacccaacaccaggtcgtgggggtgacaaagtccagtggagtcaaaggattgagaaaaagacagtttgagagagaagtaggaccagcagaccatcgggatggtggaggctgtgaaggccgtgagctctgggagcccacactatttattggtaatccaacaaagaaacagatggtgagaatgtgaaggtcagaagggcaccttgcattaagcacatgatttacagctgtgatggtttagcatttgctctgctacttgagatnatggagagcaggttcttttaactcaagttacagtcgatcctgggagagcaaggagccagcaagtctagacattccagagccacaggccctggattctatccaagccacgagggattttatgccctgggcttagattatggtgcgtcagggcagccttccaccctttagcacagagcttggtgttccaaagaccacaaggggttttagacccttgaccctggacatattccaagactcttttacattatgtcagaatgcaagccctgcctcagcttctcccaacactcagcttttcgcaacataatcccagcactttggaacgctgggtggattgcttgaacccaggagttcgagaccatcctgggcaatatggcaaaaccccatctttaccaaaaataagctgggtgtggtggaacatgcctgtggtcccagcttcttgggaggctgaggtgggaggattgcttgaacccgggaggtagaggctgcaatgggccatgatcacgatcctgcactccagcctgggcaacagagagagacagtccctggcccactgcccccttccctggcccagtctcaaaaaaaatgaggctgggcgtggtggctcacatctgtaatcccagccaaggctggcagatcacttgaggccaggagttctgagaccagcctggcttacatggtgaaaccccatctctactaaaaatacaaaaactagccaggcatggtgggaggcacctgtaatcccagctacttgggaggctgaagcaggagaatcactttaacccgggaggtggaggttgcagtgagctgagatcacaccactgcactccagcctgggcggcagagcaaaactgaaaaaaagagaaaaaaaaaaacatctagctctccctgaaattagaggagtctagcctgcttttgctgtttttttggtagcgagagtagcgggcagtgggggagatggtcttactctgttccccaggctggagtgcactagtgtcatcacagctccagcctcaatttcctgggctcaaggcgatcttcccacctcagcctcccaagtagctcagactacaggggcatgccatcacagctggccagtttttacgtcttgcgtagagatgggttttccctgtgttccctaggctgggctcgaactcctgggctcaagtcctcctgcctcagcctcccaaaatgttcagattacaggcatgaggcagcatgccaatcctgtttttgcattttagtaacacaaattgtaatgttaactttttaaattatgaaagcatctaaaatataaaattatttgtaaccccactgtccttttgggcttctataaatgaatatacatctaaaatgtgggggtttagcttaattgattgttttccatagaaactaggttttatgggaagatggttggatagacttgtttcacttaaaggtctgatttgtgtaggacaaacccacatatgtaatcgtgccagtctgttctctgcatgacataattttccagcaatagctgtgtggtttttgtaatcctatcatctagtcagttcaagatcttgcaacactgtgtgattctttgctccgtagttcagtcttgttgaacatgacacaggtgtttactttcctgttcttgcatctagtttcattctaataatgttctctgttgaaaaagctggcttcaatttattgagcaagatgctggtgttatcatctaacataaaacctatcttataataaagtgttgacacatgtaatgagtactgtactgaaaaatggtggtatgtatatggtttgtactgattatgtatcgcttttataccatcaaaaagttgaaaaatcataaagttgaatcatcctaaaatgggtacattctgtactatgtttccaaggcttcggaagtgttgcatacacattcctagccagctgatagtgctaggagccaacagtagtctcccccgggggccaagaggagggcgaaatctctactatggtatatgatgttctcgtgggccaagtatgagggtgatatttcattgttggcactgggtttctggaatccatcctcttcaccagggagatttaatgaaccaaatgagatctgatgggagaaatttgagtgtaacgtttttgttctgaaggaagtaattgagttttagttcatttgttttttaggaatcgtaataattaaaatttcattttaaatgccatga

SEQ ID NO: 313628 - DNA, 1636 bp, Homo sapiens
ggcttgctcgcgcgtgcgcaccagaagccagcagtggggttgcacacgcgcctcttcacgaggtggaaacaagatggaggattcggcctcggcctcgctgtcttctgcagccgctactggaacctccacctcgactccagcggccccgacagcacggaagcagctggataaagaacaggttagaaaggcagtggacgctctcttgacgcattgcaagtccaggaaaaacaattatgggttgcttttgaatgagaatgaaagtttatttttaatggtggtattatggaaaattccaagtaaagaactgagggtcagattgaccttgcctcatagtattcgatcagattcagaagatatctgtttatttacgaaggatgaacccaattcaactcctgaaaagacagaacagttttatagaaagcttttaaacaagcatggaattaaaaccgtttctcagattatctccctccaaactctaaagaaggaatataaatcctatgaagccaagctccgccttctgagcagttttgatttcttccttactgatgccagaattaggcggctcttaccctcactcattgggagacatttctatcaaagaaagaaagttccagtatctgtaaaccttctgtccaagaatttatcaagagagatcaatgactgtataggtggaacggtcttaaacatttctaaaagtggttcttgcagtgctatacgtattggtcacgttggaatgcaaattgagcacatcattgaaaacattgttgctgtcaccaaaggactttcagaaaaattgccagagaagtgggagagcgtgaaactcctgtttgtgaaaactgagaaatcggctgcacttcccatcttttcctcgtttgtcagcaattgggatgaagccaccaaaagatctttgcttaataagaagaaaaaagaggcaaggagaaaacgaagagaaagaaattttgaaaaacaaaaggagaggaagaagaagaggcagcaggctaggaagactgcatcagttcttagtaaagatgatgtggcacctgaaagtggtgatactacagtgaagaaacctgaatcaaagaaggaacagaccccagagcatgggaagaaaaaacgtggcagaggaaaagcccaagttaaagcaacaaatgaatccgaagacgaaatcccacagctggtaccaataggaaagaagactccagctaatgaaaaagtagagattcaaaaacatgccacaggaaagaagtctccagcaaagagtcctaatcccagcacacctcgtgggaagaaaagaaaggctttgccagcatctgagaccccaaaagctgcagagtctgagaccccagggaaaagcccagagaagaagccaaaaatcaaagaagaggcagtgaaggaaaaaagtccttcgctggggaaaaaagatgcgagacagactccaaaaaagccagaggccaagtttttcaccactcctagtaaatctgtgagaaaagcttcccacacccccaaaaaatggcccaaaaaacccaaagtaccccagtcgacctaaagtcagtgattcaactggaaggaaacctcaatgctgcctccagaagtgctgaaattacaggtgtgagccaccatccccagtcgtaataca

SEQ ID NO: 313629 - DNA, 1271 bp, Homo sapiens
ggcttgctcgcgcgtgcgcaccagaagccagcagtggggttgcacacgcgcctcttcacgaggtggaaacaagatggaggattcggcctcggcctcgctgtcttctgcagccgctactggaacctccacctcgactccagcggccccgacagcacggaagcagctggataaagaacaggttagaaaggcagtggacgctctcttgacgcattgcaagtccaggaaaaacaattatgggttgcttttgaatgagaatgaaagtttatttttaatggtggtattatggaaaattccaagtaaagaactgagggtcagattgaccttgcctcatagtattcgatcagattcagaagatatctgtttatttacgaaggatgaacccaattcaactcctgaaaagacagaacagttttatagaaagcttttaaacaagcatggaattaaaaccgtttctcagattatctccctccaaactctaaagaaggaatataaatcctatgaagccaagctccgccttctgagcagttttgatttcttccttactgatgccagaattaggcggctcttaccctcactcattgggagacatttctatcaaagaaagaaagttccagtatctgtaaaccttctgtccaagaatttatcaagagagatcaatgactgtataggtggaacggtcttaaacatttctaaaagtggttcttgcagtgctatacgtattggtcacgttggaatgcaaattgagcacatcattgaaaacattgttgctgtcaccaaaggactttcagaaaaattgccagagaagtgggagagcgtgaaactcctgtttgtgaaaactgagaaatcggctgcacttcccatcttttcctcgtttgtcagcaattgggatgaagccaccaaaagatctttgcttaataagaagaaaaaagaggcaaggagaaaacgaagagaaagaaattttgaaaaacaaaaggagaggaagaagaagaggcagcaggctaggaagactgcatcagttcttagtaaagatgatgtggcacctgaaagtggtgatactacagtgaagaaacctgaatcaaagaaggaacagaccccagagcatgggaagaaaaaacgtggcagaggaaaagcccaagttaaagcaacaaatgaatccgaagacgaaatcccacagctggtaccaataggaaagaagactccagctaatgaaaaagtagagattcaaaaacataccacagtaaatgttccaactacagaagtctcaccactgt

SEQ ID NO: 313630 - DNA, 5346 bp, Homo sapiens
  misc_feature (3136)..(3136): n is a, c, g, or t
ggcttgctcgcgcgtgcgcaccagaagccagcagtggggttgcacacgcgcctcttcacgaggtggaaacaagatggaggattcggcctcggcctcgctgtcttctgcagccgctactggaacctccacctcgactccagcggccccgacagcacggaagcagctggataaagaacaggaccttgcctcatagtattcgatcagattcagaagatatctgtttatttacgaaggatgaacccaattcaactcctgaaaagacagaacagttttatagaaagcttttaaacaagcatggaattaaaaccgtttctcagattatctccctccaaactctaaagaaggaatataaatcctatgaagccaagctccgccttctgagcagttttgatttcttccttactgatgccagaattaggcggctcttaccctcactcattgggagacatttctatcaaagaaagaaagttccagtatctgtaaaccttctgtccaagaatttatcaagagagatcaatgactgtataggtggaacggtcttaaacatttctaaaagtggttcttgcagtgctatacgtattggtcacgttggaatgcaaattgagcacatcattgaaaacattgttgctgtcaccaaaggactttcagaaaaattgccagagaagtgggagagcgtgaaactcctgtttgtgaaaactgagaaatcggctgcacttcccatcttttcctcgtttgtcagcaattgggatgaagccaccaaaagatctttgcttaataagaagaaaaaagaggcaaggagaaaacgaagagaaagaaattttgaaaaacaaaaggagaggaagaagaagaggcagcaggctaggaagactgcatcagttcttagtaaagatgatgtggcacctgaaagtggtgatactacagtgaagaaacctgaatcaaagaaggaacagaccccagagcatgggaagaaaaaacgtggcagaggaaaagcccaagttaaagcaacaaatgaatccgaagacgaaatcccacagctggtaccaataggaaagaagactccagctaatgaaaaagtagagattcaaaaacatgccacaggaaagaagtctccagcaaagagtcctaatcccagcacacctcgtgggaagaaaagaaaggctttgccagcatctgagaccccaaaagctgcagagtctgagaccccagggaaaagcccagagaagaagccaaaaatcaaagaagaggcagtgaaggaaaaaagtccttcgctggggaaaaaagatgcgagacagactccaaaaaagccagaggccaagtttttcaccactcctagtaaatctgtgagaaaagcttcccacacccccaaaaaatggcccaaaaaacccaaagtaccccagtcgacctaaagtcagtgattcaactggaaggaaacctcaatgctgcctccagagctttttggaaatactcagatcctggccgcctttgtaaccttctctaaacgtcaggcctggacttaaaagattttttaaaacctccataagtagtccaggggcggtggctcacgcctgtaatcccagcactttgggaggccgaggcaggcggatcacaaggtcaacgagatcgagaccatcctggccaacatggtgaaaccctgtctgtaccaaaaatacaaaaattaattgggcatggtggtggacacctgtaatcccagctactagggaggctgaggcaggagaattgcttgaacctgggaggcggaggttgcagtgagccactgcactccagcctgatgacagagcaagactcagtctcaaaaataaataaaaataataaaacctccataagtaatcctgacatatgttcctgggtataatctgtttctaaattgtccttctgtgtatttgctaatgtaatagagggaaaaatagagtgcttctctgtggttgttcagcactttaggtagccaaggtgagaggattgcttgaggccaggagtttgagactagcctgggcaacttggtaaaaccccatctctacaaaagaaaaaaaaaaattagtgtggcatggtggcatgcatctgtgctcccagctcctcacgaggctgaggtggaaggatcaagtgagcgcaagaggttgaggctccagtgagccacgatcaccccactgtgctgtagcctgggtgacagtgtgagattctgtctcagaaaaaacaaagtataacattgctttgcttctgagtatactgttggctttccaaatcagtgggtctgacttgaggtctgtgatgtgacccttttcctcacctgctcaaccattattcacatggactccatcatattcatttgtagtcattcccagagtggcccagtgagggtctcgctgtatgagagtcggctacggaatttaggagaaacagaagtttcttggctttcatgctgagcttgttggtctaagcttatgagtcactggattagcatccatatgggaagggaaattaacatggagtcatttatacagggactaaattgaatcctacctaccggaggcaagaacatgatttatcttccataagccttatcctcttcctccttattcctcagtccatatggatttgcttatgtatgacaactccaaggaatcttggaagagtagattgctaacgtttccacaattgtcaagtatattctgaggcagtaaacacctttttaggtacgtggcctttcactggttgtgaattggtatgcatccgtagtagtaagttcacagattcactgcagtgcaggaatgttcttgcatgccaaagactcaactgctttcaaagataatgtgggtgctagatgcagtggcttacatctgtaaccctgttagggtgaccagacccaacaccaggtcgtgggggtgacaaagtccagtggagtcaaaggattgagaaaaagacagtttgagagagaagtaggaccagcagaccatcgggatggtggaggctgtgaaggccgtgagctctgggagcccacactatttattggtaatccaacaaagaaacagatggtgagaatgtgaaggtcagaagggcaccttgcattaagcacatgatttacagctgtgatggtttagcatttgctctgctacttgagatnatggagagcaggttcttttaactcaagttacagtcgatcctgggagagcaaggagccagcaagtctagacattccagagccacaggccctggattctatccaagccacgagggattttatgccctgggcttagattatggtgcgtcagggcagccttccaccctttagcacagagcttggtgttccaaagaccacaaggggttttagacccttgaccctggacatattccaagactcttttacattatgtcagaatgcaagccctgcctcagcttctcccaacactcagcttttcgcaacataatcccagcactttggaacgctgggtggattgcttgaacccaggagttcgagaccatcctgggcaatatggcaaaaccccatctttaccaaaaataagctgggtgtggtggaacatgcctgtggtcccagcttcttgggaggctgaggtgggaggattgcttgaacccgggaggtagaggctgcaatgggccatgatcacgatcctgcactccagcctgggcaacagagagagacagtccctggcccactgcccccttccctggcccagtctcaaaaaaaatgaggctgggcgtggtggctcacatctgtaatcccagccaaggctggcagatcacttgaggccaggagttctgagaccagcctggcttacatggtgaaaccccatctctactaaaaatacaaaaactagccaggcatggtgggaggcacctgtaatcccagctacttgggaggctgaagcaggagaatcactttaacccgggaggtggaggttgcagtgagctgagatcacaccactgcactccagcctgggcggcagagcaaaactgaaaaaaagagaaaaaaaaaaacatctagctctccctgaaattagaggagtctagcctgcttttgctgtttttttggtagcgagagtagcgggcagtgggggagatggtcttactctgttccccaggctggagtgcactagtgtcatcacagctccagcctcaatttcctgggctcaaggcgatcttcccacctcagcctcccaagtagctcagactacaggggcatgccatcacagctggccagtttttacgtcttgcgtagagatgggttttccctgtgttccctaggctgggctcgaactcctgggctcaagtcctcctgcctcagcctcccaaaatgttcagattacaggcatgaggcagcatgccaatcctgtttttgcattttagtaacacaaattgtaatgttaactttttaaattatgaaagcatctaaaatataaaattatttgtaaccccactgtccttttgggcttctataaatgaatatacatctaaaatgtgggggtttagcttaattgattgttttccatagaaactaggttttatgggaagatggttggatagacttgtttcacttaaaggtctgatttgtgtaggacaaacccacatatgtaatcgtgccagtctgttctctgcatgacataattttccagcaatagctgtgtggtttttgtaatcctatcatctagtcagttcaagatcttgcaacactgtgtgattctttgctccgtagttcagtcttgttgaacatgacacaggtgtttactttcctgttcttgcatctagtttcattctaataatgttctctgttgaaaaagctggcttcaatttattgagcaagatgctggtgttatcatctaacataaaacctatcttataataaagtgttgacacatgtaatgagtactgtactgaaaaatggtggtatgtatatggtttgtactgattatgtatcgcttttataccatcaaaaagttgaaaaatcataaagttgaatcatcctaaaatgggtacattctgtactatgtttccaaggcttcggaagtgttgcatacacattcctagccagctgatagtgctaggagccaacagtagtctcccccgggggccaagaggagggcgaaatctctactatggtatatgatgttctcgtgggccaagtatgagggtgatatttcattgttggcactgggtttctggaatccatcctcttcaccagggagatttaatgaaccaaatgagatctgatgggagaaatttgagtgtaacgtttttgttctgaaggaagtaattgagttttagttcatttgttttttaggaatcgtaataattaaaatttcattttaaatgccatga

SEQ ID NO: 313631 - DNA, 4956 bp, Homo sapiens
  misc_feature (2746)..(2746): n is a, c, g, or t
ggcttgctcgcgcgtgcgcaccagaagccagcagtggggttgcacacgcgcctcttcacgaggtggaaacaagatggaggattcggcctcggcctcgctgtcttctgcagccgctactggaacctccacctcgactccagcggccccgacagcacggaagcagctggataaagaacagtgctatacgtattggtcacgttggaatgcaaattgagcacatcattgaaaacattgttgctgtcaccaaaggactttcagaaaaattgccagagaagtgggagagcgtgaaactcctgtttgtgaaaactgagaaatcggctgcacttcccatcttttcctcgtttgtcagcaattgggatgaagccaccaaaagatctttgcttaataagaagaaaaaagaggcaaggagaaaacgaagagaaagaaattttgaaaaacaaaaggagaggaagaagaagaggcagcaggctaggaagactgcatcagttcttagtaaagatgatgtggcacctgaaagtggtgatactacagtgaagaaacctgaatcaaagaaggaacagaccccagagcatgggaagaaaaaacgtggcagaggaaaagcccaagttaaagcaacaaatgaatccgaagacgaaatcccacagctggtaccaataggaaagaagactccagctaatgaaaaagtagagattcaaaaacatgccacaggaaagaagtctccagcaaagagtcctaatcccagcacacctcgtgggaagaaaagaaaggctttgccagcatctgagaccccaaaagctgcagagtctgagaccccagggaaaagcccagagaagaagccaaaaatcaaagaagaggcagtgaaggaaaaaagtccttcgctggggaaaaaagatgcgagacagactccaaaaaagccagaggccaagtttttcaccactcctagtaaatctgtgagaaaagcttcccacacccccaaaaaatggcccaaaaaacccaaagtaccccagtcgacctaaagtcagtgattcaactggaaggaaacctcaatgctgcctccagagctttttggaaatactcagatcctggccgcctttgtaaccttctctaaacgtcaggcctggacttaaaagattttttaaaacctccataagtagtccaggggcggtggctcacgcctgtaatcccagcactttgggaggccgaggcaggcggatcacaaggtcaacgagatcgagaccatcctggccaacatggtgaaaccctgtctgtaccaaaaatacaaaaattaattgggcatggtggtggacacctgtaatcccagctactagggaggctgaggcaggagaattgcttgaacctgggaggcggaggttgcagtgagccactgcactccagcctgatgacagagcaagactcagtctcaaaaataaataaaaataataaaacctccataagtaatcctgacatatgttcctgggtataatctgtttctaaattgtccttctgtgtatttgctaatgtaatagagggaaaaatagagtgcttctctgtggttgttcagcactttaggtagccaaggtgagaggattgcttgaggccaggagtttgagactagcctgggcaacttggtaaaaccccatctctacaaaagaaaaaaaaaaattagtgtggcatggtggcatgcatctgtgctcccagctcctcacgaggctgaggtggaaggatcaagtgagcgcaagaggttgaggctccagtgagccacgatcaccccactgtgctgtagcctgggtgacagtgtgagattctgtctcagaaaaaacaaagtataacattgctttgcttctgagtatactgttggctttccaaatcagtgggtctgacttgaggtctgtgatgtgacccttttcctcacctgctcaaccattattcacatggactccatcatattcatttgtagtcattcccagagtggcccagtgagggtctcgctgtatgagagtcggctacggaatttaggagaaacagaagtttcttggctttcatgctgagcttgttggtctaagcttatgagtcactggattagcatccatatgggaagggaaattaacatggagtcatttatacagggactaaattgaatcctacctaccggaggcaagaacatgatttatcttccataagccttatcctcttcctccttattcctcagtccatatggatttgcttatgtatgacaactccaaggaatcttggaagagtagattgctaacgtttccacaattgtcaagtatattctgaggcagtaaacacctttttaggtacgtggcctttcactggttgtgaattggtatgcatccgtagtagtaagttcacagattcactgcagtgcaggaatgttcttgcatgccaaagactcaactgctttcaaagataatgtgggtgctagatgcagtggcttacatctgtaaccctgttagggtgaccagacccaacaccaggtcgtgggggtgacaaagtccagtggagtcaaaggattgagaaaaagacagtttgagagagaagtaggaccagcagaccatcgggatggtggaggctgtgaaggccgtgagctctgggagcccacactatttattggtaatccaacaaagaaacagatggtgagaatgtgaaggtcagaagggcaccttgcattaagcacatgatttacagctgtgatggtttagcatttgctctgctacttgagatnatggagagcaggttcttttaactcaagttacagtcgatcctgggagagcaaggagccagcaagtctagacattccagagccacaggccctggattctatccaagccacgagggattttatgccctgggcttagattatggtgcgtcagggcagccttccaccctttagcacagagcttggtgttccaaagaccacaaggggttttagacccttgaccctggacatattccaagactcttttacattatgtcagaatgcaagccctgcctcagcttctcccaacactcagcttttcgcaacataatcccagcactttggaacgctgggtggattgcttgaacccaggagttcgagaccatcctgggcaatatggcaaaaccccatctttaccaaaaataagctgggtgtggtggaacatgcctgtggtcccagcttcttgggaggctgaggtgggaggattgcttgaacccgggaggtagaggctgcaatgggccatgatcacgatcctgcactccagcctgggcaacagagagagacagtccctggcccactgcccccttccctggcccagtctcaaaaaaaatgaggctgggcgtggtggctcacatctgtaatcccagccaaggctggcagatcacttgaggccaggagttctgagaccagcctggcttacatggtgaaaccccatctctactaaaaatacaaaaactagccaggcatggtgggaggcacctgtaatcccagctacttgggaggctgaagcaggagaatcactttaacccgggaggtggaggttgcagtgagctgagatcacaccactgcactccagcctgggcggcagagcaaaactgaaaaaaagagaaaaaaaaaaacatctagctctccctgaaattagaggagtctagcctgcttttgctgtttttttggtagcgagagtagcgggcagtgggggagatggtcttactctgttccccaggctggagtgcactagtgtcatcacagctccagcctcaatttcctgggctcaaggcgatcttcccacctcagcctcccaagtagctcagactacaggggcatgccatcacagctggccagtttttacgtcttgcgtagagatgggttttccctgtgttccctaggctgggctcgaactcctgggctcaagtcctcctgcctcagcctcccaaaatgttcagattacaggcatgaggcagcatgccaatcctgtttttgcattttagtaacacaaattgtaatgttaactttttaaattatgaaagcatctaaaatataaaattatttgtaaccccactgtccttttgggcttctataaatgaatatacatctaaaatgtgggggtttagcttaattgattgttttccatagaaactaggttttatgggaagatggttggatagacttgtttcacttaaaggtctgatttgtgtaggacaaacccacatatgtaatcgtgccagtctgttctctgcatgacataattttccagcaatagctgtgtggtttttgtaatcctatcatctagtcagttcaagatcttgcaacactgtgtgattctttgctccgtagttcagtcttgttgaacatgacacaggtgtttactttcctgttcttgcatctagtttcattctaataatgttctctgttgaaaaagctggcttcaatttattgagcaagatgctggtgttatcatctaacataaaacctatcttataataaagtgttgacacatgtaatgagtactgtactgaaaaatggtggtatgtatatggtttgtactgattatgtatcgcttttataccatcaaaaagttgaaaaatcataaagttgaatcatcctaaaatgggtacattctgtactatgtttccaaggcttcggaagtgttgcatacacattcctagccagctgatagtgctaggagccaacagtagtctcccccgggggccaagaggagggcgaaatctctactatggtatatgatgttctcgtgggccaagtatgagggtgatatttcattgttggcactgggtttctggaatccatcctcttcaccagggagatttaatgaaccaaatgagatctgatgggagaaatttgagtgtaacgtttttgttctgaaggaagtaattgagttttagttcatttgttttttaggaatcgtaataattaaaatttcattttaaatgccatga

SEQ ID NO: 313632 - DNA, 4428 bp, Homo sapiens
agcgggcggccgagggaatgcgcgcagctcacaggccctgggagtgagctggtgcccggcgacctggcacccgcgcctggatatggggcgtctacatcgtcccaggagcagcaccagctacaggaacctgccgcatctgtttctgtttttcctcttcgtgggacccttcagctgcctcgggagttacagccgggccaccgagcttctgtacagcctaaacgagggactacccgcgggggtgctcatcggcagcctggccgaggacctgcggctgctgcccaggtctgcagggaggccggacccgcagtcgcagctgccagagcgcaccggtgctgagtggaacccccctctctccttcagcctggcctcccggggactgagtggccagtacgtgaccctagacaaccgctctggggagctgcacacttcagctcaggagatcgacagggaggccctgtgtgttgaagggggtggagggactgcgtggagcggcagcgtttccatctcctcctctccttctgactcttgtcttttgctgctggatgtgcttgtcctgcctcaggaatacttcaggtttgtgaaggtgaagatcgccatcagagacatcaatgacaacgccccgcagttccctgtttcccagatctcggtgtgggtcccggaaaatgcacctgtaaacacccgactggccatagagcatcctgctgtggacccagatgtaggcattaatgggggtacagacctatcgcttactggactaccatggtatgttcaccctggacgtggaggagaatgagaatggggagcgcaccccctacctaattgtcatgggtgctttggacagggaaacccaggaccagtatgtgagcatcatcacagctgaggatggtgggtctccaccacttttgggcagtgccactctcaccattggcatcagtgacattaatgacaattgccctctcttcacagactcacaaatcaatgtcactgtgtatgggaatgctacagtgggcaccccaattgcagctgtccaggctgtggataaagacttggggaccaatgctcaaattacttattcttacagtcagaaagttccacaagcatctaaggatttatttcacctggatgaaaacactggagtcattaaacttttcagtaagattggaggaagtgttctggagtcccacaagctcaccatccttgctaatggaccaggctgcatccctgctgtaatcactgctcttgtgtccattattaaagttattttcagaccccctgaaattgtccctcgttacatagcaaacgagatagatggtgttgtttatctgaaagaactggaacccgttaacactcccattgcgtttttcaccataagagatccagaaggtaaatacaaggttaactgctacctggatggtgaagggccgtttaggttatcaccttacaaaccatacaataatgaatatttactagagaccacaaaacctatggactatgagctacagcagttctatgaagtagctgtggtggcttggaactctgagggatttcatgtcaaaagggtcattaaagtgcaacttttagatgacaatgataatgctccaattttccttcaacccttaatagaactaaccatcgaagagaacaactcacccaatgcctttttgactaagctgtatgctacagatgccgacagcgaggagagaggccaagtttcatattttctgggacctgatgctccatcatatttttccttagacagtgtcacaggaattctgacagtttctactcagctggaccgagaagagaaagaaaagtacagatacactgtcagagctgttgactgtgggaagccacccagagaatcagtagccactgtggccctcacagtgttggataaaaatgacaacagtcctcggtttatcaacaaggacttcagcttttttgtgcctgaaaactttccaggctatggtgagattggagtaattagtgtaacagatgctgacgctggacgaaatggatgggtcgccctctctgtggtgaaccagagtgatatttttgtcatagatacaggaaagggtatgctgagggctaaagtctctttggacagagagcagcaaagctcctatactttgtgggttgaagctgttgatgggggtgagcctgccctctcctctacagcaaaaatcacaattctccttctagatatcaatgacaaccctcctcttgttttgtttcctcagtctaatatgtcttatctgttagtactgccttctactctgccaggctccccggttacagaagtctatgctgtcgacaaagacacaggcatgaatgctgtcatagcttacagcatcatagggagaagaggtcctaggcctgagtccttcaggattgaccctaaaactggcaacattactttggaagaggcattgctgcagacagattatgggctccatcgcttactggtgaaagtgagtgatcatggttatcccgagcctctccactccacagtcatggtgaacctatttgtcaatgacactgtcagtaatgagagttacattgagagtcttttaagaaaagaaccagagattaatatagaggagaaagaaccacaaatctcaatagaaccgactcataggaaggtagaatctgtgtcttgtatgcccaccttagtagctctgtctgtaataagcttgggttccatcacactggtcacagggatgggcatatacatctgtttaaggaaaggggaaaagcatcccagggaagatgaaaatttggaagtacagattccactgaaaggaaaaattgacttgcatatgcgagagagaaagccaatggatatttctaatatttgatatttcatggtggaataacacagagaaatgttttaactgactttggatcttcatcacctaaaaaagagtgtgttgatggcagttccaatgaaggacaactaatttataacttgttctatattgtaaatagctgtttacaggtttttaaatttaaattcagaggttataaaatgtgtacagcatttttaagtgaaaattagtactaacagctataggacttgtatttaaaaaaaaaaaaaaaaaaagcttggacatggtttgcagctttcatacaccaagcagttgattgataaaacctgggagtaaggtaagaaaaatggaacaaatttttatctaaaaattcctgtcaccacaagagggcatcagctgctcctttgcaggaaactggggtattgtacttggcagttgtacatgaaattaatgaaagagtatattttaaatatattgtttttaacattaaacaaatatgaaattaaagtaaattaaatttcaccctatttaaacatatgataaaaaaagaaatgcacttgtaaacagaatgtttattacctcataagtgcatatatagtttgaaagagaaggcattaaaaagaagtgcgattcctttttagcaaggataaaatcattgccttgtgttacagattcagcctgctgaagagtattccactttctgtgtactcgaattgctttctgtttgctttaccactgcacttgttattattacaagggaaatagatatatacatacatatatatattcttcattacaggaaatgtaactagatattgtgcccaagaaaaacagccagaagcaaagaaatgcttcaatctttagttgcttcataggcattcatgacattttagtgctttcacaacttgttggtcgtactttatacttgggttatatattagacttttataggcttgaaatcatccatcacataagaaaatagaaatcatattaaaagtgaattcttctagaggcttgtgtacactactggttgttttagttgggccttttatatgaaagttatactgtacttatctttttgttgttgtttaggtttgttgactaccatttctggcttcctttctttggttttggattaaatccaacagtttatttgtaagccctgcagcagatttctttgataatttagcttttactgaatctcttgcaatgaagaaagctatttcatcagtgatttatcactttcaattcattgtgtgagctggaaatattattttatatgagagctatagcaaaataatctgtataaacaaggaatgtgttagcttaaactggatcattttactttttggcatcatgcatctgtactgtaccaaaagtgtttatatgtctgcaaattaaaggtatatattttcataatttctttctcacttttagcattttatatttgaacatgggcttgttatttcactgaagtgcctgtcatttgtttgtttttagggttaaatgtgggtaacctgtagtattctgctatactaaagtttatattaaatgaattcattactcaattaaacattgggtaaattattaaaaaaatgtg

SEQ ID NO: 313633 - DNA, 2167 bp, Homo sapiens
agcgggcggccgagggaatgcgcgcagctcacaggccctgggagtgagctggtgcccggcgacctggcacccgcgcctggatatggggcgtctacatcgtcccaggagcagcaccagctacaggaacctgccgcatctgtttctgtttttcctcttcgtgggacccttcagctgcctcgggagttacagccgggccaccgagcttctgtacagcctaaacgagggactacccgcgggggtgctcatcggcagcctggccgaggacctgcggctgctgcccaggtctgcagggaggccggacccgcagtcgcagctgccagagcgcaccggtgctgagtggaacccccctctctccttcagcctggcctcccggggactgagtggccagtacgtgaccctagacaaccgctctggggagctgcacacttcagctcaggagatcgacagggaggccctgtgtgttgaagggggtggagggactgcgtggagcggcagcgtttccatctcctcctctccttctgactcttgtcttttgctgctggatgtgcttgtcctgcctcaggaatacttcaggtttgtgaaggtgaagatcgccatcagagacatcaatgacaacgccccgcagttccctgtttcccagatctcggtgtgggtcccggaaaatgcacctgtaaacacccgactggccatagagcatcctgctgtggacccagatgtaggcattaatgggggtacagacctatcgcttactggactaccatggtatgttcaccctggacgtggaggagaatgagaatggggagcgcaccccctacctaattgtcatgggtgctttggacagggaaacccaggaccagtatgtgagcatcatcacagctgaggatggtgggtctccaccacttttgggcagtgccactctcaccattggcatcagtgacattaatgacaattgccctctcttcacagactcacaaatcaatgtcactgtgtatgggaatgctacagtgggcaccccaattgcagctgtccaggctgtggataaagacttggggaccaatgctcaaattacttattcttacagtcagaaagttccacaagcatctaaggatttatttcacctggatgaaaacactggagtcattaaacttttcagtaagattggaggaagtgttctggagtcccacaagctcaccatccttgctaatggaccaggctgcatccctgctgtaatcactgctcttgtgtccattattaaagttattttcagaccccctgaaattgtccctcgttacatagcaaacgagatagatggtgttgtttatctgaaagaactggaacccgttaacactcccattgcgtttttcaccataagagatccagaaggtaaatacaaggttaactgctacctggatggtgaagggccgtttaggttatcaccttacaaaccatacaataatgaatatttactagagaccacaaaacctatggactatgagctacagcagttctatgaagtagctgtggtggcttggaactctgagggatttcatgtcaaaagggtcattaaagtgcaacttttagatgacaatgataatgctccaattttccttcaacccttaatagaactaaccatcgaagagaacaactcacccaatgcctttttgactaagctgtatgctacagatgccgacagcgaggagagaggccaagtttcatattttctgggacctgatgctccatcatatttttccttagacagtgtcacaggaattctgacagtttctactcagctggaccgagaagagaaagaaaagtacagatacactgtcagagctgttgactgtgggaagccacccagagaatcagtagccactgtggccctcacagtgttggataaaaatgacaacagtcctcggtttatcaacaaggacttcagcttttttgtgcctgaaaactttccaggctatggtgagattggagtaattagtgtaacagatgctgacgctggacgaaatggatgggtcgccctctctgtggtgaaccagagtgatatttttgtcatagaccccggaaaaagatacctctggggcaaaacttctttgggactatcgctccaaatgtacttaattcttttgtgcgtttaaagttcttgatggggggttattct

SEQ ID NO: 313634 - DNA, 2302 bp, Homo sapiens
ggccgagacgcgctgtgtgattgcctcggagagaggaaggcgctccagttccgggtcaggcccttctcccgcctccctcggccttagccatggcgagtagcggcggtgctggggcggcggcggcggccgcggcggcgaatctgaatgcggtgcgggagaccatggacgttctgcttgagatttcaagaattttgaatactggcttagatatggaaactctgtctatttgtgtacggctttgtgaacaaggaattaacccagaagctttatcatcggttattaaggagcttcgcaaggctactgaagcactgaaggctgctgaaaatatgacaagctgactttctggagaaattctgatgagatatgtcaagctctgcaagagggtttgaagattgcattgtagttgagaatgtacaatgaaattactgcatgcagcagtgtagaaaaattttactttttaaaagaattataaaaccatagctttataaatcagtggaaagtggcttacagagagaactatcagatgtgtttacatcacatcttattcactttttttaacagctctaatgctttggcattgctatgttcatatttatgtattccttatttatagctctgatagctttaattttctaagcagtctgtctatcagatgtgcacatctgctgtgccaggttgaagtatagtggaacccatcagtagtaatgtgtagtagttatgacttgttgacatttccattataaactttaattttgaattgtttatgcattataactgtggatttatattgtattgggctgaaagttgacaggatttcagccaccacttgtgaatttttatttagattcattatgtatatcagaatcttgttttttgaaataagagcatggaaaacatttcttgtaatctactcttgaacaaagaatatttagtttttcaaacagtttgttgggcagctaatagtgtgaaccaggtcatttttgtattgagtaaaaaaatcaaactttgagaaacttggattttaaaagtaatgacaatgcttaggttagtattatttgtaatttgaatcatttacatctaatgagaatgttagttgagaatgttttcttaaagttttatatcctataaataacggaataaaaaaatttgtaaaatgaaacaacaaacatgcaaaattcctatttacttttattacataaaagtaattttagtgcttacctaataaatcttgaatggttatttaataaattattagatgggtgatgtgtttcaaaagatacttgctattttttgaagaaataaggatttccagtcattaaacaaaactaaacaatcttattagatgggtgatgtgtttcaaaggatacttgctattttttgaagaaataaggatttccagtcattaaacaaaactaaacaatcaaatgttctatattaggaatctcaagtatggctttttttaaaaaacctttttaacatcttgatgtcaaggattataagtatggcttttcagaattgtttgtttgtcattattcttgcctttaaaattttaactcatcaaagtgaagattagaaataaattttagaaaatgtagaatagtattgattctgtccctgtaatagaatctcagtggagtttttttgcaaaactaatatggatttcatctgattttattatttcttaaattttagattttattgagtaccatttatatgattgtacaagcattcactctttagtagcattttttgtttttcagacaagctgaagtggttttattaagatttggtaatatttaaatagcaaccttctctgccttttttttttttaatatagaattttgaccattttgactttttaaatgcctggcatctttaccaaccaagtaaactggaagatctgttactggtagaacaggttgaggagacagtaggaatttgtaaaaagtcatttgatttataatcaacactacaaatactatgtgttatttataaaatcataaagaacacttttgtcagactccaaaatttgtatatacttccaggccataagagttgatggtattatttatgactttgtagattaagttatttatgtatgaaacaaagcaggaaaatatattgagaagggatcgtgtttacagaggacttctttaaagtgtcacatttttaaaatgtaaacatatttttaatgcatacttaagtaatatttaagaaactaaacaaaataatgatacaattgcagtgttgtgcttgttgtcaatgacaaaaataaaaccattttggtggtattggcctgtac

SEQ ID NO: 313635 - DNA, 2280 bp, Homo sapiens
ggccgagacgcgctgtgtgattgcctcggagagaggaaggcgctccagttccgggtcaggcccttctcccgcctccctcggccttagccatggcgagtagcggcgcgcggcggcgaatctgaatgcggtgcgggagaccatggacgttctgcttgagatttcaagaattttgaatactggcttagatatggaaactctgtctatttgtgtacggctttgtgaacaaggaattaacccagaagctttatcatcggttattaaggagcttcgcaaggctactgaagcactgaaggctgctgaaaatatgacaagctgactttctggagaaattctgatgagatatgtcaagctctgcaagagggtttgaagattgcattgtagttgagaatgtacaatgaaattactgcatgcagcagtgtagaaaaattttactttttaaaagaattataaaaccatagctttataaatcagtggaaagtggcttacagagagaactatcagatgtgtttacatcacatcttattcactttttttaacagctctaatgctttggcattgctatgttcatatttatgtattccttatttatagctctgatagctttaattttctaagcagtctgtctatcagatgtgcacatctgctgtgccaggttgaagtatagtggaacccatcagtagtaatgtgtagtagttatgacttgttgacatttccattataaactttaattttgaattgtttatgcattataactgtggatttatattgtattgggctgaaagttgacaggatttcagccaccacttgtgaatttttatttagattcattatgtatatcagaatcttgttttttgaaataagagcatggaaaacatttcttgtaatctactcttgaacaaagaatatttagtttttcaaacagtttgttgggcagctaatagtgtgaaccaggtcatttttgtattgagtaaaaaaatcaaactttgagaaacttggattttaaaagtaatgacaatgcttaggttagtattatttgtaatttgaatcatttacatctaatgagaatgttagttgagaatgttttcttaaagttttatatcctataaataacggaataaaaaaatttgtaaaatgaaacaacaaacatgcaaaattcctatttacttttattacataaaagtaattttagtgcttacctaataaatcttgaatggttatttaataaattattagatgggtgatgtgtttcaaaagatacttgctattttttgaagaaataaggatttccagtcattaaacaaaactaaacaatcttattagatgggtgatgtgtttcaaaggatacttgctattttttgaagaaataaggatttccagtcattaaacaaaactaaacaatcaaatgttctatattaggaatctcaagtatggctttttttaaaaaacctttttaacatcttgatgtcaaggattataagtatggcttttcagaattgtttgtttgtcattattcttgcctttaaaattttaactcatcaaagtgaagattagaaataaattttagaaaatgtagaatagtattgattctgtccctgtaatagaatctcagtggagtttttttgcaaaactaatatggatttcatctgattttattatttcttaaattttagattttattgagtaccatttatatgattgtacaagcattcactctttagtagcattttttgtttttcagacaagctgaagtggttttattaagatttggtaatatttaaatagcaaccttctctgccttttttttttttaatatagaattttgaccattttgactttttaaatgcctggcatctttaccaaccaagtaaactggaagatctgttactggtagaacaggttgaggagacagtaggaatttgtaaaaagtcatttgatttataatcaacactacaaatactatgtgttatttataaaatcataaagaacacttttgtcagactccaaaatttgtatatacttccaggccataagagttgatggtattatttatgactttgtagattaagttatttatgtatgaaacaaagcaggaaaatatattgagaagggatcgtgtttacagaggacttctttaaagtgtcacatttttaaaatgtaaacatatttttaatgcatacttaagtaatatttaagaaactaaacaaaataatgatacaattgcagtgttgtgcttgttgtcaatgacaaaaataaaaccattttggtggtattggcctgtac

SEQ ID NO: 313636 - DNA, 1945 bp, Homo sapiens
  misc_feature (1944)..(1945): n is a, c, g, or t
ggccgagacgcgctgtgtgattgcctcggagagaggaaggcgctccagttccgggtcaggcccttctcccgcctccctcggccttagccatggcgagtagcggcggtgctggggcggcggcggcggccgcggcggcgaatctgaatgcggtgcgggagaccatggacgttctgcttgagatttcaagaattttgaatactggcttagatatggaaactctgtctatttgtgtacggctttgtgaacaaggaattaacccagaagctttatcatcggttattaaggagcttcgcaaggctactgaagcactgaaggctgctgaaaatatgacaagctgactttctggagaaattctgatgagatatgtcaagctctgcaagagggtttgaagattgcattgtagttgagaatgtacaatgaaattactgcatgcagcagtgtagaaaaattttactttttaaaagaattataaaaccatagctttataaatcagtggaaagtggcttacagagagaactatcagatgtgtttacatcacatcttattcactttttttaacagctctaatgctttggcattgctatgttcatatttatgtattccttatttatagctctgatagctttaattttctaagcagtctgtctatcagatgtgcacatctgctgtgccaggttgaagtatagtggaacccatcagtagtaatgtgtagtagttatgacttgttgacatttccattataaactttaattttgaattgtttatgcattataactgtggatttatattgtattgggctgaaagttgacaggatttcagccaccacttgtgaatttttatttagattcattatgtatatcagaatcttgttttttgaaataagagcatggaaaacatttcttgtaatctactcttgaacaaagaatatttagtttttcaaacagtttgttgggcagctaatagtgtgaaccaggtcatttttgtattgagtaaaaaaatcaaactttgagaaacttggattttaaaagtaatgacaatgcttaggttagtattatttgtaatttgaatcatttacatctaatgagaatgttagttgagaatgttttcttaaagttttatatcctataaataacggaataaaaaaatttgtaaaatgaaacaacaaaaaaaaaaaacaaaaaaaaaaaaaaaaaaaaaaaaaagaaaagaaaaacaaaaacaaaaaaaacgacgcgcgagaacgagaacaaaagaaaacaacccacaacagaaaaaactacaaaggaaaccgccacaaggtagccggggtccccgaagaggccgggatacaagaacggagtccaccacagcagataacaccacggcagactctgggatgaaacatgggacgcacaaaatggccaactgctcggagaagaacaagacaatcgtatccgaagacggtcagagaaaaaagacataacagaaggcataccatagaagaccatctaaacgacacggagagaagcaaacaagagggctgcaacggaggctaatagtccacgacatagccgacacaatccaacagagcagaaaagcgaaacagaaataaaacacggaacagatatcaccaggaaagaaagaaatcaaagaatggtgacgatggatcataaagacgagaaaagcagcaaagacaagtcaattcaagtaactagacataagattacatgtacgtatgaagaaggaggtgtcaagtaggaatcgggtacgaaggcaaaaagagagttcgagcagcagatacgaagcgaacgtacgaaaaaaggggagcagagccgagaccagccgagcagagaggaaaacgaacagaataggtgaattaaagcaaagcagagagaaagtcaataagaagaaaggacaagaatcaaaatgggtaagtgatgacaatcgaacatgtctgctaagacnn

SEQ ID NO: 313637 - DNA, 349 bp, Homo sapiens
ggccgagacgcgctgtgtgattgcctcggagagaggaaggcgctccagttccgggtcaggcccttctcccgcctccctcggccttagccatggcgagtagcggcggtgctggggcggcggcggcggccgcggcggcgaatctgaatgcggtgcgggagaccatggacggtgagtttccgttgcgctccctttaccttgcgtgccttcccagagccaaggcccccaggcgggaatgagcctggggaggacttcaggtccccttagtgccccaaacggcatcttccaagatctttggtagggacctgccagggccgcagggctgatggccctatcccttgagagttgtctc

SEQ ID NO: 313638 - DNA, 379 bp, Homo sapiens
gtttatatttatatttaagtttctaaaactaagtaaaggcaagaaagtattacatgcagatttccaaaacctgggatgctatgctaattccttggtattgtgcagtgatatataaattaatgaaagtactatatgcatatttttaaatgctgtaagccttaagttttttttttttttgtatcttttttcagttctgcttgagatttcaagaattttgaatactggcttagatatggaaactctgtctatttgtgtacggctttgtgaacaaggaattaacccagaagctttatcatcggttattaaggagcttcgcaaggctactgaagcactgaaggttggagattcctattagttcattctaaataaagatgctttt

SEQ ID NO: 313639 - DNA, 798 bp, Homo sapiens
tttttttcagatgatgtctcactctgtcacccaagatggagtgcaatggcacgatctcagctcactgcaacctctgcctcccaggttcaagcaattatcctgcctcagccacccgagtagctgagattacaggcctctgccaccatgctcagctattttttgtatttttagtagagacggggtttcaccatgttgggcaggctagtcttggaactactgacctcaggtgatccgcccactttggcctcccgaaagtgctgggattacagtcatgagccaccatgcccagcctatttatttctgattctttaagggtgactggacgtgttgatcagcgctcgctgggatttggctgacgtggccccagccccgcctccctccccaccccacaatggcagaagaaactggacagagtaaattagctgcagccaagaaaaagttcaaagaatattggcagagaaaccgccctggtgttccagcagcagcgaagaggaacacgaaagcaaatggcagtagccctgagacggccgcttctggtggttgccactcatctgaagctgtgagtcttgcctggacaggcttttggggacagggggcccaaggagcagtagagggcaatcgttaagattgtggatggactgttgggtactggtgaaggattctggatttggccgggcacagtggctcacgcctgtaatccccacacttcgggagaccgaggcaggtggatcacaaggtcaggagatcgagaccatccaggcaaacacggtgaaatactaaaaaatacaaaaaaaaaag

SEQ ID NO: 313640 - DNA, 4581 bp, Homo sapiens
tgcttgagctctttgggcctctgttttcacgtctgtatgatagaggtggtattgtttgacttgtatttgtgaagtttcaatgagattgataattgtcgattttatgttaatccctagtacatggcctgctgtcaacacccaggacacccaggatatggtctttgctgtttgattttcctcatccccagtctcaaggggaagccaggacaatgagaacagccacttcccatcaggagtcactgcaaggcccccagggtgggatggtggggagataagaaccgtgagagaagttggcacaaaggagttatgggacaaagggtccaagataggcagaaaagaaaatgttgccagttgatggggaagaaaggaagtcggagggctcagacactgagggggacagaacatctccatgtgcagtatcatctgctaccctgaaggatctggaggtaggaggctctgggcggaggtgcagtgaccccgcaggccagccctccaacctcctcccgcagcggggactgggtgcccctctgccagctgagacagcccacacacaacccagccctaatgatcgttctctctacctctcccccaagtcctcctccgcctcctcctctctgcatgcgcgtcagagcccgtgccaagaacaagcagcagtcctgaactcgaggtccataaaaatcagtcgactgaatgacaccatcaaatctttgaaacaacagaagaaacaagtggaacatcagctggaagaagaaaagaaagcaaacaatgagaaacagaaagctgaaagggagctagagggtcaaatccagagattgaacacagagaaaaagaaactaaatacggacctgtatcacatgaaacattctctcagatactttgaagaagagtccaaggatctggccggccgcctgcaacgttcatcgcagcgtataggagagttagagtggtctctctgtgctgtcgccgccacacagaagaagaagccggatgggttctcgagccgcagtaaagcacttctcaagcggcagttagagcagtccatacgggagcagatactgctgaaaggacacgtgacacagttgaaggagtcgcttaaagaagtccagctggagagagatcaatatgctgaacaaataaaaggagagagggcccagtggcagcagaggatgaggaaaatgtcgcaggaggtttgcacattgaaggaggagaagaagcatgatacgcatcgggtagaggagctggagaggagcttgtccagactcaaaaaccagatggctgagccactgcccccggatgccccagcagtgtcctctgaggtggagctgcaagacctgaggaaggagctggagagagtggcaggagagctccaggctcaggtggaaaacaatcagtgcatcagtctcctgaaccgtgggcaaaaggagaggcttcgcgagcaggaggagaggcttcaggagcagcaggagaggcttcgggaacgggagaagaggcttcagcagctggccgagccacagagcgacttggaggagctgaagcacgagaacaagagcgcactgcagttggagcagcaagtaaaggagctgcaggagaagctgggccaggtgatggagacgctcacctcggccgagaaggagccagaggcagcagtcccagcctcagggactgggggcgagtctagcggccttatggacctcctggaggagaaggcggacctgagggagcatgtggagaaactggaacttggattcatccagtaccggagagagagatgccatcagaacgtacatcgccttctaacagagccaggggacagtgccaaagatgcgtcaccgggaggaggccatcatcaggctggcccaggacaaggaggagaggaaggtgaagctgctggagctgcaggagatggtgttgcggcttgtggcagctacaacgaggggcacggcaaattcctggccgctgcccagaaccctgctgctgaacccagtccaggaggccccagccccccaggagctcggggctgccgacaagcatggtgatctttgtgaggcgagcctcaccaacagcgtggagcctgcacaaggagaagccagggagggttcttcccaggacaaccctactgcacagccaatcgtgcagctccttggtgagatgcaggaccaccaggagcacccaggcttgggcagcaactgctgtgtgccatgcttttgctgggcttggctgccgagaagaaggagataaacaccaccatcatcaaagagctgctcaagaaatttttaaaaacgaaacaaagttatggggttaatctcctacacaattcatttacttcatttgaatgttagagctactcatgattatttgtgtttctaatttatagtttaagtttatttgtaaaaagttaaaagagagtgggtctctgtggctctcactgatgttcactctggcatccttcagcatttttcttttttcatttcataattgtaggtcattagcatgcatatcgagtttgcccttacgtggtgggagttcaaacacacaaagacccactctttgcacaaaactgttctcgctggtttggaataggctcccgtgcttttctaatgttattgcagcatggatgtccattacagaattcagataaaatttgctaatgttctgctatgatgtttgatctcatcttaatcacagtgagctcttctatagctcaatatgcggtttgccctcaagtgtgcactgtttattactttgtaatatgccactgtgagtactgacatttagagctgtttaaaggccgagaactggaaacagcctttcctccattttctgtgtattggtgatgggagtgataaccttttgggggagctttctaaatctcacagaagaggaaagtggcctgctctggcaggtatgtgcaggatacagtgtgtttcatctgttccggtgccaagaatgagcagtgtactgtggcagttccctttggatttgtatgtgctctgggctcatgaagatattgcatcgtgagctgcagcagttgcactctttttcaatgacctaaaaagggcttatttccgaggaatgaaaggctgccatcattggctgtgggtgtgaaaaacctttcctagcttagagcatttgtatctacaatacattttaaagtcagagttcgtgttccctgttttaatcacatgactacctgtcccagtacacgaaagggcgctggttggcattcttcttaatgtatttagtgaagatcataagaaatcctttaagagtttaaatgtctctgaaacaggcatacaggctctagtcaagaatgaattagagtgaaggaaagctgtgtgacacctggcattcctctctgttcatggagcttctttgaggcttgaagtttgattttactatctagacctctctggctaatacctattcttcaaccacctcggttactctgacataggaatttacttcttttccttgagtggaaaacactttagaaagtaataacaaacattattataaactaatatatgtgagagtacttagttgaaacaaaaaggaattttagtagacagtattatattatctttgaaaatcaaggagaagtttatgcaacttaaaatgtttacacactgtggtgcaatctactgtttgtgaatgtctgtattatcaggaaacatgtctatacgatcgcagagttgtatttcctcacaaacttctttacgaagagtgaaatacgtttttgtacctctcattttcagtcagggacatactttgtgcaatatttctgtgattgtgcctatgcatgatgaatgaatgcatttcaatcatacattgcctaaatcataacttgatgatgcttgggaaagaatcaacagttaaaacttcatgaagttctaatgtctgtgttccaaaacacatcacattattaggttgtagggagatatgtaggtgtgctccctggggtggggagttttctagttactagaccatctccatttttagcacttggcagcctcatgatccttttataaatgtgagattaacaggagagcagcaatacgattttgccaatggaataacagatttgccggcattcactgaaagagggcagatattgggtccttgtaacttcaactgactcttccaaattgtatgaatttatcaatgtattacacaaatccagtttcagaatgataaaaaatgttagaccaaataatgcggctaattaacagtcgtatgatttctagcccatgggtttaaaactgtatcttaaagagtcattttaaaataatataaatattaaaaaatgtaactgctatcttaatgttctgaaataaaacattttaaaatataaatcctgtagtttaaaaggaagaaatggtgggaaggaaaagtagagaaagaaatgccaattacaggccaaagcgttatttgccaagttttcttagaatgaattttaccaatgtatgagttcttgttaacagaatgtgtaacggaaatactgaaagacttttgcttaaagtggcattattgactgctgatgtgatgctactgtaatgcaataaatttttaaattgttgcaaa

SEQ ID NO: 313641 - DNA, 410 bp, Homo sapiens
caggccagcgggtagaagaacggacagagtaattagcggcgccaagaaaaattcaaagaatattggcagagaaaccgccctggtgttccagcagcagcgaagaggaacacgaaagcaaatggcagtagccctgagacggccgcttctggtggttgccactcatctgaagctgtgagtcttgcctggacaggcttttggggacagggggcccaaggagcagtagagggcaatcgttaagattgtggatggactgttgggtactggtgaaggattctggatttggccgggcacagtggctcacgcctgtaatccccacacttcgggagaccgaggcaggtggatcacaaggtcaggagatcgagaccatccaggcaaacacggtgaaatactaaaaaatacaaaaaaaaaag

SEQ ID NO: 313642 - DNA, 496 bp, Homo sapiens
tttttttcagatgatgtctcactctgtcacccaagatggagtgcaatggcacgatctcagctcactgcaacctctgcctcccaggttcaagcaattatcctgcctcagccacccgagtagctgagattacaggcctctgccaccatgctcagctattttttgtatttttagtagagacggggtttcaccatgttgggcaggctagtcttggaactactgacctcaggtgatccgcccactttggcctcccgaaagtgctgggattacagtcatgagccaccatgcccagcctatttatttctgattctttaagggtgagtagaaattttttccaggtgactaaaaccttgagacattattccaagcagagaccagcggggcaaagacacggggatatagagatgttgaagtttaccaaacactgctagatttaaaaaacagaaaagaaacaatcaaaatcaaaaattaaaattaaaaatcacctaaaaaaaaagaa

SEQ ID NO: 313643 - DNA, 4627 bp, Homo sapiens
tgcttgagctctttgggcctctgttttcacgtctgtatgatagaggtggtattgtttgacttgtatttgtgaagtttcaatgagattgataattgtcgattttatgttaatccctagtacatggcctgctgtcaacacccaggacacccaggatatggtctttgctgtttgattttcctcatccccagtctcaaggggaagccaggacaatgagaacagccacttcccatcaggagtcactgcaaggcccccagggtgggatggtggggagataagaaccgtgagagaagttggcacaaaggagttatgggacaaagggtccaagataggcagaaaagaaaatgttgccagttgatggggaagaaaggaagtcggagggctcagacactgagggggacagaacatctccatgtgcagtctcatctcttatagtcagcaacaggtatccacggggagggccctacatcatctgctaccctgaaggatctggaggtaggaggctctgggcggaggtgcagtgaccccgcaggccagccctccaacctcctcccgcagcggggactgggtgcccctctgccagctgagacagcccacacacaacccagccctaatgatcgttctctctacctctcccccaagtcctcctccgcctcctcctctctgcatgcgcgtcagagcccgtgccaagaacaagcagcagtcctgaactcgaggtccataaaaatcagtcgactgaatgacaccatcaaatctttgaaacaacagaagaaacaagtggaacatcagctggaagaagaaaagaaagcaaacaatgagaaacagaaagctgaaagggagctagagggtcaaatccagagattgaacacagagaaaaagaaactaaatacggacctgtatcacatgaaacattctctcagatactttgaagaagagtccaaggatctggccggccgcctgcaacgttcatcgcagcgtataggagagttagagtggtctctctgtgctgtcgccgccacacagaagaagaagccggatgggttctcgagccgcagtaaagcacttctcaagcggcagttagagcagtccatacgggagcagatactgctgaaaggacacgtgacacagttgaaggagtcgcttaaagaagtccagctggagagagatcaatatgctgaacaaataaaaggagagagggcccagtggcagcagaggatgaggaaaatgtcgcaggaggtttgcacattgaaggaggagaagaagcatgatacgcatcgggtagaggagctggagaggagcttgtccagactcaaaaaccagatggctgagccactgcccccggatgccccagcagtgtcctctgaggtggagctgcaagacctgaggaaggagctggagagagtggcaggagagctccaggctcaggtggaaaacaatcagtgcatcagtctcctgaaccgtgggcaaaaggagaggcttcgcgagcaggaggagaggcttcaggagcagcaggagaggcttcgggaacgggagaagaggcttcagcagctggccgagccacagagcgacttggaggagctgaagcacgagaacaagagcgcactgcagttggagcagcaagtaaaggagctgcaggagaagctgggccaggtgatggagacgctcacctcggccgagaaggagccagaggcagcagtcccagcctcagggactgggggcgagtctagcggccttatggacctcctggaggagaaggcggacctgagggagcatgtggagaaactggaacttggattcatccagtaccggagagagagatgccatcagaacgtacatcgccttctaacagagccaggggacagtgccaaagatgcgtcaccgggaggaggccatcatcaggctggcccaggacaaggaggagaggaaggtgaagctgctggagctgcaggagatggtgttgcggcttgtggcagctacaacgaggggcacggcaaattcctggccgctgcccagaaccctgctgctgaacccagtccaggaggccccagccccccaggagctcggggctgccgacaagcatggtgatctttgtgaggcgagcctcaccaacagcgtggagcctgcacaaggagaagccagggagggttcttcccaggacaaccctactgcacagccaatcgtgcagctccttggtgagatgcaggaccaccaggagcacccaggcttgggcagcaactgctgtgtgccatgcttttgctgggcttggctgccgagaagaaggagataaacaccaccatcatcaaagagctgctcaagaaatttttaaaaacgaaacaaagttatggggttaatctcctacacaattcatttacttcatttgaatgttagagctactcatgattatttgtgtttctaatttatagtttaagtttatttgtaaaaagttaaaagagagtgggtctctgtggctctcactgatgttcactctggcatccttcagcatttttcttttttcatttcataattgtaggtcattagcatgcatatcgagtttgcccttacgtggtgggagttcaaacacacaaagacccactctttgcacaaaactgttctcgctggtttggaataggctcccgtgcttttctaatgttattgcagcatggatgtccattacagaattcagataaaatttgctaatgttctgctatgatgtttgatctcatcttaatcacagtgagctcttctatagctcaatatgcggtttgccctcaagtgtgcactgtttattactttgtaatatgccactgtgagtactgacatttagagctgtttaaaggccgagaactggaaacagcctttcctccattttctgtgtattggtgatgggagtgataaccttttgggggagctttctaaatctcacagaagaggaaagtggcctgctctggcaggtatgtgcaggatacagtgtgtttcatctgttccggtgccaagaatgagcagtgtactgtggcagttccctttggatttgtatgtgctctgggctcatgaagatattgcatcgtgagctgcagcagttgcactctttttcaatgacctaaaaagggcttatttccgaggaatgaaaggctgccatcattggctgtgggtgtgaaaaacctttcctagcttagagcatttgtatctacaatacattttaaagtcagagttcgtgttccctgttttaatcacatgactacctgtcccagtacacgaaagggcgctggttggcattcttcttaatgtatttagtgaagatcataagaaatcctttaagagtttaaatgtctctgaaacaggcatacaggctctagtcaagaatgaattagagtgaaggaaagctgtgtgacacctggcattcctctctgttcatggagcttctttgaggcttgaagtttgattttactatctagacctctctggctaatacctattcttcaaccacctcggttactctgacataggaatttacttcttttccttgagtggaaaacactttagaaagtaataacaaacattattataaactaatatatgtgagagtacttagttgaaacaaaaaggaattttagtagacagtattatattatctttgaaaatcaaggagaagtttatgcaacttaaaatgtttacacactgtggtgcaatctactgtttgtgaatgtctgtattatcaggaaacatgtctatacgatcgcagagttgtatttcctcacaaacttctttacgaagagtgaaatacgtttttgtacctctcattttcagtcagggacatactttgtgcaatatttctgtgattgtgcctatgcatgatgaatgaatgcatttcaatcatacattgcctaaatcataacttgatgatgcttgggaaagaatcaacagttaaaacttcatgaagttctaatgtctgtgttccaaaacacatcacattattaggttgtagggagatatgtaggtgtgctccctggggtggggagttttctagttactagaccatctccatttttagcacttggcagcctcatgatccttttataaatgtgagattaacaggagagcagcaatacgattttgccaatggaataacagatttgccggcattcactgaaagagggcagatattgggtccttgtaacttcaactgactcttccaaattgtatgaatttatcaatgtattacacaaatccagtttcagaatgataaaaaatgttagaccaaataatgcggctaattaacagtcgtatgatttctagcccatgggtttaaaactgtatcttaaagagtcattttaaaataatataaatattaaaaaatgtaactgctatcttaatgttctgaaataaaacattttaaaatataaatcctgtagtttaaaaggaagaaatggtgggaaggaaaagtagagaaagaaatgccaattacaggccaaagcgttatttgccaagttttcttagaatgaattttaccaatgtatgagttcttgttaacagaatgtgtaacggaaatactgaaagacttttgcttaaagtggcattattgactgctgatgtgatgctactgtaatgcaataaatttttaaattgttgcaaa

SEQ ID NO: 313644 - DNA, 4547 bp, Homo sapiens
tttttttcagatgatgtctcactctgtcacccaagatggagtgcaatggcacgatctcagctcactgcaacctctgcctcccaggttcaagcaattatcctgcctcagccacccgagtagctgagattacaggcctctgccaccatgctcagctattttttgtatttttagtagagacggggtttcaccatgttgggcaggctagtcttggaactactgacctcaggtgatccgcccactttggcctcccgaaagtgctgggattacagtcatgagccaccatgcccagcctatttatttctgattctttaagggtgactggacgtgttgatcagcgctcgctgggatttggctgacgtggccccagccccgcctccctccccaccccacaatggcagaagaaactggacagagtaaattagctgcagccaagaaaaagttcaaagaatattggcagagaaaccgccctggtgttccagcagcagcgaagaggaacacgaaagcaaatggcagtagccctgagacggccgcttctggtggttgccactcatctgaagcttcctcctccgcctcctcctctctgcatgcgcgtcagagcccgtgccaagaacaagcagcagtcctgaactcgaggtccataaaaatcagtcgactgaatgacaccatcaaatctttgaaacaacagaagaaacaagtggaacatcagctggaagaagaaaagaaagcaaacaatgagaaacagaaagctgaaagggagctagagggtcaaatccagagattgaacacagagaaaaagaaactaaatacggacctgtatcacatgaaacattctctcagatactttgaagaagagtccaaggatctggccggccgcctgcaacgttcatcgcagcgtataggagagttagagtggtctctctgtgctgtcgccgccacacagaagaagaagccggatgggttctcgagccgcagtaaagcacttctcaagcggcagttagagcagtccatacgggagcagatactgctgaaaggacacgtgacacagttgaaggagtcgcttaaagaagtccagctggagagagatcaatatgctgaacaaataaaaggagagagggcccagtggcagcagaggatgaggaaaatgtcgcaggaggtttgcacattgaaggaggagaagaagcatgatacgcatcgggtagaggagctggagaggagcttgtccagactcaaaaaccagatggctgagccactgcccccggatgccccagcagtgtcctctgaggtggagctgcaagacctgaggaaggagctggagagagtggcaggagagctccaggctcaggtggaaaacaatcagtgcatcagtctcctgaaccgtgggcaaaaggagaggcttcgcgagcaggaggagaggcttcaggagcagcaggagaggcttcgggaacgggagaagaggcttcagcagctggccgagccacagagcgacttggaggagctgaagcacgagaacaagagcgcactgcagttggagcagcaagtaaaggagctgcaggagaagctgggccaggtgatggagacgctcacctcggccgagaaggagccagaggcagcagtcccagcctcagggactgggggcgagtctagcggccttatggacctcctggaggagaaggcggacctgagggagcatgtggagaaactggaacttggattcatccagtaccggagagagagatgccatcagaacgtacatcgccttctaacagagccaggggacagtgccaaagatgcgtcaccgggaggaggccatcatcaggctggcccaggacaaggaggagaggaaggtgaagctgctggagctgcaggagatggtgttgcggcttgtggcagctacaacgaggggcacggcaaattcctggccgctgcccagaaccctgctgctgaacccagtccaggaggccccagccccccaggagctcggggctgccgacaagcatggtgatctttgtgaggcgagcctcaccaacagcgtggagcctgcacaaggagaagccagggagggttcttcccaggacaaccctactgcacagccaatcgtgcagctccttggtgagatgcaggaccaccaggagcacccaggcttgggcagcaactgctgtgtgccatgcttttgctgggcttggctgccgagaagaaggagataaacaccaccatcatcaaagagctgctcaagaaatttttaaaaacgaaacaaagttatggggttaatctcctacacaattcatttacttcatttgaatgttagagctactcatgattatttgtgtttctaatttatagtttaagtttatttgtaaaaagttaaaagagagtgggtctctgtggctctcactgatgttcactctggcatccttcagcatttttcttttttcatttcataattgtaggtcattagcatgcatatcgagtttgcccttacgtggtgggagttcaaacacacaaagacccactctttgcacaaaactgttctcgctggtttggaataggctcccgtgcttttctaatgttattgcagcatggatgtccattacagaattcagataaaatttgctaatgttctgctatgatgtttgatctcatcttaatcacagtgagctcttctatagctcaatatgcggtttgccctcaagtgtgcactgtttattactttgtaatatgccactgtgagtactgacatttagagctgtttaaaggccgagaactggaaacagcctttcctccattttctgtgtattggtgatgggagtgataaccttttgggggagctttctaaatctcacagaagaggaaagtggcctgctctggcaggtatgtgcaggatacagtgtgtttcatctgttccggtgccaagaatgagcagtgtactgtggcagttccctttggatttgtatgtgctctgggctcatgaagatattgcatcgtgagctgcagcagttgcactctttttcaatgacctaaaaagggcttatttccgaggaatgaaaggctgccatcattggctgtgggtgtgaaaaacctttcctagcttagagcatttgtatctacaatacattttaaagtcagagttcgtgttccctgttttaatcacatgactacctgtcccagtacacgaaagggcgctggttggcattcttcttaatgtatttagtgaagatcataagaaatcctttaagagtttaaatgtctctgaaacaggcatacaggctctagtcaagaatgaattagagtgaaggaaagctgtgtgacacctggcattcctctctgttcatggagcttctttgaggcttgaagtttgattttactatctagacctctctggctaatacctattcttcaaccacctcggttactctgacataggaatttacttcttttccttgagtggaaaacactttagaaagtaataacaaacattattataaactaatatatgtgagagtacttagttgaaacaaaaaggaattttagtagacagtattatattatctttgaaaatcaaggagaagtttatgcaacttaaaatgtttacacactgtggtgcaatctactgtttgtgaatgtctgtattatcaggaaacatgtctatacgatcgcagagttgtatttcctcacaaacttctttacgaagagtgaaatacgtttttgtacctctcattttcagtcagggacatactttgtgcaatatttctgtgattgtgcctatgcatgatgaatgaatgcatttcaatcatacattgcctaaatcataacttgatgatgcttgggaaagaatcaacagttaaaacttcatgaagttctaatgtctgtgttccaaaacacatcacattattaggttgtagggagatatgtaggtgtgctccctggggtggggagttttctagttactagaccatctccatttttagcacttggcagcctcatgatccttttataaatgtgagattaacaggagagcagcaatacgattttgccaatggaataacagatttgccggcattcactgaaagagggcagatattgggtccttgtaacttcaactgactcttccaaattgtatgaatttatcaatgtattacacaaatccagtttcagaatgataaaaaatgttagaccaaataatgcggctaattaacagtcgtatgatttctagcccatgggtttaaaactgtatcttaaagagtcattttaaaataatataaatattaaaaaatgtaactgctatcttaatgttctgaaataaaacattttaaaatataaatcctgtagtttaaaaggaagaaatggtgggaaggaaaagtagagaaagaaatgccaattacaggccaaagcgttatttgccaagttttcttagaatgaattttaccaatgtatgagttcttgttaacagaatgtgtaacggaaatactgaaagacttttgcttaaagtggcattattgactgctgatgtgatgctactgtaatgcaataaatttttaaattgttgcaaa

SEQ ID NO: 313645 - DNA, 4506 bp, Homo sapiens
taagggttttaaagcaaaagccagcccctccactctcccagagcgggcggcccctcccctctctcagagtgggtggggacagcggttgcatgggcagctttcctgatgagccacaggtccctctggacacactgccgcctggccacgccccctttccctgtcatctttctcgttgaccaatgggcttgaagcattaaggccacgcccctattctgcattctactgtggccctggttacgctgcctctgggtcagttacgcagctgtcttccaggtgactggacgtgttgatcagcgctcgctgggatttggctgacgtggccccagccccgcctccctccccaccccacaatggcagaagaaactggacagagtaaattagctgcagccaagaaaaagttcaaagaatattggcagagaaaccgccctggtgttccagcagcagcgaagaggaacacgaaagcaaatggcagtagccctgagacggccgcttctggtggttgccactcatctgaagcttcctcctccgcctcctcctctctgcatgcgcgtcagagcccgtgccaagaacaagcagcagtcctgaactcgaggtccataaaaatcagtcgactgaatgacaccatcaaatctttgaaacaacagaagaaacaagtggaacatcagctggaagaagaaaagaaagcaaacaatgagaaacagaaagctgaaagggagctagagggtcaaatccagagattgaacacagagaaaaagaaactaaatacggacctgtatcacatgaaacattctctcagatactttgaagaagagtccaaggatctggccggccgcctgcaacgttcatcgcagcgtataggagagttagagtggtctctctgtgctgtcgccgccacacagaagaagaagccggatgggttctcgagccgcagtaaagcacttctcaagcggcagttagagcagtccatacgggagcagatactgctgaaaggacacgtgacacagttgaaggagtcgcttaaagaagtccagctggagagagatcaatatgctgaacaaataaaaggagagagggcccagtggcagcagaggatgaggaaaatgtcgcaggaggtttgcacattgaaggaggagaagaagcatgatacgcatcgggtagaggagctggagaggagcttgtccagactcaaaaaccagatggctgagccactgcccccggatgccccagcagtgtcctctgaggtggagctgcaagacctgaggaaggagctggagagagtggcaggagagctccaggctcaggtggaaaacaatcagtgcatcagtctcctgaaccgtgggcaaaaggagaggcttcgcgagcaggaggagaggcttcaggagcagcaggagaggcttcgggaacgggagaagaggcttcagcagctggccgagccacagagcgacttggaggagctgaagcacgagaacaagagcgcactgcagttggagcagcaagtaaaggagctgcaggagaagctgggccaggtgatggagacgctcacctcggccgagaaggagccagaggcagcagtcccagcctcagggactgggggcgagtctagcggccttatggacctcctggaggagaaggcggacctgagggagcatgtggagaaactggaacttggattcatccagtaccggagagagagatgccatcagaacgtacatcgccttctaacagagccaggggacagtgccaaagatgcgtcaccgggaggaggccatcatcaggctggcccaggacaaggaggagaggaaggtgaagctgctggagctgcaggagatggtgttgcggcttgtggcagctacaacgaggggcacggcaaattcctggccgctgcccagaaccctgctgctgaacccagtccaggaggccccagccccccaggagctcggggctgccgacaagcatggtgatctttgtgaggcgagcctcaccaacagcgtggagcctgcacaaggagaagccagggagggttcttcccaggacaaccctactgcacagccaatcgtgcagctccttggtgagatgcaggaccaccaggagcacccaggcttgggcagcaactgctgtgtgccatgcttttgctgggcttggctgccgagaagaaggagataaacaccaccatcatcaaagagctgctcaagaaatttttaaaaacgaaacaaagttatggggttaatctcctacacaattcatttacttcatttgaatgttagagctactcatgattatttgtgtttctaatttatagtttaagtttatttgtaaaaagttaaaagagagtgggtctctgtggctctcactgatgttcactctggcatccttcagcatttttcttttttcatttcataattgtaggtcattagcatgcatatcgagtttgcccttacgtggtgggagttcaaacacacaaagacccactctttgcacaaaactgttctcgctggtttggaataggctcccgtgcttttctaatgttattgcagcatggatgtccattacagaattcagataaaatttgctaatgttctgctatgatgtttgatctcatcttaatcacagtgagctcttctatagctcaatatgcggtttgccctcaagtgtgcactgtttattactttgtaatatgccactgtgagtactgacatttagagctgtttaaaggccgagaactggaaacagcctttcctccattttctgtgtattggtgatgggagtgataaccttttgggggagctttctaaatctcacagaagaggaaagtggcctgctctggcaggtatgtgcaggatacagtgtgtttcatctgttccggtgccaagaatgagcagtgtactgtggcagttccctttggatttgtatgtgctctgggctcatgaagatattgcatcgtgagctgcagcagttgcactctttttcaatgacctaaaaagggcttatttccgaggaatgaaaggctgccatcattggctgtgggtgtgaaaaacctttcctagcttagagcatttgtatctacaatacattttaaagtcagagttcgtgttccctgttttaatcacatgactacctgtcccagtacacgaaagggcgctggttggcattcttcttaatgtatttagtgaagatcataagaaatcctttaagagtttaaatgtctctgaaacaggcatacaggctctagtcaagaatgaattagagtgaaggaaagctgtgtgacacctggcattcctctctgttcatggagcttctttgaggcttgaagtttgattttactatctagacctctctggctaatacctattcttcaaccacctcggttactctgacataggaatttacttcttttccttgagtggaaaacactttagaaagtaataacaaacattattataaactaatatatgtgagagtacttagttgaaacaaaaaggaattttagtagacagtattatattatctttgaaaatcaaggagaagtttatgcaacttaaaatgtttacacactgtggtgcaatctactgtttgtgaatgtctgtattatcaggaaacatgtctatacgatcgcagagttgtatttcctcacaaacttctttacgaagagtgaaatacgtttttgtacctctcattttcagtcagggacatactttgtgcaatatttctgtgattgtgcctatgcatgatgaatgaatgcatttcaatcatacattgcctaaatcataacttgatgatgcttgggaaagaatcaacagttaaaacttcatgaagttctaatgtctgtgttccaaaacacatcacattattaggttgtagggagatatgtaggtgtgctccctggggtggggagttttctagttactagaccatctccatttttagcacttggcagcctcatgatccttttataaatgtgagattaacaggagagcagcaatacgattttgccaatggaataacagatttgccggcattcactgaaagagggcagatattgggtccttgtaacttcaactgactcttccaaattgtatgaatttatcaatgtattacacaaatccagtttcagaatgataaaaaatgttagaccaaataatgcggctaattaacagtcgtatgatttctagcccatgggtttaaaactgtatcttaaagagtcattttaaaataatataaatattaaaaaatgtaactgctatcttaatgttctgaaataaaacattttaaaatataaatcctgtagtttaaaaggaagaaatggtgggaaggaaaagtagagaaagaaatgccaattacaggccaaagcgttatttgccaagttttcttagaatgaattttaccaatgtatgagttcttgttaacagaatgtgtaacggaaatactgaaagacttttgcttaaagtggcattattgactgctgatgtgatgctactgtaatgcaataaatttttaaattgttgcaaa

SEQ ID NO: 313646 - DNA, 2673 bp, Homo sapiens
acagttctgtgtaccgatcgagggcacggacttagttactggtgggtctgacgcatgattccctgtggttgaatttgttttccgcaaacccagcccccagagctcggggctgccgacaagcatggtgatctttgtgaggcgagcctcaccaacagcgtggagcctgcacaaggagaagccagggagggttcttcccaggacaaccctactgcacagccaatcgtgcagctccttggtgagatgcaggaccaccaggagcacccaggcttgggcagcaactgctgtgtgccatgcttttgctgggcttggctgccgagaagaaggagataaacaccaccatcatcaaagagctgctcaagaaatttttaaaaacgaaacaaagttatggggttaatctcctacacaattcatttacttcatttgaatgttagagctactcatgattatttgtgtttctaatttatagtttaagtttatttgtaaaaagttaaaagagagtgggtctctgtggctctcactgatgttcactctggcatccttcagcatttttcttttttcatttcataattgtaggtcattagcatgcatatcgagtttgcccttacgtggtgggagttcaaacacacaaagacccactctttgcacaaaactgttctcgctggtttggaataggctcccgtgcttttctaatgttattgcagcatggatgtccattacagaattcagataaaatttgctaatgttctgctatgatgtttgatctcatcttaatcacagtgagctcttctatagctcaatatgcggtttgccctcaagtgtgcactgtttattactttgtaatatgccactgtgagtactgacatttagagctgtttaaaggccgagaactggaaacagcctttcctccattttctgtgtattggtgatgggagtgataaccttttgggggagctttctaaatctcacagaagaggaaagtggcctgctctggcaggtatgtgcaggatacagtgtgtttcatctgttccggtgccaagaatgagcagtgtactgtggcagttccctttggatttgtatgtgctctgggctcatgaagatattgcatcgtgagctgcagcagttgcactctttttcaatgacctaaaaagggcttatttccgaggaatgaaaggctgccatcattggctgtgggtgtgaaaaacctttcctagcttagagcatttgtatctacaatacattttaaagtcagagttcgtgttccctgttttaatcacatgactacctgtcccagtacacgaaagggcgctggttggcattcttcttaatgtatttagtgaagatcataagaaatcctttaagagtttaaatgtctctgaaacaggcatacaggctctagtcaagaatgaattagagtgaaggaaagctgtgtgacacctggcattcctctctgttcatggagcttctttgaggcttgaagtttgattttactatctagacctctctggctaatacctattcttcaaccacctcggttactctgacataggaatttacttcttttccttgagtggaaaacactttagaaagtaataacaaacattattataaactaatatatgtgagagtacttagttgaaacaaaaaggaattttagtagacagtattatattatctttgaaaatcaaggagaagtttatgcaacttaaaatgtttacacactgtggtgcaatctactgtttgtgaatgtctgtattatcaggaaacatgtctatacgatcgcagagttgtatttcctcacaaacttctttacgaagagtgaaatacgtttttgtacctctcattttcagtcagggacatactttgtgcaatatttctgtgattgtgcctatgcatgatgaatgaatgcatttcaatcatacattgcctaaatcataacttgatgatgcttgggaaagaatcaacagttaaaacttcatgaagttctaatgtctgtgttccaaaacacatcacattattaggttgtagggagatatgtaggtgtgctccctggggtggggagttttctagttactagaccatctccatttttagcacttggcagcctcatgatccttttataaatgtgagattaacaggagagcagcaatacgattttgccaatggaataacagatttgccggcattcactgaaagagggcagatattgggtccttgtaacttcaactgactcttccaaattgtatgaatttatcaatgtattacacaaatccagtttcagaatgataaaaaatgttagaccaaataatgcggctaattaacagtcgtatgatttctagcccatgggtttaaaactgtatcttaaagagtcattttaaaataatataaatattaaaaaatgtaactgctatcttaatgttctgaaataaaacattttaaaatataaatcctgtagtttaaaaggaagaaatggtgggaaggaaaagtagagaaagaaatgccaattacaggccaaagcgttatttgccaagttttcttagaatgaattttaccaatgtatgagttcttgttaacagaatgtgtaacggaaatactgaaagacttttgcttaaagtggcattattgactgctgatgtgatgctactgtaatgcaataaatttttaaattgttgcaaa

SEQ ID NO: 313647 - DNA, 4570 bp, Homo sapiens
tgcttgagctctttgggcctctgttttcacgtctgtatgatagaggtggtattgtttgacttgtatttgtgaagtttcaatgagattgataattgtcgattttatgttaatccctagtacatggcctgctgtcaacacccaggacacccaggatatggtctttgctgtttgattttcctcatccccagtctcaaggggaagccaggacaatgagaacagccacttcccatcaggagtcactgcaaggcccccagggtgggatggtggggagataagaaccgtgagagaagttggcacaaaggagttatgggacaaagggtccaagataggcagaaaagaaaatgttgccagttgatggggaagaaaggaagtcggagggctcagacactgagggggacagaacatctccatgtgcagtctcatctcttatagtcagcaacaggtatccacggggagggccctacatcatctgctaccctgaaggatctggaggtaggaggctctgggcggaggtgcagtgaccccgcaggccagccctccaacctcctcccgcagcggggactgggtgcccctctgccagctgagacagcccacacacaacccagccctaatgatcgttctctctacctctcccccaagtcctcctccgcctcctcctctctgcatgcgcgtcagagcccgtgccaagaacaagcagcagtcctgaactcgaggtccataaaaatcagtcgactgaatgacaccatcaaatctttgaaacaacagaagaaacaagtggaacatcagctggaagaagaaaagaaagcaaacaatgagaaacagaaagctgaaagggagctagagggtcaaatccagagattgaacacagagaaaaagaaactaaatacggacctgtatcacatgaaacattctctcagatactttgaagaagagtccaaggatctggccggccgcctgcaacgttcatcgcagcgtataggagagttagagtggtctctctgtgctgtcgccgccacacagaagaagaagccggatgggttctcgagccgcagtaaagcacttctcaagcggcagttagagcagtccatacgggagcagatactgctgaaaggacacgtgacacagttgaaggagtcgcttaaagaagtccagctggagagagatcaatatgctgaacaaataaaaggagagagggcccagtggcagcagaggatgaggaaaatgtcgcaggaggtttgcacattgaaggaggagaagaagcatgatacgcatcgggtagaggagctggagaggagcttgtccagactcaaaaaccagatggctgagccactgcccccggatgccccagcagtgtcctctgaggtggagctgcaagacctgaggaaggagctggagagagtggcaggagagctccaggctcaggtggaaaacaatcagtgcatcagtctcctgaaccgtgggcaaaaggagaggcttcgcgagcaggaggagaggcttcaggagcagcaggagaggcttcgggaacgggagaagaggcttcagcagctggccgagccacagagcgacttggaggagctgaagcacgagaacaagagcgcactgcagttggagcagcaagtaaaggagctgcaggagaagctgggccaggtgatggagacgctcacctcggccgagaaggagccagaggcagcagtcccagcctcagggactgggggcgagtctagcggccttatggacctcctggaggagaaggcggacctgagggagcatgtggagaaactggaacttggattcatccagtaccggagagagagatgccatcagaacgtacatcgccttctaacagagccaggggacagtgccaaagatgcgtcaccgggaggaggccatcatcaggctggcccaggacaaggaggagaggaaggtgaagctgctggagctgcaggagatggtgttgcggcttgtggcagctacaacgaggggcacggcaaattcctggccgctgcccagaaccctgctgctgaacccagtccaggaggccccagccccccaggagctcggggctgccgacaagcatggtgatctttgtgaggcgagcctcaccaacagcgtggagcctgcacaaggagaagccagggagggttcttcccaggacaaccctactgcacagccaatcgtgcagctccttggtgagatgcaggaccaccaggagcacccaggcttgggcagcaactgctgtgtgccatgcttttgctgggcttggctgccgagaagaaggagataaacaccaccatcatcaaagagctgctcaagaaatttttaaaaacgaaacaaagttatggggttaatctcctacacaattcatttacttcatttgaatgttagagctactcatgattatttgtgtttctaatttatagtttaagtttatttgtaaaaagttaaaagagagtgggtctctgtggctctcactgatgttcactctggcatccttcagcatttttcttttttcatttcataattgtaggtcattagcatgcatatcgagtttgcccttacgtggtgggagttcaaacacacaaagacccactctttgcacaaaactgttctcgctggtttggaataggctcccgtgcttttctaatgttattgcagcatggatgtccattacagaattcagataaaatttgctaatgttctgctatgatgtttgatctcatcttaatcacagtgagctcttctatagctcaatatgcggtttgccctcaagtgtgcactgtttattactttgtaatatgccactgtgagtactgacatttagagctgtttaaaggccgagaactggaaacagcctttcctccattttctgtgtattggtgatgggagtgataaccttttgggggagctttctaaatctcacagaagaggaaagtggcctgctctggcaggtatgtgcaggatacagtgtgtttcatctgttccggtgccaagaatgagcagtgtactgtggcagttccctttggatttgtatgtgctctgggctcatgaagatattgcatcgtgagctgcagcagttgcactctttttcaatgacctaaaaagggcttatttccgaggaatgaaaggctgccatcattggctgtgggtgtgaaaaacctttcctagcttagagcatttgtatctacaatacattttaaagtcagagttcgtgttccctgttttaatcacatgactacctgtcccagtacacgaaagggcgctggttggcattcttcttaatgtatttagtgaagatcataagaaatcctttaagagtttaaatgtctctgaaacaggcatacaggctctagtcaagaatgaattagagtgaaggaaagctgtgtgacacctggcattcctctctgttcatggagcttctttgaggcttgaagtttgattttactatctagacctctctggctaatacctattcttcaaccacctcggttactctgacataggaatttacttcttttccttgagtggaaaacactttagaaagtaataacaaacattattataaactaatatatgtgagagtacttagttgaaacaaaaaggaattttagtagacagtattatattatctttgaaaatcaaggagaagtttatgcaacttaaaatgtttacacactgtggtgcaatctactgtttgtgaatgtctgtattatcaggaaacatgtctatacgatcgcagagttgtatttcctcacaaacttctttacgaagagtgaaatacgtttttgtacctctcattttcagtcagggacatactttgtgcaatatttctgtgattgtgcctatgcatgatgaatgaatgcatttcaatcatacattgcctaaatcataacttgatgatgcttgggaaagaatcaacagttaaaacttcatgaagttctaatgtctgtgttccggagttttctagttactagaccatctccatttttagcacttggcagcctcatgatccttttataaatgtgagattaacaggagagcagcaatacgattttgccaatggaataacagatttgccggcattcactgaaagagggcagatattgggtccttgtaacttcaactgactcttccaaattgtatgaatttatcaatgtattacacaaatccagtttcagaatgataaaaaatgttagaccaaataatgcggctaattaacagtcgtatgatttctagcccatgggtttaaaactgtatcttaaagagtcattttaaaataatataaatattaaaaaatgtaactgctatcttaatgttctgaaataaaacattttaaaatataaatcctgtagtttaaaaggaagaaatggtgggaaggaaaagtagagaaagaaatgccaattacaggccaaagcgttatttgccaagttttcttagaatgaattttaccaatgtatgagttcttgttaacagaatgtgtaacggaaatactgaaagacttttgcttaaagtggcattattgactgctgatgtgatgctactgtaatgcaataaatttttaaattgttgcaaa

SEQ ID NO: 313648 - DNA, 1960 bp, Homo sapiens
tatacaacagatacgtgctatggcgacgctcgatgattcaaatgttactgctcacgtatctgtgacattatgccagcttgctcgaagtaactagatcctgtgtatcactgcatgtagtatgaccgggccagaagcaacatgcgaatacaagaccattgtccctgcgcagtgttaactcggtagtcgttgcgttgaatgaggatctgagtatgccatttcggaggatccttactgagatctcatcagacagaagataccagatgcgatgttcagatcgagtattagtgcaccgatacagtgtgtttcatctgttccggtgccaagaatgagcagtgtactgtggcagttccctttggatttgtatgtgctctgggctcatgaagatattgcatcgtgagctgcagcagttgcactctttttcaatgacctaaaaagggcttatttccgaggaatgaaaggctgccatcattggctgtgggtgtgaaaaacctttcctagcttagagcatttgtatctacaatacattttaaagtcagagttcgtgttccctgttttaatcacatgactacctgtcccagtacacgaaagggcgctggttggcattcttcttaatgtatttagtgaagatcataagaaatcctttaagagtttaaatgtctctgaaacaggcatacaggctctagtcaagaatgaattagagtgaaggaaagctgtgtgacacctggcattcctctctgttcatggagcttctttgaggcttgaagtttgattttactatctagacctctctggctaatacctattcttcaaccacctcggttactctgacataggaatttacttcttttccttgagtggaaaacactttagaaagtaataacaaacattattataaactaatatatgtgagagtacttagttgaaacaaaaaggaattttagtagacagtattatattatctttgaaaatcaaggagaagtttatgcaacttaaaatgtttacacactgtggtgcaatctactgtttgtgaatgtctgtattatcaggaaacatgtctatacgatcgcagagttgtatttcctcacaaacttctttacgaagagtgaaatacgtttttgtacctctcattttcagtcagggacatactttgtgcaatatttctgtgattgtgcctatgcatgatgaatgaatgcatttcaatcatacattgcctaaatcataacttgatgatgcttgggaaagaatcaacagttaaaacttcatgaagttctaatgtctgtgttccaaaacacatcacattattaggttgtagggagatatgtaggtgtgctccctggggtggggagttttctagttactagaccatctccatttttagcacttggcagcctcatgatccttttataaatgtgagattaacaggagagcagcaatacgattttgccaatggaataacagatttgccggcattcactgaaagagggcagatattgggtccttgtaacttcaactgactcttccaaattgtatgaatttatcaatgtattacacaaatccagtttcagaatgataaaaaatgttagaccaaataatgcggctaattaacagtcgtatgatttctagcccatgggtttaaaactgtatcttaaagagtcattttaaaataatataaatattaaaaaatgtaactgctatcttaatgttctgaaataaaacattttaaaatataaatcctgtagtttaaaaggaagaaatggtgggaaggaaaagtagagaaagaaatgccaattacaggccaaagcgttatttgccaagttttcttagaatgaattttaccaatgtatgagttcttgttaacagaatgtgtaacggaaatactgaaagacttttgcttaaagtggcattattgactgctgatgtgatgctactgtaatgcaataaatttttaaattgttgcaaa

SEQ ID NO: 313649 - DNA, 747 bp, Homo sapiens
agaaattccagttgtctttttcccagctgcatcctgcctgtagatggccggggaaggctctagaaaaggggcgcattgcgatccaaccatcggcagccgattccgtgtcttgatcacggggtgggagggaaccgtggcgtccctgcgtggggcccatgggtgagacactccagtactgagacctagagtccagatgcttgtaggagccaagttgcggcaatacgattttgccaatggaataacagatttgccggcattcactgaaagagggcagatattgggtccttgtaacttcaactgactcttccaaattgtatgaatttatcaatgtattacacaaatccagtttcagaatgataaaaaatgttagaccaaataatgcggctaattaacagtcgtatgatttctagcccatgggtttaaaactgtatcttaaagagtcattttaaaataatataaatattaaaaaatgtaactgctatcttaatgttctgaaataaaacattttaaaatataaatcctgtagtttaaaaggaagaaatggtgggaaggaaaagtagagaaagaaatgccaattacaggccaaagcgttatttgccaagttttcttagaatgaattttaccaatgtatgagttcttgttaacagaatgtgtaacggaaatactgaaagacttttgcttaaagtggcattattgactgctgatgtgatgctactgtaatgcaataaatttttaaattgttgcaaa

SEQ ID NO: 313650 - DNA, 4470 bp, Homo sapiens
tgcttgagctctttgggcctctgttttcacgtctgtatgatagaggtggtattgtttgacttgtatttgtgaagtttcaatgagattgataattgtcgattttatgttaatccctagtacatggcctgctgtcaacacccaggacacccaggatatggtctttgctgtttgattttcctcatccccagtctcaaggggaagccaggacaatgagaacagccacttcccatcaggagtcactgcaaggcccccagggtgggatggtggggagataagaaccgtgagagaagttggcacaaaggagttatgggacaaagggtccaagataggcagaaaagaaaatgttgccagttgatggggaagaaaggaagtcggagggctcagacactgagggggacagaacatctccatgtgcagtctcatctcttatagtcagcaacaggtatccacggggagggccctacatcatctgctaccctgaaggatctggaggtaggaggctctgggcggaggtgcagtgaccccgcaggccagccctccaacctcctcccgcagcggggactgggtgcccctctgccagctgagacagcccacacacaacccagccctaatgatcgttctctctacctctcccccaagtcctcctccgcctcctcctctctgcatgcgcgtcagagcccgtgccaagaacaagcagcagtcctgaactcgaggtccataaaaatcagtcgactgaatgacaccatcaaatctttgaaacaacagaagaaacaagtggaacatcagctggaagaagaaaagaaagcaaacaatgagaaacagaaagctgaaagggagctagagggtcaaatccagagattgaacacagagaaaaagaaactaaatacggacctgtatcacatgaaacattctctcagatactttgaagaagagtccaaggatctggccggccgcctgcaacgttcatcgcagcgtataggagagttagagtggtctctctgtgctgtcgccgccacacagaagaagaagccggatgggttctcgagccgcagtaaagcacttctcaagcggcagttagagcagtccatacgggagcagatactgctgaaaggacacgtgacacagttgaaggagtcgcttaaagaagtccagctggagagagatcaatatgctgaacaaataaaaggagagagggcccagtggcagcagaggatgaggaaaatgtcgcaggaggtttgcacattgaaggaggagaagaagcatgatacgcatcgggtagaggagctggagaggagcttgtccagactcaaaaaccagatggctgagccactgcccccggatgccccagcagtgtcctctgaggtggagctgcaagacctgaggaaggagctggagagagtggcaggagagctccaggctcaggtggaaaacaatcagtgcatcagtctcctgaaccgtgggcaaaaggagaggcttcgcgagcaggaggagaggcttcaggagcagcaggagaggcttcgggaacgggagaagaggcttcagcagctggccgagccacagagcgacttggaggagctgaagcacgagaacaagagcgcactgcagttggagcagcaagtaaaggagctgcaggagaagctgggccaggtgatggagacgctcacctcggccgagaaggagccagaggcagcagtcccagcctcagggactgggggcgagtctagcggccttatggacctcctggaggagaaggcggacctgagggagcatgtggagaaactggaacttggattcatccagtaccggagagagagatgccatcagaacgtacatcgccttctaacagagccaggggacagtgccaaagatgcgtcaccgggaggaggccatcatcaggctggcccaggacaaggaggagaggaaggtgaagctgctggagctgcaggagatggtgttgcggcttgtggcagctacaacgaggggcacggcaaattcctggccgctgcccagaaccctgctgctgaacccagtccaggaggccccagccccccaggagctcggggctgccgacaagcatggtgatctttgtgaggcgagcctcaccaacagcgtggagcctgcacaaggagaagccagggagggttcttcccaggacaaccctactgcacagccaatcgtgcagctccttggtgagatgcaggaccaccaggagcacccaggcttgggcagcaactgctgtgtgccatgcttttgctgggcttggctgccgagaagaaggagataaacaccaccatcatcaaagagctgctcaagaaatttttaaaaacgaaacaaagttatggggttaatctcctacacaattcatttacttcatttgaatgttagagctactcatgattatttgtgtttctaatttatagtttaagtttatttgtaaaaagttaaaagagagtgggtctctgtggctctcactgatgttcactctggcatccttcagcatttttcttttttcatttcataattgtaggtcattagcatgcatatcgagtttgcccttacgtggtgggagttcaaacacacaaagacccactctttgcacaaaactgttctcgctggtttggaataggctcccgtgcttttctaatgttattgcagcatggatgtccattacagaattcagataaaatttgctaatgttctgctatgatgtttgatctcatcttaatcacagtgagctcttctatagctcaatatgcggtttgccctcaagtgtgcactgtttattactttgtaatatgccactgtgagtactgacatttagagctgtttaaaggccgagaactggaaacagcctttcctccattttctgtgtattggtgatgggagtgataaccttttgggggagctttctaaatctcacagaagaggaaagtggcctgctctggcaggtatgtgcaggatacagtgtgtttcatctgttccggtgccaagaatgagcagtgtactgtggcagttccctttggatttgtatgtgctctgggctcatgaagatattgcatcgtgagctgcagcagttgcactctttttcaatgacctaaaaagggcttatttccgaggaatgaaaggctgccatcattggctgtgggtgtgaaaaacctttcctagcttagagcatttgtatctacaatacattttaaagtcagagttcgtgttccctgttttaatcacatgactacctgtcccagtacacgaaagggcgctggttggcattcttcttaatgtatttagtgaagatcataagaaatcctttaagagtttaaatgtctctgaaacaggcatacaggctctagtcaagaatgaattagagtgaaggaaagctgtgtgacacctggcattcctctctgttcatggagcttctttgaggcttgaagtttgattttactatctagacctctctggctaatacctattcttcaaccacctcggttactctgacataggaatttacttcttttccttgagtggaaaacactttagaaagtaataacaaacattattataaactaatatatgtgagagtacttagttgaaacaaaaaggaattttagtagacagtattatattatctttgaaaatcaaggagaagtttatgcaacttaaaatgtttacacactgtggtgcaatctactgtttgtgaatgtctgtattatcaggaaacatgtctatacgatcgcagagttgtatttcctcacaaacttctttacgaagagtgaaatacgtttttgtacctctcattttcagtcagggacatactttgtgcaatatttctgtgattgtgcctatgcatgatgaatgaatgcatttcaatcatacattgcctaaatcataacttgatgatgcttgggaaagaatcaacagttaaaacttcatgaagttctaatgtctgtgttccaaaacacatcacattattaggttgtagggagatatgtaggtgtgctccctggggtggggagttttctagttactagaccatctccatttttagcacttggcagcctcatgatccttttataaatgtgagattaacaggagagcagcaatacgattttgccaatggaataacagatttgccggcattcactgaaagagggcagatattgggtccttgtaacttcaactgactcttccaaattgtatgaatttatcaatgtattacacaaatccagtttcagaatgataaaaaatgttagaccaaataatgcggctaattaacagtcgtatgatttctagcccatgggtttaaaactgtatcttaaagagtcattttaaaataatataaatattaaaaaatgtaactgctatcttaatgttctgaaataaaacattttaaaatataaatcctgtagtttaaaaggaagaaatggtgggtagtcacagacgtctgtgactacccatgactacccagtctca

SEQ ID NO: 313651 - DNA, 721 bp, Homo sapiens
agcagatcgcggtgtgccgctacgtgcgggctctcaaggagctcagcctcccggacggagccggcggctgcggggcgaggacggcggcgcggcgaggacggcggcggaccggggcagccccgcgccctggccgctctactgagatgaagaaagaaaaagaatacctgctcagctccagagacacgtaaagggacagagattgggggacagaaggaagtgcattaattccttccacgacccctgaagagcagcggtgggtctgagcatcctatctccaggaagcaggccagcaggcaagccagctgccacctcgtcctgtgcaaagcacaggcaccgtccccaaaagatttccaaagatgatgttaaacccagccacggttctgatctccaggaaagcaattgctgtggtacaaaaggacaagggttaaaagagaacagtgggagctctctttcccagctaactcacgcagtgtgacgcagaggctttcagcacagcccagggtgcccgggactgaaaactccttcaccagccccctccacaggatatagaagacttagatcactacgagatgaaagcagagcccattagtgggaaaaagttggaggatgaaggaattgaaaaagaaaatttggcaatattagagaaattaggaagactgaaagacaagagcatttaactgcaaactgttgtcgttgtcaactgggttgtcttcctgaagta

SEQ ID NO: 313652 - DNA, 3989 bp, Homo sapiens
  misc_feature (145)..(145): n is a, c, g, or t
  misc_feature (148)..(148): n is a, c, g, or t
ctgaatttgaacctttgggagaaaagccaagcaagtgctgaaagagaaggaaagcaacattctccagaggacaggagggaacttcacaccctccactcacctctaactgcctctttagggttccctggttttgctggctttcttnctnttcctataggaaaagaaagcaaacaatgagaaacagaaagctgaaagggagctagagggtcaaatccagagattgaacacagagaaaaagaaactaaatacggacctgtatcacatgaaacattctctcagatactttgaagaagagtccaaggatctggccggccgcctgcaacgttcatcgcagcgtataggagagttagagtggtctctctgtgctgtcgccgccacacagaagaagaagccggatgggttctcgagccgcagtaaagcacttctcaagcggcagttagagcagtccatacgggagcagatactgctgaaaggacacgtgacacagttgaaggagtcgcttaaagaagtccagctggagagagatcaatatgctgaacaaataaaaggagagagggcccagtggcagcagaggatgaggaaaatgtcgcaggaggtttgcacattgaaggaggagaagaagcatgatacgcatcgggtagaggagctggagaggagcttgtccagactcaaaaaccagatggctgagccactgcccccggatgccccagcagtgtcctctgaggtggagctgcaagacctgaggaaggagctggagagagtggcaggagagctccaggctcaggtggaaaacaatcagtgcatcagtctcctgaaccgtgggcaaaaggagaggcttcgcgagcaggaggagaggcttcaggagcagcaggagaggcttcgggaacgggagaagaggcttcagcagctggccgagccacagagcgacttggaggagctgaagcacgagaacaagagcgcactgcagttggagcagcaagtaaaggagctgcaggagaagctgggccaggtgatggagacgctcacctcggccgagaaggagccagaggcagcagtcccagcctcagggactgggggcgagtctagcggccttatggacctcctggaggagaaggcggacctgagggagcatgtggagaaactggaacttggattcatccagtaccggagagagagatgccatcagaacgtacatcgccttctaacagagccaggggacagtgccaaagatgcgtcaccgggaggaggccatcatcaggctggcccaggacaaggaggagaggaaggtgaagctgctggagctgcaggagatggtgttgcggcttgtggcagctacaacgaggggcacggcaaattcctggccgctgcccagaaccctgctgctgaacccagtccaggaggccccagccccccaggagctcggggctgccgacaagcatggtgatctttgtgaggcgagcctcaccaacagcgtggagcctgcacaaggagaagccagggagggttcttcccaggacaaccctactgcacagccaatcgtgcagctccttggtgagatgcaggaccaccaggagcacccaggcttgggcagcaactgctgtgtgccatgcttttgctgggcttggctgccgagaagaaggagataaacaccaccatcatcaaagagctgctcaagaaatttttaaaaacgaaacaaagttatggggttaatctcctacacaattcatttacttcatttgaatgttagagctactcatgattatttgtgtttctaatttatagtttaagtttatttgtaaaaagttaaaagagagtgggtctctgtggctctcactgatgttcactctggcatccttcagcatttttcttttttcatttcataattgtaggtcattagcatgcatatcgagtttgcccttacgtggtgggagttcaaacacacaaagacccactctttgcacaaaactgttctcgctggtttggaataggctcccgtgcttttctaatgttattgcagcatggatgtccattacagaattcagataaaatttgctaatgttctgctatgatgtttgatctcatcttaatcacagtgagctcttctatagctcaatatgcggtttgccctcaagtgtgcactgtttattactttgtaatatgccactgtgagtactgacatttagagctgtttaaaggccgagaactggaaacagcctttcctccattttctgtgtattggtgatgggagtgataaccttttgggggagctttctaaatctcacagaagaggaaagtggcctgctctggcaggtatgtgcaggatacagtgtgtttcatctgttccggtgccaagaatgagcagtgtactgtggcagttccctttggatttgtatgtgctctgggctcatgaagatattgcatcgtgagctgcagcagttgcactctttttcaatgacctaaaaagggcttatttccgaggaatgaaaggctgccatcattggctgtgggtgtgaaaaacctttcctagcttagagcatttgtatctacaatacattttaaagtcagagttcgtgttccctgttttaatcacatgactacctgtcccagtacacgaaagggcgctggttggcattcttcttaatgtatttagtgaagatcataagaaatcctttaagagtttaaatgtctctgaaacaggcatacaggctctagtcaagaatgaattagagtgaaggaaagctgtgtgacacctggcattcctctctgttcatggagcttctttgaggcttgaagtttgattttactatctagacctctctggctaatacctattcttcaaccacctcggttactctgacataggaatttacttcttttccttgagtggaaaacactttagaaagtaataacaaacattattataaactaatatatgtgagagtacttagttgaaacaaaaaggaattttagtagacagtattatattatctttgaaaatcaaggagaagtttatgcaacttaaaatgtttacacactgtggtgcaatctactgtttgtgaatgtctgtattatcaggaaacatgtctatacgatcgcagagttgtatttcctcacaaacttctttacgaagagtgaaatacgtttttgtacctctcattttcagtcagggacatactttgtgcaatatttctgtgattgtgcctatgcatgatgaatgaatgcatttcaatcatacattgcctaaatcataacttgatgatgcttgggaaagaatcaacagttaaaacttcatgaagttctaatgtctgtgttccaaaacacatcacattattaggttgtagggagatatgtaggtgtgctccctggggtggggagttttctagttactagaccatctccatttttagcacttggcagcctcatgatccttttataaatgtgagattaacaggagagcagcaatacgattttgccaatggaataacagatttgccggcattcactgaaagagggcagatattgggtccttgtaacttcaactgactcttccaaattgtatgaatttatcaatgtattacacaaatccagtttcagaatgataaaaaatgttagaccaaataatgcggctaattaacagtcgtatgatttctagcccatgggtttaaaactgtatcttaaagagtcattttaaaataatataaatattaaaaaatgtaactgctatcttaatgttctgaaataaaacattttaaaatataaatcctgtagtttaaaaggaagaaatggtgggaaggaaaagtagagaaagaaatgccaattacaggccaaagcgttatttgccaagttttcttagaatgaattttaccaatgtatgagttcttgttaacagaatgtgtaacggaaatactgaaagacttttgcttaaagtggcattattgactgctgatgtgatgctactgtaatgcaataaatttttaaattgttgcaaa

SEQ ID NO: 313653 - DNA, 3072 bp, Homo sapiens
agcggaggccaggcactgcctggcaaggctgctggagggagatctggccgcagatggtgaaggagaacatcgaggcccccagtccccaagcagggctccatgggtcgggcggcgggcattggctctactgagatgaagaaagaaaaagaatacctgctcagctccagagacacgtaaagggacagagattgggggacagaaggaagtgcattaattccttccacgacccctgaagagcagcggtgggtctgagcatcctatctccaggaagcaggccagcaggcaagccagctgccacctcgtcctgtgcaaagcacaggcaccgtccccaaaagatttccaaagatgatgttaaacccagccacggttctgatctccaggaaagcaattgctgtggtacaaaaggacaagggttaaaagagaacagtgggagctctctttcccagctaactcacgcagtgtgacgcagaggctttcagcacagccccagccccccaggagctcggggctgccgacaagcatggtgatctttgtgaggcgagcctcaccaacagcgtggagcctgcacaaggagaagccagggagggttcttcccaggacaaccctactgcacagccaatcgtgcagctccttggtgagatgcaggaccaccaggagcacccaggcttgggcagcaactgctgtgtgccatgcttttgctgggcttggctgccgagaagaaggagataaacaccaccatcatcaaagagctgctcaagaaatttttaaaaacgaaacaaagttatggggttaatctcctacacaattcatttacttcatttgaatgttagagctactcatgattatttgtgtttctaatttatagtttaagtttatttgtaaaaagttaaaagagagtgggtctctgtggctctcactgatgttcactctggcatccttcagcatttttcttttttcatttcataattgtaggtcattagcatgcatatcgagtttgcccttacgtggtgggagttcaaacacacaaagacccactctttgcacaaaactgttctcgctggtttggaataggctcccgtgcttttctaatgttattgcagcatggatgtccattacagaattcagataaaatttgctaatgttctgctatgatgtttgatctcatcttaatcacagtgagctcttctatagctcaatatgcggtttgccctcaagtgtgcactgtttattactttgtaatatgccactgtgagtactgacatttagagctgtttaaaggccgagaactggaaacagcctttcctccattttctgtgtattggtgatgggagtgataaccttttgggggagctttctaaatctcacagaagaggaaagtggcctgctctggcaggtatgtgcaggatacagtgtgtttcatctgttccggtgccaagaatgagcagtgtactgtggcagttccctttggatttgtatgtgctctgggctcatgaagatattgcatcgtgagctgcagcagttgcactctttttcaatgacctaaaaagggcttatttccgaggaatgaaaggctgccatcattggctgtgggtgtgaaaaacctttcctagcttagagcatttgtatctacaatacattttaaagtcagagttcgtgttccctgttttaatcacatgactacctgtcccagtacacgaaagggcgctggttggcattcttcttaatgtatttagtgaagatcataagaaatcctttaagagtttaaatgtctctgaaacaggcatacaggctctagtcaagaatgaattagagtgaaggaaagctgtgtgacacctggcattcctctctgttcatggagcttctttgaggcttgaagtttgattttactatctagacctctctggctaatacctattcttcaaccacctcggttactctgacataggaatttacttcttttccttgagtggaaaacactttagaaagtaataacaaacattattataaactaatatatgtgagagtacttagttgaaacaaaaaggaattttagtagacagtattatattatctttgaaaatcaaggagaagtttatgcaacttaaaatgtttacacactgtggtgcaatctactgtttgtgaatgtctgtattatcaggaaacatgtctatacgatcgcagagttgtatttcctcacaaacttctttacgaagagtgaaatacgtttttgtacctctcattttcagtcagggacatactttgtgcaatatttctgtgattgtgcctatgcatgatgaatgaatgcatttcaatcatacattgcctaaatcataacttgatgatgcttgggaaagaatcaacagttaaaacttcatgaagttctaatgtctgtgttccaaaacacatcacattattaggttgtagggagatatgtaggtgtgctccctggggtggggagttttctagttactagaccatctccatttttagcacttggcagcctcatgatccttttataaatgtgagattaacaggagagcagcaatacgattttgccaatggaataacagatttgccggcattcactgaaagagggcagatattgggtccttgtaacttcaactgactcttccaaattgtatgaatttatcaatgtattacacaaatccagtttcagaatgataaaaaatgttagaccaaataatgcggctaattaacagtcgtatgatttctagcccatgggtttaaaactgtatcttaaagagtcattttaaaataatataaatattaaaaaatgtaactgctatcttaatgttctgaaataaaacattttaaaatataaatcctgtagtttaaaaggaagaaatggtgggaaggaaaagtagagaaagaaatgccaattacaggccaaagcgttatttgccaagttttcttagaatgaattttaccaatgtatgagttcttgttaacagaatgtgtaacggaaatactgaaagacttttgcttaaagtggcattattgactgctgatgtgatgctactgtaatgcaataaatttttaaattgttgcaaa

SEQ ID NO: 313654 - DNA, 4216 bp, Homo sapiens
cccggtgacgtggcttgataggttcagggtatcatcagggactcattggaggttgcatatctttctaaggaggatctggaggtaggaggctctgggcggaggtgcagtgaccccgcaggccagccctccaacctcctcccgcagcggggactgggtgcccctctgccagctgagacagcccacacacaacccagccctaatgatcgttctctctacctctcccccaagtcctcctccgcctcctcctctctgcatgcgcgtcagagcccgtgccaagaacaagcagcagtcctgaactcgaggtccataaaaatcagtcgactgaatgacaccatcaaatctttgaaacaacagaagaaacaagtggaacatcagctggaagaagaaaagaaagcaaacaatgagaaacagaaagctgaaagggagctagagggtcaaatccagagattgaacacagagaaaaagaaactaaatacggacctgtatcacatgaaacattctctcagatactttgaagaagagtccaaggatctggccggccgcctgcaacgttcatcgcagcgtataggagagttagagtggtctctctgtgctgtcgccgccacacagaagaagaagccggatgggttctcgagccgcagtaaagcacttctcaagcggcagttagagcagtccatacgggagcagatactgctgaaaggacacgtgacacagttgaaggagtcgcttaaagaagtccagctggagagagatcaatatgctgaacaaataaaaggagagagggcccagtggcagcagaggatgaggaaaatgtcgcaggaggtttgcacattgaaggaggagaagaagcatgatacgcatcgggtagaggagctggagaggagcttgtccagactcaaaaaccagatggctgagccactgcccccggatgccccagcagtgtcctctgaggtggagctgcaagacctgaggaaggagctggagagagtggcaggagagctccaggctcaggtggaaaacaatcagtgcatcagtctcctgaaccgtgggcaaaaggagaggcttcgcgagcaggaggagaggcttcaggagcagcaggagaggcttcgggaacgggagaagaggcttcagcagctggccgagccacagagcgacttggaggagctgaagcacgagaacaagagcgcactgcagttggagcagcaagtaaaggagctgcaggagaagctgggccaggtgatggagacgctcacctcggccgagaaggagccagaggcagcagtcccagcctcagggactgggggcgagtctagcggccttatggacctcctggaggagaaggcggacctgagggagcatgtggagaaactggaacttggattcatccagtaccggagagagagatgccatcagaacgtacatcgccttctaacagagccaggggacagtgccaaagatgcgtcaccgggaggaggccatcatcaggctggcccaggacaaggaggagaggaaggtgaagctgctggagctgcaggagatggtgttgcggcttgtggcagctacaacgaggggcacggcaaattcctggccgctgcccagaaccctgctgctgaacccagtccaggaggccccagccccccaggagctcggggctgccgacaagcatggtgatctttgtgaggcgagcctcaccaacagcgtggagcctgcacaaggagaagccagggagggttcttcccaggacaaccctactgcacagccaatcgtgcagctccttggtgagatgcaggaccaccaggagcacccaggcttgggcagcaactgctgtgtgccatgcttttgctgggcttggctgccgagaagaaggagataaacaccaccatcatcaaagagctgctcaagaaatttttaaaaacgaaacaaagttatggggttaatctcctacacaattcatttacttcatttgaatgttagagctactcatgattatttgtgtttctaatttatagtttaagtttatttgtaaaaagttaaaagagagtgggtctctgtggctctcactgatgttcactctggcatccttcagcatttttcttttttcatttcataattgtaggtcattagcatgcatatcgagtttgcccttacgtggtgggagttcaaacacacaaagacccactctttgcacaaaactgttctcgctggtttggaataggctcccgtgcttttctaatgttattgcagcatggatgtccattacagaattcagataaaatttgctaatgttctgctatgatgtttgatctcatcttaatcacagtgagctcttctatagctcaatatgcggtttgccctcaagtgtgcactgtttattactttgtaatatgccactgtgagtactgacatttagagctgtttaaaggccgagaactggaaacagcctttcctccattttctgtgtattggtgatgggagtgataaccttttgggggagctttctaaatctcacagaagaggaaagtggcctgctctggcaggtatgtgcaggatacagtgtgtttcatctgttccggtgccaagaatgagcagtgtactgtggcagttccctttggatttgtatgtgctctgggctcatgaagatattgcatcgtgagctgcagcagttgcactctttttcaatgacctaaaaagggcttatttccgaggaatgaaaggctgccatcattggctgtgggtgtgaaaaacctttcctagcttagagcatttgtatctacaatacattttaaagtcagagttcgtgttccctgttttaatcacatgactacctgtcccagtacacgaaagggcgctggttggcattcttcttaatgtatttagtgaagatcataagaaatcctttaagagtttaaatgtctctgaaacaggcatacaggctctagtcaagaatgaattagagtgaaggaaagctgtgtgacacctggcattcctctctgttcatggagcttctttgaggcttgaagtttgattttactatctagacctctctggctaatacctattcttcaaccacctcggttactctgacataggaatttacttcttttccttgagtggaaaacactttagaaagtaataacaaacattattataaactaatatatgtgagagtacttagttgaaacaaaaaggaattttagtagacagtattatattatctttgaaaatcaaggagaagtttatgcaacttaaaatgtttacacactgtggtgcaatctactgtttgtgaatgtctgtattatcaggaaacatgtctatacgatcgcagagttgtatttcctcacaaacttctttacgaagagtgaaatacgtttttgtacctctcattttcagtcagggacatactttgtgcaatatttctgtgattgtgcctatgcatgatgaatgaatgcatttcaatcatacattgcctaaatcataacttgatgatgcttgggaaagaatcaacagttaaaacttcatgaagttctaatgtctgtgttccaaaacacatcacattattaggttgtagggagatatgtaggtgtgctccctggggtggggagttttctagttactagaccatctccatttttagcacttggcagcctcatgatccttttataaatgtgagattaacaggagagcagcaatacgattttgccaatggaataacagatttgccggcattcactgaaagagggcagatattgggtccttgtaacttcaactgactcttccaaattgtatgaatttatcaatgtattacacaaatccagtttcagaatgataaaaaatgttagaccaaataatgcggctaattaacagtcgtatgatttctagcccatgggtttaaaactgtatcttaaagagtcattttaaaataatataaatattaaaaaatgtaactgctatcttaatgttctgaaataaaacattttaaaatataaatcctgtagtttaaaaggaagaaatggtgggaaggaaaagtagagaaagaaatgccaattacaggccaaagcgttatttgccaagttttcttagaatgaattttaccaatgtatgagttcttgttaacagaatgtgtaacggaaatactgaaagacttttgcttaaagtggcattattgactgctgatgtgatgctactgtaatgcaataaatttttaaattgttgcaaa

SEQ ID NO: 313655 - DNA, 4601 bp, Homo sapiens
tgcttgagctctttgggcctctgttttcacgtctgtatgatagaggtggtattgtttgacttgtatttgtgaagtttcaatgagattgataattgtcgattttatgttaatccctagtacatggcctgctgtcaacacccaggacacccaggatatggtctttgctgtttgattttcctcatccccagtctcaaggggaagccaggacaatgagaacagccacttcccatcaggagtcactgcaaggcccccagggtgggatggtggggagataagaaccgtgagagaagttggcacaaaggagttatgggacaaagggtccaagataggcagaaaagaaaatgttgccagttgatggggaagaaaggaagtcggagggctcagacactgagggggacagaacatctccatgtgcagtctcatctcttatagtcagcaacaggtatccacggggagggccctacatcatctgctaccctgaaggatctggaggtaggaggctctgggcggaggtgcagtgaccccgcaggccagccctccaacctcctcccgcagcggggactgggtgcccctctgccagctgagacagcccacacacaacccagccctaatgatcgttctctctacctctcccccaagtcctcctccgcctcctcctctctgcatgcgcgtcagagcccgtgccaagaacaagcagcagtcctgaactcgaggtccataaaaatcagtcgactgaatgacaccatcaaatctttgaaacaacagaagaaacaagtggaacatcagctggaagaagaaaagaaagcaaacaatgagaaacagaaagctgaaagggagctagagggtcaaatccagagattgaacacagagaaaaagaaactaaatacggacctgtatcacatgaaacattctctcagatactttgaagaagagtccaaggatctggccggccgcctgcaacgttcatcgcagcgtataggagagttagagtggtctctctgtgctgtcgccgccacacagaagaagaagccggatgggttctcgagccgcagtaaagcacttctcaagcggcagttagagcagtccatacgggagcagatactgctgaaaggacacgtgacacagttgaaggagtcgcttaaagaagtccagctggagagagatcaatatgctgaacaaataaaaggagagagggcccagtggcagcagaggatgaggaaaatgtcgcaggaggtttgcacattgaaggaggagaagaagcatgatacgcatcgggtagaggagctggagaggagcttgtccagactcaaaaaccagatggctgagccactgcccccggatgccccagcagtgtcctctgaggtggagctgcaagacctgaggaaggagctggagagagtggcaggagagctccaggctcaggtggaaaacaatcagtgcatcagtctcctgaaccgtgggcaaaaggagaggcttcgcgagcaggaggagaggcttcaggagcagcaggagaggcttcgggaacgggagaagaggcttcagcagctggccgagccacagagcgacttggaggagctgaagcacgagaacaagagcgcactgcagttggagcagcaagtaaaggagctgcaggagaagctgggccaggtgatggagacgctcacctcggccgagaaggagccagaggcagcagtcccagcctcagggactgggggcgagtctagcggccttatggacctcctggaggagaaggcggacctgagggagcatgtggagaaactggaacttggattcatccagtaccggagagagagatgccatcagaacgtacatcgccttctaacagagccaggggacagtgccaaagatgcgtcaccgggaggaggccatcatcaggctggcccaggacaaggaggagaggaaggtgaagctgctggagctgcaggagatggtgttgcggcttgtggcagctacaacgaggggcacggcaaattcctggccgctgcccagaaccctgctgctgaacccagtccaggaggccccagccccccaggagctcggggctgccgacaagcatggtgatctttgtgaggcgagcctcaccaacagcgtggagcctgcacaaggagaagccagggagggttcttcccaggacaaccctactgcacagccaatcgtgcagctccttggtgagatgcaggaccaccaggagcacccaggcttgggcagcaactgctgtgtgccatgcttttgctgggcttggctgccgagaagaaggagataaacaccaccatcatcaaagagctgctcaagaaatttttaaaaacgaaacaaagttatggggttaatctcctacacaattcatttacttcatttgaatgttagagctactcatgattatttgtgtttctaatttatagtttaagtttatttgtaaaaagttaaaagagagtgggtctctgtggctctcactgatgttcactctggcatccttcagcatttttcttttttcatttcataattgtaggtcattagcatgcatatcgagtttgcccttacgtggtgggagttcaaacacacaaagacccactctttgcacaaaactgttctcgctggtttggaataggctcccgtgcttttctaatgttattgcagcatggatgtccattacagaattcagataaaatttgctaatgttctgctatgatgtttgatctcatcttaatcacagtgagctcttctatagctcaatatgcggtttgccctcaagtgtgcactgtttattactttgtaatatgccactgtgagtactgacatttagagctgtttaaaggccgagaactggaaacagcctttcctccattttctgtgtattggtgatgggagtgataaccttttgggggagctttctaaatctcacagaagaggaaagtggcctgctctggcaggtatgtgcaggatacagtgtgtttcatctgttccggtgccaagaatgagcagtgtactgtggcagttccctttggatttgtatgtgctctgggctcatgaagatattgcatcgtgagctgcagcagttgcactctttttcaatgacctaaaaagggcttatttccgaggaatgaaaggctgccatcattggctgtgggtgtgaaaaacctttcctagcttagagcatttgtatctacaatacattttaaagtcagagttcgtgttccctgttttaatcacatgactacctgtcccagtacacgaaagggcgctggttggcattcttcttaatgtatttagtgaagatcataagaaatcctttaagagtttaaatgtctctgaaacaggcatacaggctctagtcaagaatgaattagagtgaaggaaagctgtgtgacacctggcattcctctctgttcatggagcttctttgaggcttgaagtttgattttactatctagacctctctggctaatacctattcttcaaccacctcggttactctgacataggaatttacttcttttccttgagtggaaaacactttagaaagtaataacaaacattattataaactaatatatgtgagagtacttagttgaaacaaaaaggaattttagtagacagtattatattatctttgaaaatcaaggagaagtttatgcaacttaaaatgtttacacactgtggtgcaatctactgtttgtgaatgtctgtattatcaggaaacatgtctatacgatcgcagagttgtatttcctcacaaacttctttacgaagagtgaaatacgtttttgtacctctcattttcagtcagggacatactttgtgcaatatttctgtgattgtgcctatgcatgatgaatgaatgcatttcaatcatacattgcctaaatcataacttgatgatgcttgggaaagaatcaacagttaaaacttcatgaagttctaatgtctgtgttccaaaacacatcacattattaggttgtagggagggagttttctagttactagaccatctccatttttagcacttggcagcctcatgatccttttataaatgtgagattaacaggagagcagcaatacgattttgccaatggaataacagatttgccggcattcactgaaagagggcagatattgggtccttgtaacttcaactgactcttccaaattgtatgaatttatcaatgtattacacaaatccagtttcagaatgataaaaaatgttagaccaaataatgcggctaattaacagtcgtatgatttctagcccatgggtttaaaactgtatcttaaagagtcattttaaaataatataaatattaaaaaatgtaactgctatcttaatgttctgaaataaaacattttaaaatataaatcctgtagtttaaaaggaagaaatggtgggaaggaaaagtagagaaagaaatgccaattacaggccaaagcgttatttgccaagttttcttagaatgaattttaccaatgtatgagttcttgttaacagaatgtgtaacggaaatactgaaagacttttgcttaaagtggcattattgactgctgatgtgatgctactgtaatgcaataaatttttaaattgttgcaaa

SEQ ID NO: 313656 - DNA, 4396 bp, Homo sapiens
tgcttgagctctttgggcctctgttttcacgtctgtatgatagaggtggtattgtttgacttgtatttgtgaagtttcaatgagattgataattgtcgattttatgttaatccctagtacatggcctgctgtcaacacccaggacacccaggatatggtctttgctgtttgattttcctcatccccagtctcaaggggaagccaggacaatgagaacagccacttcccatcaggagtcactgcaaggcccccagggtgggatggtggggagataagaaccgtgagagaagttggcacaaaggagttatgggacaaagggtccaagataggcagaaaagaaaatgttgccagttgatggggaagaaaggaagtcggagggctcagacactgagggggacagaacatctccatgtgcagtctcatctcttatagtcagcaacaggtatccacggggagggccctacatcatctgctaccctgaaggatctggaggtaggaggctctgggcggaggtgcagtgaccccgcaggccagccctccaacctcctcccgcagcggggactgggtgcccctctgccagctgagacagcccacacacaacccagccctaatgatcgttctctctacctctcccccaagtcctcctccgcctcctcctctctgcatgcgcgtcagagcccgtgccaagaacaagcagcagtcctgaactcgaggtccataaaaatcagtcgactgaatgacaccatcaaatctttgaaacaacagaagaaacaagtggaacatcagctggaagaagaaaagaaagcaaacaatgagaaacagaaagctgaaagggagctagagggtcaaatccagagattgaacacagagaaaaagaaactaaatacggacctgtatcacatgaaacattctctcagatactttgaagaagagtccaaggatctggccggccgcctgcaacgttcatcgcagcgtataggagagttagagtggtctctctgtgctgtcgccgccacacagaagaagaagccggatgggttctcgagccgcagtaaagcacttctcaagcggcagttagagcagtccatacgggagcagatactgctgaaaggacacgtgacacagttgaaggagtcgcttaaagaagtccagctggagagagatcaatatgctgaacaaataaaaggagagagggcccagtggcagcagaggatgaggaaaatgtcgcaggaggtttgcacattgaaggaggagaagaagcatgatacgcatcgggtagaggagctggagaggagcttgtccagactcaaaaaccagatggctgagccactgcccccggatgccccagcagtgtcctctgaggtggagctgcaagacctgaggaaggagctggagagagtggcaggagagctccaggctcaggtggaaaacaatcagtgcatcagtctcctgaaccgtgggcaaaaggagaggcttcgcgagcaggaggagaggcttcaggagcagcaggagaggcttcgggaacgggagaagaggcttcagcagctggccgagccacagagcgacttggaggagctgaagcacgagaacaagagcgcactgcagttggagcagcaagtaaaggagctgcaggagaagctgggccaggtgatggagacgctcacctcggccgagaaggagccagaggcagcagtcccagcctcagggactgggggcgagtctagcggccttatggacctcctggaggagaaggcggacctgagggagcatgtggagaaactggaacttggattcatccagtaccggagagagagatgccatcagaacgtacatcgccttctaacagagccaggggacagtgccaaagatgcgtcaccgggaggaggccatcatcaggctggcccaggacaaggaggagaggaaggtgaagctgctggagctgcaggagatggtgttgcggcttgtggcagctacaacgaggggcacggcaaattcctggccgctgcccagaaccctgctgctgaacccagtccaggaggccccagccccccaggagctcggggctgccgacaagcatggtgatctttgtgaggcgagcctcaccaacagcgtggagcctgcacaaggagaagccagggagggttcttcccaggacaaccctactgcacagccaatcgtgcagctccttggtgagatgcaggaccaccaggagcacccaggcttgggcagcaactgctgtgtgccatgcttttgctgggcttggctgccgagaagaaggagataaacaccaccatcatcaaagagctgctcaagaaatttttaaaaacgaaacaaagttatggggttaatctcctacacaattcatttacttcatttgaatgttagagctactcatgattatttgtgtttctaatttatagtttaagtttatttgtaaaaagttaaaagagagtgggtctctgtggctctcactgatgttcactctggcatccttcagcatttttcttttttcatttcataattgtaggtcattagcatgcatatcgagtttgcccttacgtggtgggagttcaaacacacaaagacccactctttgcacaaaactgttctcgctggtttggaataggctcccgtgcttttctaatgttattgcagcatggatgtccattacagaattcagataaaatttgctaatgttctgctatgatgtttgatctcatcttaatcacagtgagctcttctatagctcaatatgcggtttgccctcaagtgtgcactgtttattactttgtaatatgccactgtgagtactgacatttagagctgtttaaaggccgagaactggaaacagcctttcctccattttctgtgtattggtgatgggagtgataaccttttgggggagctttctaaatctcacagaagaggaaagtggcctgctctggcaggtatgtgcaggatacagtgtgtttcatctgttccggtgccaagaatgagcagtgtactgtggcagttccctttggatttgtatgtgctctgggctcatgaagatattgcatcgtgagctgcagcagttgcactctttttcaatgacctaaaaagggcttatttccgaggaatgaaaggctgccatcattggctgtgggtgtgaaaaacctttcctagcttagagcatttgtatctacaatacattttaaagtcagagttcgtgttccctgttttaatcacatgactacctgtcccagtacacgaaagggcgctggttggcattcttcttaatgtatttagtgaagatcataagaaatcctttaagagtttaaatgtctctgaaacaggcatacaggctctagtcaagaatgaattagagtgaaggaaagctgtgtgacacctggcattcctctctgttcatggagcttctttgaggcttgaagtttgattttactatctagacctctctggctaatacctattcttcaaccacctcggttactctgacataggaatttacttcttttccttgagtggaaaacactttagaaagtaataacaaacattattataaactaatatatgtgagagtacttagttgaaacaaaaaggaattttagtagacagtattatattatctttgaaaatcaaggagaagtttatgcaacttaaaatgtttacacactgtggtgcaatctactgtttgtgaatgtctgtattatcaggaaacatgtctatacgatcgcagagttgtatttcctcacaaacttctttacgaagagtgaaatacgtttttgtacctctcattttcagtcagggacatactttgtgcaatatttctgtgattgtgcctatgcatgatgaatgaatgcatttcaatcatacattgcctaaatcataacttgatgatgcttgggaaagaatcaacagttaaaacttcatgaagttctaatgtctgtgttccaaaacacatcacattattaggttgtagggagatatgtaggtgtgctccctggggtggggagttttctagttactagaccatctccatttttagcacttggcagcctcatgatccttttataaatgtgagattaacaggagagcagcaatacgattttgccaatggaataacagatttgccggcattcactgaaagagggcagatattgggtccttgtaacttcaactgactcttccaaattgtatgaatttatcaatgtattacacaaatccagtttcagaatgataaaaaatgttagaccaaataatgcggctaattaacagtcgtatgatttctagcccatgggtttaaaactgtatcttaaagagtcattttaaaataatataaatattaaaaaatgtaactgctatcttaatgttctgaaataaaacattttaaaatata

SEQ ID NO: 313657 - DNA, 610 bp, Homo sapiens
gacagaatttacgcacccttggcttccttggagcctagcggctctccccgcgtccaagatggcggcagaagcagctggtgggaaatacagaagcacagtcagcaaaagcaaagacccctcggggctgctcatctctgtgatcagcagcactcactgagaaaggcgtcttgtttcctggactttggggtgtaaggccttggagtccggagattcctgtcacgagttgcagatttgtgttttcacactctggatactttcaaccacctgtgcgtggccacagccacaaatacaagaatctgcagtgagctggtaggaggactgggtttgaaggcacacatcggttttcaattttttgccctgcctccgcattctggtccattccttaaaaaacagaaccaaaccaatttcaaattatcctccatgcactgcccctctgcacctcccagaagattagggtgggggtggagtgggagcggtggatcttttaggagcttttttttaaaaaagcgaaatatattgaggatgggggaaccctttcaagaatcttggatatgatgcaggtactgactaaaaccaatctaaataaaatttattatggcacgttaaatac

SEQ ID NO: 313658 - DNA, 4258 bp, Homo sapiens
aagatttttagcagcatttcgtttggtgcgcgatgccagtaggtaagtgagcatggtacatacctagtttcctgatgagcatcctgcgtcagttgacctatcggcgttgtgattctcatcctagattaataaaagagctcctggcgtgcatagctgagcgagtgcttgaaacaacatcgcacagatgtgagtttcgtggatcggtcatttactagagactctactcaaaaagggtggtaccaggcagacgtgtcaggagaatcaaagattgtagccacccagctaactgcaagaattgacgacagccattcgcacataccagagcatcacagagcgcatcactaactcccgaaataaaataaagcaggtaaaagagaacctgctttcatgcaagatgctgctgcactgcaaacgggatgagcttcggaaactgtggattgaaggaattgagcataagcatgtcctgaacttgttggatgaaattgagaatatcaagcaagtgcctcaaaagctggaacagtgcatggccagcaagcactatctcagtgccactgacatgttggtgtcagcagttgagtctttggagggccccctgctccaggtggaaggactgagtgaccttcgactagagcttcacagcaagaagatgaaccttcacttggttctcatagatgaactacaccggcacctgtacatcaaatcgactagccgagttgtgcagcgtaacaaggaaaaagggaaaatcagctccctcgtgaaagatgcttctgttcctctgattgatgttacaaacctccctactcctcgaaaattccttgatacctctcactattctactgctggaagctcaagtgtgagggagataaatctgcaggacatcaaggaagatttagaattggatccagaggaaaacagcaccctgtttatgggtatcctcattaagggcttggcgaaactgaagaagatcccagaaacagttaaggcaatcatagagcgcttggagcaggagttgaagcaaattgtgaagaggtctacaacccaggtggcagacagtggctatcagcggggggagaacgttactgtggagaaccaaccaaggttgcttctagaactgctggagttactgtttgacaagtttaatgctgtagccgctgcacactctgtggtcctgggatacctgcaggacactgtagtgactccactgactcagcaggaagatatcaaactgtatgatatggcagatgtatgggtgaagatccaagatgttctacagatgctattaactgagtacttggatatgaaaaatactcgtacggcctctgaaccatcagctcaactaagctatgccagcactggacgagagtttgcagccttttttgccaagaagaaacctcaaaggccaaaaaattctcttttcaagttcgaatcgtcctcccatgccatcagtatgagcgcctatctgcgagaacagagaagggagctctatagtcggagtggagaactgcaagggggtcctgatgacaacttaattgaaggtggaggaacaaaatttgtctgcaaacctggagccagaaacattaccgtcatattccacccattactaagatttattcaggagattgagcatgctctgggtcttggcccagccaaacagtgtcctcttcgagagtttctcaccgtgtacatcaaaaacatctttctcaatcaagtcttggctgagatcaacaaggagattgaaggagtcactaaaacatctgaccctttgaagattctggccaacgcagacaccatgaaggtgctgggagtgcagcggcctctcctacagagcacaatcattgtggagaagacagttcaagacctcctgaacctgatgcatgacttgagtgcatattcagatcaattcctcaacatggtgtgcgtgaagctccaggagtacaaggacacctgcactgcagcttacaggggtattgtccagtcagaagaaaaacttgtcatcagtgcatcctgggcaaaagatgatgatatcagcagactcttgaaatctctaccaaactggatgaatatggctcaacccaaacagctgaggccaaaaagagaggaggaagaagatttcataagggcagcttttggcaaggagtctgaagttcttattgggaacctgggtgataaattaatccctccacaagacatccttcgtgacgtcagtgacctcaaagccttggccaacatgcatgaaagcctggaatggttggcaagtcgaacaaagtcagctttctccaatctttctacatcccagatgctttctcctgctcaagacagccacacgaacacggatctccccccagtgtcagagcagatcatgcagactctcagtgaacttgccaaatcgttccaggatatggctgaccgctgcttgcttgtcttacatctggaagtgagggttcactgtttccactatcttatccctcttgcaaaggaggggaactatgccattgtggctaatgtggaaagtatggattatgaccccctggtggtcaagctcaacaaagatatcagcgccattgaagaggccatgagcgccagccttcagcagcacaagttccagtatatcttcgaaggcctgggccacctgatctcctgcatcctcattaatggtgcccagtacttcaggcgcatcagtgagtctggcatcaagaaaatgtgtaggaacatttttgttcttcagcagaatttgaccaacatcaccatgtcgcgggaggcagacctggactttgcaaggcagtactacgagatgctttacaacacagctgacgagctcctgaacctggtggtggaccagggtgtgaagtacacggagctggagtacatccacgctctgaccctgctgcaccgcagccaaactggggtgggggaactgaccacccagaacacgaggctgcagaggctcaaagagatcatctgcgagcaggctgccatcaagcaagccaccaaggacaagaagataactaccgtttagcagggcgtactgcggttggtgacgggggtcccctcagtcacactcacttttttccttggtatgttattgagtatattctgagcttagttttctctacagtgatactttagtggagaggaggtgtaaggattctttctctctggttttggcttttcatataaatgctaaaggaaggcgacagtacagagtgttttggttgaacaactactttaatgcagtcaaatctaacgggactagggtgggatagggaggaaggtggtatcaaattgttggactctgaaaaacaagtggatggattactaatatttgatttattactcaatatatatataattccagccttggaaagtaggaaagtaggctgctacctaacttttagtcccttccaaaaccatttagtagggttctattacataaacagtagggtttttcctctcctgaccttatccgtttacagttcaatgaaataagtgtatgtgcattgctgtctgtctctattgccaaaatcaaataaatggcttctcagctgctgtttacaacaaacttccctaaccaaaacagaacctctaatttagggctaggaatagaagtcttttgatcccagtccgtgggacagttttgtatgctgtatcttgtacacaggttgtaggttggtttattgccattttgttttatttctgctatataaaaaccaagagccagacaattagacaactatggaggaatgaaaggcaattcaaacatctgcttgattcccgccccgccacccctaatttctgagagaataatggttagagaacattgcatctcacttgaaacatcctttgggggtaaatgattcttaggtgctcacttggtctgagctcagctgaatgcagggaagatgggacagagtgacatttctcctctgtgcggcctccagctgagcctgtctctgaattgttccctcccccgcaatgtgggcacttaccatgttcctggcacactggacctcaccatgtcccccggtcaccagtcctcttgctgcccatggttcataggtcatagaaggcagcaatgcactgactgggccacatcttgaaaactcgtggaaagggaaaggggaggagatgggactttgaccacacacagtgatgcctcacaccctgaaggtgggggattttgtacctgtttgtacaactttggtcttgatgggaaaaatggagaattaaaaagtgttttgagaagcttaaaaaaaacatg

SEQ ID NO: 313659 - DNA, 2579 bp, Homo sapiens
gctaggtagaggcggggtgaatcggacgagtcttggctgagatcaacaaggagattgaaggagtcactaaaacatctgaccctttgaagattctggccaacgcagacaccatgaaggtgctgggagtgcagcggcctctcctacagagcacaatcattgtggagaagacagttcaagacctcctgaacctgatgcatgacttgagtgcatattcagatcaattcctcaacatggtgtgcgtgaagctccaggagtacaaggacacctgcactgcagcttacaggggtattgtccagtcagaagaaaaacttgtcatcagtgcatcctgggcaaaagatgatgatatcagcagactcttgaaatctctaccaaactggatgaatatggctcaacccaaacagctgaggccaaaaagagaggaggaagaagatttcataagggcagcttttggcaaggagtctgaagttcttattgggaacctgggtgataaattaatccctccacaagacatccttcgtgacgtcagtgacctcaaagccttggccaacatgcatgaaagcctggaatggttggcaagtcgaacaaagtcagctttctccaatctttctacatcccagatgctttctcctgctcaagacagccacacgaacacggatctccccccagtgtcagagcagatcatgcagactctcagtgaacttgccaaatcgttccaggatatggctgaccgctgcttgcttgtcttacatctggaagtgagggttcactgtttccactatcttatccctcttgcaaaggaggggaactatgccattgtggctaatgtggaaagtatggattatgaccccctggtggtcaagctcaacaaagatatcagcgccattgaagaggccatgagcgccagccttcagcagcacaagttccagtatatcttcgaaggcctgggccacctgatctcctgcatcctcattaatggtgcccagtacttcaggcgcatcagtgagtctggcatcaagaaaatgtgtaggaacatttttgttcttcagcagaatttgaccaacatcaccatgtcgcgggaggcagacctggactttgcaaggcagtactacgagatgctttacaacacagctgacgagctcctgaacctggtggtggaccagggtgtgaagtacacggagctggagtacatccacgctctgaccctgctgcaccgcagccaaactggggtgggggaactgaccacccagaacacgaggctgcagaggctcaaagagatcatctgcgagcaggctgccatcaagcaagccaccaaggacaagaagataactaccgtttagcagggcgtactgcggttggtgacgggggtcccctcagtcacactcacttttttccttggtatgttattgagtatattctgagcttagttttctctacagtgatactttagtggagaggaggtgtaaggattctttctctctggttttggcttttcatataaatgctaaaggaaggcgacagtacagagtgttttggttgaacaactactttaatgcagtcaaatctaacgggactagggtgggatagggaggaaggtggtatcaaattgttggactctgaaaaacaagtggatggattactaatatttgatttattactcaatatatatataattccagccttggaaagtaggaaagtaggctgctacctaacttttagtcccttccaaaaccatttagtagggttctattacataaacagtagggtttttcctctcctgaccttatccgtttacagttcaatgaaataagtgtatgtgcattgctgtctgtctctattgccaaaatcaaataaatggcttctcagctgctgtttacaacaaacttccctaaccaaaacagaacctctaatttagggctaggaatagaagtcttttgatcccagtccgtgggacagttttgtatgctgtatcttgtacacaggttgtaggttggtttattgccattttgttttatttctgctatataaaaaccaagagccagacaattagacaactatggaggaatgaaaggcaattcaaacatctgcttgattcccgccccgccacccctaatttctgagagaataatggttagagaacattgcatctcacttgaaacatcctttgggggtaaatgattcttaggtgctcacttggtctgagctcagctgaatgcagggaagatgggacagagtgacatttctcctctgtgcggcctccagctgagcctgtctctgaattgttccctcccccgcaatgtgggcacttaccatgttcctggcacactggacctcaccatgtcccccggtcaccagtcctcttgctgcccatggttcataggtcatagaaggcagcaatgcactgactgggccacatcttgaaaactcgtggaaagggaaaggggaggagatgggactttgaccacacacagtgatgcctcacaccctgaaggtgggggattttgtacctgtttgtacaactttggtcttgatgggaaaaatggagaattaaaaagtgttttgagaagcttaaaaaaaacatg

SEQ ID NO: 313660 - DNA, 2377 bp, Homo sapiens
aggtcagagaacacgaggcttgccaccatcttggaagcggccagccaccatcttgggagctctgggagcaaggaccccctggggtattgtccagtcagaagaaaaacttgtcatcagtgcatcctgggcaaaagatgatgatatcagcagactcttgaaatctctaccaaactggatgaatatggctcaacccaaacagctgaggccaaaaagagaggaggaagaagatttcataagggcagcttttggcaaggagtctgaagttcttattgggaacctgggtgataaattaatccctccacaagacatccttcgtgacgtcagtgacctcaaagccttggccaacatgcatgaaagcctggaatggttggcaagtcgaacaaagtcagctttctccaatctttctacatcccagatgctttctcctgctcaagacagccacacgaacacggatctccccccagtgtcagagcagatcatgcagactctcagtgaacttgccaaatcgttccaggatatggctgaccgctgcttgcttgtcttacatctggaagtgagggttcactgtttccactatcttatccctcttgcaaaggaggggaactatgccattgtggctaatgtggaaagtatggattatgaccccctggtggtcaagctcaacaaagatatcagcgccattgaagaggccatgagcgccagccttcagcagcacaagttccagtatatcttcgaaggcctgggccacctgatctcctgcatcctcattaatggtgcccagtacttcaggcgcatcagtgagtctggcatcaagaaaatgtgtaggaacatttttgttcttcagcagaatttgaccaacatcaccatgtcgcgggaggcagacctggactttgcaaggcagtactacgagatgctttacaacacagctgacgagctcctgaacctggtggtggaccagggtgtgaagtacacggagctggagtacatccacgctctgaccctgctgcaccgcagccaaactggggtgggggaactgaccacccagaacacgaggctgcagaggctcaaagagatcatctgcgagcaggctgccatcaagcaagccaccaaggacaagaagataactaccgtttagcagggcgtactgcggttggtgacgggggtcccctcagtcacactcacttttttccttggtatgttattgagtatattctgagcttagttttctctacagtgatactttagtggagaggaggtgtaaggattctttctctctggttttggcttttcatataaatgctaaaggaaggcgacagtacagagtgttttggttgaacaactactttaatgcagtcaaatctaacgggactagggtgggatagggaggaaggtggtatcaaattgttggactctgaaaaacaagtggatggattactaatatttgatttattactcaatatatatataattccagccttggaaagtaggaaagtaggctgctacctaacttttagtcccttccaaaaccatttagtagggttctattacataaacagtagggtttttcctctcctgaccttatccgtttacagttcaatgaaataagtgtatgtgcattgctgtctgtctctattgccaaaatcaaataaatggcttctcagctgctgtttacaacaaacttccctaaccaaaacagaacctctaatttagggctaggaatagaagtcttttgatcccagtccgtgggacagttttgtatgctgtatcttgtacacaggttgtaggttggtttattgccattttgttttatttctgctatataaaaaccaagagccagacaattagacaactatggaggaatgaaaggcaattcaaacatctgcttgattcccgccccgccacccctaatttctgagagaataatggttagagaacattgcatctcacttgaaacatcctttgggggtaaatgattcttaggtgctcacttggtctgagctcagctgaatgcagggaagatgggacagagtgacatttctcctctgtgcggcctccagctgagcctgtctctgaattgttccctcccccgcaatgtgggcacttaccatgttcctggcacactggacctcaccatgtcccccggtcaccagtcctcttgctgcccatggttcataggtcatagaaggcagcaatgcactgactgggccacatcttgaaaactcgtggaaagggaaaggggaggagatgggactttgaccacacacagtgatgcctcacaccctgaaggtgggggattttgtacctgtttgtacaactttggtcttgatgggaaaaatggagaattaaaaagtgttttgagaagcttaaaaaaaacatg

SEQ ID NO: 313661 - DNA, 3970 bp, Homo sapiens
gacagaatttacgcacccttggcttccttggagcctagcggctctccccgcgtccaagatggcggcagaagcagctggtgggaaatacagaagcacagtcagcaaaagcaaagacccctcggggctgctcatctctgtgatcaggactctgtctactagtgacgatgtcgaagacagggaaaatgaaaagggtcgccttgaagaagcctacgagaaatgtgaccgtgacctggatgaattgattgtacagcactacacagaattgacgacagccattcgcacataccagagcatcacagagcgcatcactaactcccgaaataaaataaagcaggtaaaagagaacctgctttcatgcaagatgctgctgcactgcaaacgggatgagcttcggaaactgtggattgaaggaattgagcataagcatgtcctgaacttgttggatgaaattgagaatatcaagcaagtgcctcaaaagctggaacagtgcatggccagcaagcactatctcagtgccactgacatgttggtgtcagcagttgagtctttggagggccccctgctccaggtggaaggactgagtgaccttcgactagagcttcacagcaagaagatgaaccttcacttggttctcatagatgaactacaccggcacctgtacatcaaatcgactagccgagttgtgcagcgtaacaaggaaaaagggaaaatcagctccctcgtgaaagatgcttctgttcctctgattgatgttacaaacctccctactcctcgaaaattccttgatacctctcactattctactgctggaagctcaagtgtgagggagataaatctgcaggacatcaaggaagatttagaattggatccagaggaaaacagcaccctgtttatgggtatcctcattaagggcttggcgaaactgaagaagatcccagaaacagttaaggcaatcatagagcgcttggagcaggagttgaagcaaattgtgaagaggtctacaacccaggtggcagacagtggctatcagcggggggagaacgttactgtggagaaccaaccaaggttgcttctagaactgctggagttactgtttgacaagtttaatgctgtagccgctgcacactctgtggtcctgggatacctgcaggacactgtagtgactccactgactcagcaggaagatatcaaactgtatgatatggcagatgtatgggtgaagatccaagatgttctacagatgctattaactgagtacttggatatgaaaaatactcgtacggcctctgaaccatcagctcaactaagctatgccagcactggacgagagtttgcagccttttttgccaagaagaaacctcaaaggccaaaaaattctcttttcaagttcgaatcgtcctcccatgccatcagtatgagcgcctatctgcgagaacagagaagggagctctatagtcggagtggagaactgcaagggggtcctgatgacaacttaattgaaggtggaggaacaaaatttgtctgcaaacctggagccagaaacattaccgtcatattccacccattactaagatttattcaggagattgagcatgctctgggtcttggcccagccaaacagtgtcctcttcgagagtttctcaccgtgtacatcaaaaacatctttctcaatcaagtcttggctgagatcaacaaggagattgaaggagtcactaaaacatctgaccctttgaagattctggccaacgcagacaccatgaaggtgctgggagtgcagcggcctctcctacagagcacaatcattgtggagaagacagttcaagacctcctgaacctgatgcatgacttgagtgcatattcagatcaattcctcaacatggtgtgcgtgaagctccaggagtacaaggacacctgcactgcagcttacaggggtattgtccagtcagaagaaaaacttgtcatcagtgcatcctgggcaaaagatgatgatatcagcagactcttgaaatctctaccaaactggatgaatatggctcaacccaaacagctgaggccaaaaagagaggaggaagaagatttcataagggcagcttttggcaaggagtctgaagttcttattgggaacctgggtgataaattaatccctccacaagacatccttcgtgacgtcagtgacctcaaagccttggccaacatgcatgaaagcctggaatggttggcaagtcgaacaaagtcagctttctccaatctttctacatcccagatgctttctcctgctcaagacagccacacgaacacggatctccccccagtgtcagagcagatcatgcagactctcagtgaacttgccaaatcgttccaggatatggctgaccgctgcttgcttgtcttacatctggaagtgagggttcactgtttccactatcttatccctcttgcaaaggaggggaactatgccattgtggctaatgtggaaagtatggattatgaccccctggtggtcaagctcaacaaagatatcagcgccattgaagaggccatgagcgccagccttcagcagcacaagttccagtatatcttcgaaggcctgggccacctgatctcctgcatcctcattaatggtgcccagtacttcaggcgcatcagtgagtctggcatcaagaaaatgtgtaggaacatttttgttcttcagcagaatttgaccaacatcaccatgtcgcgggaggcagacctggactttgcaaggcagtactacgagatgctttacaacacagctgacgagctcctgaacctggtggtggaccagggtgtgaagtacacggagctggagtacatccacgctctgaccctgctgcaccgcagccaaactggggtgggggaactgaccacccagaacacgaggctgcagaggctcaaagagatcatctgcgagcaggctgccatcaagcaagccaccaaggacaagaagataactaccgtttagcagggcgtactgcggttggtgacgggggtcccctcagtcacactcacttttttccttggtatgttattgagtatattctgagcttagttttctctacagtgatactttagtggagaggaggtgtaaggattctttctctctggttttggcttttcatataaatgctaaaggaaggcgacagtacagagtgttttggttgaacaactactttaatgcagtcaaatctaacgggactagggtgggatagggaggaaggtggtatcaaattgttggactctgaaaaacaagtggatggattactaatatttgatttattactcaatatatatataattccagccttggaaagtaggaaagtaggctgctacctaacttttagtcccttccaaaaccatttagtagggttctattacataaacagtagggtttttcctctcctgaccttatccgtttacagttcaatgaaataagtgtatgtgcattgctgtctgtctctattgccaaaatcaaataaatggcttctcagctgctgtttacaacaaacttccctaaccaaaacagaacctctaatttagggctaggaatagaagtcttttgatcccagtccgtgggacagttttgtatgctgtatcttgtacacaggttgtaggttggtttattgccattttgttttatttctgctatataaaaaccaagagccagacaattagacaactatggaggaatgaaaggcaattcaaacatctgcttgattcccgccccgccacccctaatttctgagagaataatggttagagaacattgcatctcacttgaaacatcttgaaaactcgtggaaagggaaaggggaggagatgggactttgaccacacacagtgatgcctcacaccctgaaggtgggggattttgtacctgtttgtacaactttggtcttgatgggaaaaatggagaattaaaaagtgttttgagaagcttaaaaaaaacatg

SEQ ID NO: 313662 - DNA, 3526 bp, Homo sapiens
gacagaatttacgcacccttggcttccttggagcctagcggctctccccgcgtccaagatggcggcagaagcagctggtgggaaatacagaagcacagtcagcaaaagcaaagacccctcggggctgctcatctctgtgatcaggactctgtctactagtgacgatgtcgaagacagggaaaatgaaaagggtcgccttgaagaagcctacgagaaatgtgaccgtgacctggatgaattgattgtacagcactacacagaattgacgacagccattcgcacataccagagcatcacagagcgcatcactaactcccgaaataaaataaagcaggtaaaagagaacctgctttcatgcaagatgctgctgcactgcaaacgggatgagcttcggaaactgtggattgaaggaattgagcataagcatgtcctgaacttgttggatgaaattgagaatatcaagcaagtgcctcaaaagctggaacagtgcatggccagcaagcactatctcagtgccactgacatgttggtgtcagcagttgagtctttggagggccccctgctccaggtggaaggactgagtgaccttcgactagagcttcacagcaagaagatgaaccttcacttggttctcatagatgaactacaccggcacctgtacatcaaatcgactagccgagttgtgcagcgtaacaaggaaaaagggaaaatcagctccctcgtgaaagatgcttctgttcctctgattgatgttacaaacctccctactcctcgaaaattccttgatacctctcactattctactgctggaagctcaagtgtgagggagataaatctgcaggacatcaaggaagatttagaattggatccagaggaaaacagcaccctgtttatgggtatcctcattaagggcttggcgaaactgaagaagatcccagaaacagttaaggcaatcatagagcgcttggagcaggagttgaagcaaattgtgaagaggtctacaacccaggtggcagacagtggctatcagcggggggagaacgttactgtggagaaccaaccaaggttgcttctagaactgctggagttactgtttgacaagtttaatgctgtagccgctgcacactctgtggtcctgggatacctgcaggacactgtagtgactccactgactcagcaggaagatatcaaactgtatgatatggcagatgtatgggtgaagatccaagatgttctacagatgctattaactgagtacttggatatgaaaaatactcgtacggcctctgaaccatcagctcaactaagctatgccagcactggacgagagtttgcagccttttttgccaagaagaaacctcaaaggccaaaaaattctcttttcaagttcgaatcgtcctcccatgccatcagtatgagcgcctatctgcgagaacagagaagggagctctatagtcggagtggagaactgcaagggggtcctgatgacaacttaattgaaggtggaggaacaaaatttgtctgcaaacctggagccagaaacattaccgtcatattccacccattactaagatttattcaggagattgagcatgctctgggtcttggcccagccaaacagtgtcctcttcgagagtttctcaccgtgtacatcaaaaacatctttctcaatcaagtcttggctgagatcaacaaggagattgaaggagtcactaaaacatctgaccctttgaagattctggccaacgcagacaccatgaaggtgctgggagtgcagcggcctctcctacagagcacaatcattgtggagaagacagttcaagacctcctgaacctgatgcatgacttgagtgcatattcagatcaattcctcaacatggtgtgcgtgaagctccaggagtacaaggacacctgcactgcagcttacaggggtattgtccagtcagaagaaaaacttgtcatcagtgcatcctgggcaaaagatgatgatatcagcagactcttgaaatctctaccaaactggatgaatatggctcaacccaaacagctgaggccaaaaagagaggaggaagaagatttcataagggcagcttttggcaaggagtctgaagttcttattgggaacctgggtgataaattaatccctccacaagacatccttcgtgacgtcagtgacctcaaagccttggccaacatgcatgaaagcctggaatggttggcaagtcgaacaaagtcagctttctccaatctttctacatcccagatgctttctcctgctcaagacagccacacgaacacggatctccccccagtgtcagagcagatcatgcagactctcagtgaacttgccaaatcgttccaggatatggctgaccgctgcttgcttgtcttacatctggaagtgagggttcactgtttccactatcttatccctcttgcaaaggaggggaactatgccattgtggctaatgtggaaagtatggattatgaccccctggtggtcaagctcaacaaagatatcagcgccattgaagaggccatgagcgccagccttcagcagcacaagttccagtatatcttcgaaggcctgggccacctgatctcctgcatcctcattaatggtgcccagtacttcaggcgcatcagtgagtctggcatcaagaaaatgtgtaggaacatttttgttcttcagcagaatttgaccaacatcaccatgtcgcgggaggcagacctggactttgcaaggcagtactacgagatgctttacaacacagctgacgagctcctgaacctggtggtggaccagggtgtgaagtacacggagctggagtacatccacgctctgaccctgctgcaccgcagccaaactggggtgggggaactgaccacccagaacacgaggctgcagaggctcaaagagatcatctgcgagcaggctgccatcaagcaagccaccaaggacaagaagataactaccgtttagcagggcgtactgcggttggtgacgggggtcccctcagtcacactcacttttttccttgcaaatattccccagaagcctaatatgtgctccatgctaccacacacaagggcaaatggatagatgaagaggacacccttattatctaagagtgtgggaactggactggagccaaaaatcccaacagctcaaactcagggctgggtcagaatcaggcggagaacccggagtggtgacagtgatggcagcagagccagggtgagactgagagtgctcagactaattttcttggaagtagtggaaagctccgctaaaaaagaaacatgggtttggattgagcagaatgtcaagagccctgagaaccaaccaaaaaatggcagatgagctgtttcaggggcaacatttaggaaagtgaaatctctgctttgcttacaatgacgggactgaaaatggcaattctgcacaggaaagggactgtgggactcttccaagacatttaggacatccaagtttctttgaaggttggcacatcagtctttattcttc

SEQ ID NO: 313663 - DNA, 2553 bp, Homo sapiens
gacagaatttacgcacccttggcttccttggagcctagcggctctccccgcgtccaagatggcggcagaagcagctggtgggaaatacagaagcacagtcagcaaaagcaaagacccctcggggctgctcatctctgtgatcaggactctgtctactagtgacgatgtcgaagacagggaaaatgaaaagggtcgccttgaagaagcctacgagaaatgtgaccgtgacctggatgaattgattgtacagcactacacagaattgacgacagccattcgcacataccagagcatcacagagcgcatcactaactcccgaaataaaataaagcaggtaaaagagaacctgctttcatgcaagatgctgctgcactgcaaacgggatgagcttcggaaactgtggattgaaggaattgagcataagcatgtcctgaacttgttggatgaaattgagaatatcaagcaagtgcctcaaaagctggaacagtgcatggccagcaagcactatctcagtgccactgacatgttggtgtcagcagttgagtctttggagggccccctgctccaggtggaaggactgagtgaccttcgactagagcttcacagcaagaagatgaaccttcacttggttctcatagatgaactacaccggcacctgtacatcaaatcgactagccgagttgtgcagcgtaacaaggaaaaagggaaaatcagctccctcgtgaaagatgcttctgttcctctgattgatgttacaaacctccctactcctcgaaaattccttgatacctctcactattctactgctggaagctcaagtgtgagggagataaatctgcaggacatcaaggaagatttagaattggatccagaggaaaacagcaccctgtttatgggtatcctcattaagggcttggcgaaactgaagaagatcccagaaacagttaaggcaatcatagagcgcttggagcaggagttgaagcaaattgtgaagaggtctacaacccaggtggcagacagtggctatcagcggggggagaacgttactgtggagaaccaaccaaggttgcttctagaactgctggagttactgtttgacaagtttaatgctgtagccgctgcacactctgtggtcctgggatacctgcaggacactgtagtgactccactgactcagcaggaagatatcaaactgtatgatatggcagatgtatgggtgaagatccaagatgttctacagatgctattaactgagtacttggatatgaaaaatactcgtacggcctctgaaccatcagctcaactaagctatgccagcactggacgagagtttgcagccttttttgccaagaagaaacctcaaaggccaaaaaattctcttttcaagttcgaatcgtcctcccatgccatcagtatgagcgcctatctgcgagaacagagaagggagctctatagtcggagtggagaactgcaagggggtcctgatgacaacttaattgaaggtggaggaacaaaatttgtctgcaaacctggagccagaaacattaccgtcatattccacccattactaagatttattcaggagattgagcatgctctgggtcttggcccagccaaacagtgtcctcttcgagagtttctcaccgtgtacatcaaaaacatctttctcaatcaagtcttggctgagatcaacaaggagattgaaggagtcactaaaacatctgaccctttgaagattctggccaacgcagacaccatgaaggtgctgggagtgcagcggcctctcctacagagcacaatcattgtggagaagacagttcaagacctcctgaacctgatgcatgacttgagtgcatattcagatcaattcctcaacatggtgtgcgtgaagctccaggagtacaaggacacctgcactgcagcttacaggggtattgtccagtcagaagaaaaacttgtcatcagtgcatcctgggcaaaagatgatgatatcagcagactcttgaaatctctaccaaactggatgaatatggctcaacccaaacagctgaggccaaaaagagaggaggaagaagatttcataagggcagcttttggcaaggagtctgaagttcttattgggaacctgggtgataaattaatccctccacaagacatccttcgtgacgtcagtgacctcaaagccttggccaacatgcatgaaagcctggaatggttggcaagtcgaacaaagtcagctttctccaatctttctacatcccagatgctttctcctgctcaagacagccacacgaacacggatctccccccagtgtcagagcagatcatgcagactctcagtgaacttgccaaatcgttccaggatatggctgaccgctgcttgcttgtcttacatctggaagtgagggttcactgtttccactatcttatccctcttgcaaaggaggggaactatgccattgtggtaagtgaagttggtatgacccggtgtcagctcacaagattaggcatgagagcagacgcagctcagagacagtccgatattcaagcggc

SEQ ID NO: 313664 - DNA, 632 bp, Homo sapiens
cagtgagagaatgctgtatctggatacacaggtgtacggggggggcagtggccataggggagaactgctgctatataaaaaccaagagccagacaattagacaactatggaggaatgaaaggcaattcaaacatctgcttgattcccgccccgccacccctaatttctgagagaataatggttagagaacattgcatctcacttgaaacatcctttgggggtaaatgattcttaggtgctcacttggtctgagctcagctgaatgcagggaagatgggacagagtgacatttctcctctgtgcggcctccagctgagcctgtctctgaattgttccctcccccgcaatgtgggcacttaccatgttcctggcacactggacctcaccatgtcccccggtcaccagtcctcttgctgcccatggttcataggtcatagaaggcagcaatgcactgactgggccacatcttgaaaactcgtggaaagggaaaggggaggagatgggactttgaccacacacagtgatgcctcacaccctgaaggtgggggattttgtacctgtttgtacaactttggtcttgatgggaaaaatggagaattaaaaagtgttttgagaagcttaaaaaaaacatg

SEQ ID NO: 313665 - DNA, 2378 bp, Homo sapiens
  misc_feature (2356)..(2356): n is a, c, g, or t
  misc_feature (2362)..(2362): n is a, c, g, or t
  misc_feature (2375)..(2375): n is a, c, g, or t
  misc_feature (2378)..(2378): n is a, c, g, or t
gacagaatttacgcacccttggcttccttggagcctagcggctctccccgcgtccaagatggcggcagaagcagctggtgggaaatacagaagcacagtcagcaaaagcaaagacccctcggggctgctcatctctgtgatcaggactctgtctactagtgacgatgtcgaagacagggaaaatgaaaagggtcgccttgaagaagcctacgagaaatgtgaccgtgacctggatgaattgattgtacagcactacacagaattgacgacagccattcgcacataccagagcatcacagagcgcatcactaactcccgaaataaaataaagcaggtaaaagagaacctgctttcatgcaagatgctgctgcactgcaaacgggatgagcttcggaaactgtggattgaaggaattgagcataagcatgtcctgaacttgttggatgaaattgagaatatcaagcaagtgcctcaaaagctggaacagtgcatggccagcaagcactatctcagtgccactgacatgttggtgtcagcagttgagtctttggagggccccctgctccaggtggaaggactgagtgaccttcgactagagcttcacagcaagaagatgaaccttcacttggttctcatagatgaactacaccggcacctgtacatcaaatcgactagccgagttgtgcagcgtaacaaggaaaaagggaaaatcagctccctcgtgaaagatgcttctgttcctctgattgatgttacaaacctccctactcctcgaaaattccttgatacctctcactattctactgctggaagctcaagtgtgagggagataaatctgcaggacatcaaggaagatttagaattggatccagaggaaaacagcaccctgtttatgggtatcctcattaagggcttggcgaaactgaagaagatcccagaaacagttaaggcaatcatagagcgcttggagcaggagttgaagcaaattgtgaagaggtctacaacccaggtggcagacagtggctatcagcggggggagaacgttactgtggagaaccaaccaaggttgcttctagaactgctggagttactgtttgacaagtttaatgctgtagccgctgcacactctgtggtcctgggatacctgcaggacactgtagtgactccactgactcagcaggaagatatcaaactgtatgatatggcagatgtatgggtgaagatccaagatgttctacagatgctattaactgagtacttggatatgaaaaatactcgtacggcctctgaaccatcagctcaactaagctatgccagcactggacgagagtttgcagccttttttgccaagaagaaacctcaaaggccaaaaaattctcttttcaagttcgaatcgtcctcccatgccatcagtatgagcgcctatctgcgagaacagagaagggagctctatagtcggagtggagaactgcaagggggtcctgatgacaacttaattgaaggtggaggaacaaaatttgtctgcaaacctggagccagaaacattaccgtcatattccacccattactaagatttattcaggagattgagcatgctctgggtcttggcccagccaaacagtgtcctcttcgagagtttctcaccgtgtacatcaaaaacatctttctcaatcaagtcttggctgagatcaacaaggagattgaaggagtcactaaaacatctgaccctttgaagattctggccaacgcagacaccatgaaggtgctgggagtgcagcggcctctcctacagagcacaatcattgtggagaagacagttcaagacctcctgaacctgatgcatgacttgagtgcatattcagatcaattcctcaacatggtgtgcgtgaagctccaggagtacaaggacacctgcactgcagcttacaggggtattgtccagtcagaagaaaaacttgtcatcagtgcatcctgggcaaaagatgatgatatcagcagactcttgaaatctctaccaaactggatgaatatggctcaacccaaacagctgaggccaaaaagagaggaggaagaagatttcataagggcagcttttggcaaggagtctgaagttcttattgggaacctgggtgataaattaatccctccacaagacatccttcgtgacgtcagtgacctcaaagccttggccaacatgcatgaaagcctggaatggttggcaagtcgaacaaagtcagctttctccaatctttctacatcccagatgctttctcctgctcaagacagccacacgaacacggatctccccccagtgtcagagcagatcatgcagactctcagtgaacggggggatccnaaaaancgaaaacaggcancan

SEQ ID NO: 313666 - DNA, 1627 bp, Homo sapiens
gacagaatttacgcacccttggcttccttggagcctagcggctctccccgcgtccaagatggcggcagaagcagctggtgggaaatacagaagcacagtcagcaaaagcaaagacccctcggggctgctcatctctgtgatcaggactctgtctactagtgacgatgtcgaagacagggaaaatgaaaagggtcgccttgaagaagcctacgagaaatgtgaccgtgacctggatgaattgattgtacagcactacacagaattgacgacagccattcgcacataccagagcatcacagagcgcatcactaactcccgaaataaaataaagcaggtaaaagagaacctgctttcatgcaagatgctgctgcactgcaaacgggatgagcttcggaaactgtggattgaaggaattgagcataagcatgtcctgaacttgttggatgaaattgagaatatcaagcaagtgcctcaaaagctggaacagtgcatggccagcaagcactatctcagtgccactgacatgttggtgtcagcagttgagtctttggagggccccctgctccaggtggaaggactgagtgaccttcgactagagcttcacagcaagaagatgaaccttcacttggttctcatagatgaactacaccggcacctgtacatcaaatcgactagccgagttgtgcagcgtaacaaggaaaaagggaaaatcagctccctcgtgaaagatgcttctgttcctctgattgatgttacaaacctccctactcctcgaaaattccttgatacctctcactattctactgctggaagctcaagtgtgagggagataaatctgcaggacatcaaggaagatttagaattggatccagaggaaaacagcaccctgtttatgggtatcctcattaagggcttggcgaaactgaagaagatcccagaaacagttaaggcaatcatagagcgcttggagcaggagttgaagcaaattgtgaagaggtctacaacccaggtggcagacagtggctatcagcggggggagaacgttactgtggagaaccaaccaaggttgcttctagaactgctggagttactgtttgacaagtttaatgctgtagccgctgcacactctgtggtcctgggatacctgcaggacactgtagtgactccactgactcagcaggaagatatcaaactgtatgatatggcagatgtatgggtgaagatccaagatgttctacagatgctattaactgagtacttggatatgaaaaatactcgtacggcctctgaaccatcagctcaactaagctatgccagcactggacgagagtttgcagccttttttgccaagaagaaacctcaaaggccaaaaaattctcttttcaagttcgaatcgtcctcccatgccatcagtatgagcgcctatctgcgagaacagagaagggagctctatagtcggagtggagaactgcaagggtagcggcgaagaaatccaccagaaagacaatcaaagtaacattaaaaagctcaaattttacaaaagttaagttcctgccaacattttcaatttatcatacaattagaaatgtgactcagtctaacaacacccaagaggataaaaggatta

SEQ ID NO: 313667 - DNA, 1266 bp, Homo sapiens
gacagaatttacgcacccttggcttccttggagcctagcggctctccccgcgtccaagatggcggcagaagcagctggtgggaaatacagaagcacagtcagcaaaagcaaagacccctcggggctgctcatctctgtgatcaggactctgtctactagtgacgatgtcgaagacagggaaaatgaaaagggtcgccttgaagaagcctacgagaaatgtgaccgtgacctggatgaattgattgtacagcactacacagaattgacgacagccattcgcacataccagagcatcacagagcgcatcactaactcccgaaataaaataaagcaggtaaaagagaacctgctttcatgcaagatgctgctgcactgcaaacgggatgagcttcggaaactgtggattgaaggaattgagcataagcatgtcctgaacttgttggatgaaattgagaatatcaagcaagtgcctcaaaagctggaacagtgcatggccagcaagcactatctcagtgccactgacatgttggtgtcagcagttgagtctttggagggccccctgctccaggtggaaggactgagtgaccttcgactagagcttcacagcaagaagatgaaccttcacttggttctcatagatgaactacaccggcacctgtacatcaaatcgactagccgagttgtgcagcgtaacaaggaaaaagggaaaatcagctccctcgtgaaagatgcttctgttcctctgattgatgttacaaacctccctactcctcgaaaattccttgatacctctcactattctactgctggaagctcaagtgtgagggagataaatctgcaggacatcaaggaagatttagaattggatccagaggaaaacagcaccctgtttatgggtatcctcattaagggcttggcgaaactgaagaagatcccagaaacagttaaggcaatcatagagcgcttggagcaggagttgaagcaaattgtgaagaggtctacaacccaggtggcagacagtggctatcagcggggggagaacgttactgtggagaaccaaccaaggttgcttctagaactgctggagttactgtttgacaagtttaatgctgtagccgctgcacactctgtggtcctgggatacctgcaggacactgtagtgactccactgactcagcaggaagatatcaaactgtatgatatggcagatgtatgggtgaagatccaagatgttctacaggtaagagccttttacaaagggtgtca

SEQ ID NO: 313668 - DNA, 348 bp, Homo sapiens
tcgtaagctccctttgttagtatctttttaagacgtctttcttatttataatattgccaggttattaagttgtacttaattgtctttcatttttttctcttttcaggtgtcagcagttgagtctttggagggccccctgctccaggtggaaggactgagtgaccttcgactagagcttcacagcaagaagatgaaccttcacttggttctcatagatgaactacaccggcacctgtacatcaaatcgactagccgagttgtgcagcgtaacaaggaaaaagggaaaatcaggttaaagaggctctttgctataagtgtcttgtggcagtgtaggattggaaggaatat

SEQ ID NO: 313669 - DNA, 341 bp, Homo sapiens
agatcacagttgtaccagttgaaatgcagaataagcaaaagatccaaatacggttgtaaaggagccttagccaggaatatcgctcataaatcaaggtctgcggcagctggccctggccctgtcatggtatagccaaagtgtcttcatcacggaacatcggggagcaccacacagaccagagtagaataatgtggaatacagagctggtcagcacttaattggtttacacctgcttgtctgtttcccctgtgtttctctgcaggttcgaatcgtcctcccatgccatcagtatgagcgcctatctgcgagaacagagaagggagctctatagtcggagtgga

SEQ ID NO: 313670 - DNA, 4225 bp, Homo sapiens
gacagaatttacgcacccttggcttccttggagcctagcggctctccccgcgtccaagatggcggcagaagcagctggtgggaaatacagaagcacagtcagcaaaagcaaagacccctcggggctgctcatctctgtgatcaggactctgtctactagtgacgatgtcgaagacagggaaaatgaaaagggtcgccttgaagaagcctacgagaaatgtgaccgtgacctggatgaattgattgtacagcactacacagaattgacgacagccattcgcacataccagagcatcacagagcgcatcactaactcccgaaataaaataaagcaggtaaaagagaacctgctttcatgcaagatgctgctgcactgcaaacgggatgagcttcggaaactgtggattgaaggaattgagcataagcatgtcctgaacttgttggatgaaattgagaatatcaagcaagtgcctcaaaagctggaacagtgcatggccagcaagcactatctcagtgccactgacatgttggtgtcagcagttgagtctttggagggccccctgctccaggtggaaggactgagtgaccttcgactagagcttcacagcaagaagatgaaccttcacttggttctcatagatgaactacaccggcacctgtacatcaaatcgactagccgagttgtgcagcgtaacaaggaaaaagggaaaatcagctccctcgtgaaagatgcttctgttcctctgattgatgttacaaacctccctactcctcgaaaattccttgatacctctcactattctactgctggaagctcaagtgtgagggagataaatctgcaggacatcaaggaagatttagaattggatccagaggaaaacagcaccctgtttatgggtatcctcattaagggcttggcgaaactgaagaagatcccagaaacagttaaggcaatcatagagcgcttggagcaggagttgaagcaaattgtgaagaggtctacaacccaggtggcagacagtggctatcagcggggggagaacgttactgtggagaaccaaccaaggttgcttctagaactgctggagttactgtttgacaagtttaatgctgtagccgctgcacactctgtggtcctgggatacctgcaggacactgtagtgactccactgactcagcaggaagatatcaaactgtatgatatggcagatgtatgggtgaagatccaagatgttctacagatgctattaactgagtacttggatatgaaaaatactcgtacggcctctgaaccatcagctcaactaagctatgccagcactggacgagagtttgcagccttttttgccaagaagaaacctcaaaggccaaaaaattctcttttcaagttcgaatcgtcctcccatgccatcagtatgagcgcctatctgcgagaacagagaagggagctctatagtcggagtggagaactgcaagggggtcctgatgacaacttaattgaaggtggaggaacaaaatttgtctgcaaacctggagccagaaacattaccgtcatattccacccattactaagatttattcaggagattgagcatgctctgggtcttggcccagccaaacagtgtcctcttcgagagtttctcaccgtgtacatcaaaaacatctttctcaatcaagtcttggctgagatcaacaaggagattgaaggagtcactaaaacatctgaccctttgaagattctggccaacgcagacaccatgaaggtgctgggagtgcagcggcctctcctacagagcacaatcattgtggagaagacagttcaagacctcctgaacctgatgcatgacttgagtgcatattcagatcaattcctcaacatggtgtgcgtgaagctccaggagtacaaggacacctgcactgcagcttacaggggtattgtccagtcagaagaaaaacttgtcatcagtgcatcctgggcaaaagatgatgatatcagcagactcttgaaatctctaccaaactggatgaatatggctcaacccaaacagctgaggccaaaaagagaggaggaagaagatttcataagggcagcttttggcaaggagtctgaagttcttattgggaacctgggtgataaattaatccctccacaagacatccttcgtgacgtcagtgacctcaaagccttggccaacatgcatgaaagcctggaatggttggcaagtcgaacaaagtcagctttctccaatctttctacatcccagatgctttctcctgctcaagacagccacacgaacacggatctccccccagtgtcagagcagatcatgcagactctcagtgaacttgccaaatcgttccaggatatggctgaccgctgcttgcttgtcttacatctggaagtgagggttcactgtttccactatcttatccctcttgcaaaggaggggaactatgccattgtggctaatgtggaaagtatggattatgaccccctggtggtcaagctcaacaaagatatcagcgccattgaagaggccatgagcgccagccttcagcagcacaagttccagtatatcttcgaaggcctgggccacctgatctcctgcatcctcattaatggtgcccagtacttcaggcgcatcagtgagtctggcatcaagaaaatgtgtaggaacatttttgttcttcagcagaatttgaccaacatcaccatgtcgcgggaggcagacctggactttgcaaggcagtactacgagatgctttacaacacagctgacgagctcctgaacctggtggtggaccagggtgtgaagtacacggagctggagtacatccacgctctgaccctgctgcaccgcagccaaactggggtgggggaactgaccacccagaacacgaggctgcagaggctcaaagagatcatctgcgagcaggctgccatcaagcaagccaccaaggacaagaagataactaccgtttagcagggcgtactgcggttggtgacgggggtcccctcagtcacactcacttttttccttggtatgttattgagtatattctgagcttagttttctctacagtgatactttagtggagaggaggtgtaaggattctttctctctggttttggcttttcatataaatgctaaaggaaggcgacagtacagagtgttttggttgaacaactactttaatgcagtcaaatctaacgggactagggtgggatagggaggaaggtggtatcaaattgttggactctgaaaaacaagtggatggattactaatatttgatttattactcaatatatatataattccagccttggaaagtaggaaagtaggctgctacctaacttttagtcccttccaaaaccatttagtagggttctattacataaacagtagggtttttcctctcctgaccttatccgtttacagttcaatgaaataagtgtatgtgcattgctgtctgtctctattgccaaaatcaaataaatggcttctcagctgctgtttacaacaaacttccctaaccaaaacagaacctctaatttagggctaggaatagaagtcttttgatcccagtccgtgggacagttttgtatgctgtatcttgtacacaggttgtaggttggtttattgccattttgttttatttctgctatataaaaaccaagagccagacaattagacaactatggaggaatgaaaggcaattcaaacatctgcttgattcccgccccgccacccctaatttctgagagaataatggttagagaacattgcatctcacttgaaacatcctttgggggtaaatgattcttaggtgctcacttggtctgagctcagctgaatgcagggaagatgggacagagtgacatttctcctctgtgcggcctccagctgagcctgtctctgaattgttccctcccccgcaatgtgggcacttaccatgttcctggcacactggacctcaccatgtcccccggtcaccagtcctcttgctgcccatggttcataggtcatagaaggcagcaatgcactgactgggccacatcttgaaaactcgtggaaagggaaaggggaggagatgggactttgaccacacacagtgatgcctcacaccctgaaggtgggggattttgtacctgtttgtacaactttggtcttgatgggaaaaatggagaattaaaaagtgttttgagaagcttaaaaaaaacatg

SEQ ID NO: 313671 - DNA, 2973 bp, Homo sapiens
aaaaccaaaatgagcaaaggagaggatcccaataatcccagatctataaagcggatttctcaagggggtagagataaccacctagctattgctaaatgtgatctcactcagttgaaaaagaaacaatcagaagtgagcaatgggagccgtgaaaccatctcaatgaagacttgttgccaacatggagatagaggatattggtctacagggtactattggagagggggtcctgatgacaacttaattgaaggtggaggaacaaaatttgtctgcaaacctggagccagaaacattaccgtcatattccacccattactaagatttattcaggagattgagcatgctctgggtcttggcccagccaaacagtgtcctcttcgagagtttctcaccgtgtacatcaaaaacatctttctcaatcaagtcttggctgagatcaacaaggagattgaaggagtcactaaaacatctgaccctttgaagattctggccaacgcagacaccatgaaggtgctgggagtgcagcggcctctcctacagagcacaatcattgtggagaagacagttcaagacctcctgaacctgatgcatgacttgagtgcatattcagatcaattcctcaacatggtgtgcgtgaagctccaggagtacaaggacacctgcactgcagcttacaggggtattgtccagtcagaagaaaaacttgtcatcagtgcatcctgggcaaaagatgatgatatcagcagactcttgaaatctctaccaaactggatgaatatggctcaacccaaacagctgaggccaaaaagagaggaggaagaagatttcataagggcagcttttggcaaggagtctgaagttcttattgggaacctgggtgataaattaatccctccacaagacatccttcgtgacgtcagtgacctcaaagccttggccaacatgcatgaaagcctggaatggttggcaagtcgaacaaagtcagctttctccaatctttctacatcccagatgctttctcctgctcaagacagccacacgaacacggatctccccccagtgtcagagcagatcatgcagactctcagtgaacttgccaaatcgttccaggatatggctgaccgctgcttgcttgtcttacatctggaagtgagggttcactgtttccactatcttatccctcttgcaaaggaggggaactatgccattgtggctaatgtggaaagtatggattatgaccccctggtggtcaagctcaacaaagatatcagcgccattgaagaggccatgagcgccagccttcagcagcacaagttccagtatatcttcgaaggcctgggccacctgatctcctgcatcctcattaatggtgcccagtacttcaggcgcatcagtgagtctggcatcaagaaaatgtgtaggaacatttttgttcttcagcagaatttgaccaacatcaccatgtcgcgggaggcagacctggactttgcaaggcagtactacgagatgctttacaacacagctgacgagctcctgaacctggtggtggaccagggtgtgaagtacacggagctggagtacatccacgctctgaccctgctgcaccgcagccaaactggggtgggggaactgaccacccagaacacgaggctgcagaggctcaaagagatcatctgcgagcaggctgccatcaagcaagccaccaaggacaagaagataactaccgtttagcagggcgtactgcggttggtgacgggggtcccctcagtcacactcacttttttccttggtatgttattgagtatattctgagcttagttttctctacagtgatactttagtggagaggaggtgtaaggattctttctctctggttttggcttttcatataaatgctaaaggaaggcgacagtacagagtgttttggttgaacaactactttaatgcagtcaaatctaacgggactagggtgggatagggaggaaggtggtatcaaattgttggactctgaaaaacaagtggatggattactaatatttgatttattactcaatatatatataattccagccttggaaagtaggaaagtaggctgctacctaacttttagtcccttccaaaaccatttagtagggttctattacataaacagtagggtttttcctctcctgaccttatccgtttacagttcaatgaaataagtgtatgtgcattgctgtctgtctctattgccaaaatcaaataaatggcttctcagctgctgtttacaacaaacttccctaaccaaaacagaacctctaatttagggctaggaatagaagtcttttgatcccagtccgtgggacagttttgtatgctgtatcttgtacacaggttgtaggttggtttattgccattttgttttatttctgctatataaaaaccaagagccagacaattagacaactatggaggaatgaaaggcaattcaaacatctgcttgattcccgccccgccacccctaatttctgagagaataatggttagagaacattgcatctcacttgaaacatcctttgggggtaaatgattcttaggtgctcacttggtctgagctcagctgaatgcagggaagatgggacagagtgacatttctcctctgtgcggcctccagctgagcctgtctctgaattgttccctcccccgcaatgtgggcacttaccatgttcctggcacactggacctcaccatgtcccccggtcaccagtcctcttgctgcccatggttcataggtcatagaaggcagcaatgcactgactgggccacatcttgaaaactcgtggaaagggaaaggggaggagatgggactttgaccacacacagtgatgcctcacaccctgaaggtgggggattttgtacctgtttgtacaactttggtcttgatgggaaaaatggagaattaaaaagtgttttgagaagcttaaaaaaaacatg

SEQ ID NO: 313672 - DNA, 4101 bp, Homo sapiens
gacagaatttacgcacccttggcttccttggagcctagcggctctccccgcgtccaagatggcggcagaagcagctggtgggaaatacagaagcacagtcagcaaaagcaaagacccctcggggctgctcatctctgtgatcaggactctgtctactagtgacgatgtcgaagacagggaaaatgaaaagggtcgccttgaagaagcctacgagaaatgtgaccgtgacctggatgaattgattgtacagcactacacagaattgacgacagccattcgcacataccagagcatcacagagcgcatcactaactcccgaaataaaataaagcaggtaaaagagaacctgctttcatgcaagatgctgctgcactgcaaacgggatgagcttcggaaactgtggattgaaggaattgagcataagcatgtcctgaacttgttggatgaaattgagaatatcaagcaagtgcctcaaaagctggaacagtgcatggccagcaagcactatctcagtgccactgacatgttggtgtcagcagttgagtctttggagggccccctgctccaggtggaaggactgagtgaccttcgactagagcttcacagcaagaagatgaaccttcacttggttctcatagatgaactacaccggcacctgtacatcaaatcgactagccgagttgtgcagcgtaacaaggaaaaagggaaaatcagctccctcgtgaaagatgcttctgttcctctgattgatgttacaaacctccctactcctcgaaaattccttgatacctctcactattctactgctggaagctcaagtgtgagggagataaatctgcaggacatcaaggaagatttagaattggatccagaggaaaacagcaccctgtttatgggtatcctcattaagggcttggcgaaactgaagaagatcccagaaacagttaaggcaatcatagagcgcttggagcaggagttgaagcaaattgtgaagaggtctacaacccaggtggcagacagtggctatcagcggggggagaacgttactgtggagaaccaaccaaggttgcttctagaactgctggagttactgtttgacaagtttaatgctgtagccgctgcacactctgtggtcctgggatacctgcaggacactgtagtgactccactgactcagcaggaagatatcaaactgtatgatatggcagatgtatgggtgaagatccaagatgttctacagatgctattaactgagtacttggatatgaaaaatactcgtacggcctctgaaccatcagctcaactaagctatgccagcactggacgagagtttgcagccttttttgccaagaagaaacctcaaaggccaaaaaattctcttttcaagttcgaatcgtcctcccatgccatcagtatgagcgcctatctgcgagaacagagaagggagctctatagtcggagtggagaactgcaagggggtcctgatgacaacttaattgaaggtggaggaacaaaatttgtctgcaaacctggagccagaaacattaccgtcatattccacccattactaagatttattcaggagattgagcatgctctgggtcttggcccagccaaacagtgtcctcttcgagagtttctcaccgtgtacatcaaaaacatctttctcaatcaagtcttggctgagatcaacaaggagattgaaggagtcactaaaacatctgaccctttgaagattctggccaacgcagacaccatgaaggtgctgggagtgcagcggcctctcctacagagcacaatcattgtggagaagacagttcaagacctcctgaacctgatgcatgacttgagtgcatattcagatcaattcctcaacatggtgtgcgtgaagctccaggagtacaaggacacctgcactgcagcttacaggggtattgtccagtcagaagaaaaacttgtcatcagtgcatcctgggcaaaagatgatgatatcagcagactcttgaaatctctaccaaactggatgaatatggctcaacccaaacagctgaggccaaaaagagaggaggaagaagatttcataagggcagcttttggcaaggagtctgaagttcttattgggaacctgggtgataaattaatccctccacaagacatccttcgtgacgtcagtgacctcaaagccttggccaacatgcatgaaagcctggaatggttggcaagtcgaacaaagtcagctttctccaatctttctacatcccagatgctttctcctgctcaagacagccacacgaacacggatctccccccagtgtcagagcagatcatgcagactctcagtgaacttgccaaatcgttccaggatatggctgaccgctgcttgcttgtcttacatctggaagtgagggttcactgtttccactatcttatccctcttgcaaaggaggggaactatgccattgtggctaatgtggaaagtatggattatgaccccctggtggtcaagctcaacaaagatatcagcgccattgaagaggccatgagcgccagccttcagcagcacaagttccagtatatcttcgaaggcctgggccacctgatctcctgcatcctcattaatggtgcccagtacttcaggcgcatcagtgagtctggcatcaagaaaatgtgtaggaacatttttgttcttcagcagaatttgaccaacatcaccatgtcgcgggaggcagacctggactttgcaaggcagtactacgagatgctttacaacacagctgacgagctcctgaacctggtggtggaccagggtgtgaagtacacggagctggagtacatccacgctctgaccctgctgcaccgcagccaaactggggtgggggaactgaccacccagaacacgaggctgcagaggctcaaagagatcatctgcgagcaggctgccatcaagcaagccaccaaggacaagaagataactaccgtttagcagggcgtactgcggttggtgacgggggtcccctcagtcacactcacttttttccttggtatgttattgagtatattctgagcttagttttctctacagtgatactttagtggagaggaggtgtaaggattctttctctctggttttggcttttcatataaatgctaaaggaaggcgacagtacagagtgttttggttgaacaactactttaatgcagtcaaatctaacgggactagggtgggatagggaggaaggtggtatcaaattgttggactctgaaaaacaagtggatggattactaatatttgatttattactcaatatatatataattccagccttggaaagtaggaaagtaggctgctacctaacttttagtcccttccaaaaccatttagtagggttctattacataaacagtagggtttttcctctcctgaccttatccgtttacagttcaatgaaataagtgtatgtgcattgctgtctgtctctattgccaaaatcaaataaatggcttctcagctgctgtttacaacaaacttccctaaccaaaacagaacctctaatttagggctaggaatagaagtcttttgatcccagtccgtgggacagttttgtatgctgtatcttgtacacaggttgtaggttggtttattgccattttgttttatttctgctatataaaaaccaagagccagacaattagacaactatggaggaatgaaaggcaattcaaacatctgcttgattcccgccccgccacccctaatttctgagagaataatggttagagaacattgcatctcacttgaaacatcctttgggggtaaatgattcttaggtgctcacttggtctgagctcagctgaatgcagggaagatgggacagagtgacatttctcctctgtgcggcctccagctgagcctgtctctgaattgttccctcccctttccctttccacgagttttcaagatgtggcccagtcagtgcattgctgccttctatgacctatgaaccatgggcagcaagaggactggtgaccgggggacatggtgaggtccagtgtgccaggaacatgataagtgcccacattgcgggggagggaacgtcgagc

SEQ ID NO: 313673 - DNA, 2958 bp, Homo sapiens
gacagaatttacgcacccttggcttccttggagcctagcggctctccccgcgtccaagatggcggcagaagcagctggtgggaaatacagaagcacagtcagcaaaagcaaagacccctcggggctgctcatctctgtgatcaggactctgtctactagtgacgatgtcgaagacagggaaaatgaaaagggtcgccttgaagaagcctacgagaaatgtgaccgtgacctggatgaattgattgtacagcactacacagaattgacgacagccattcgcacataccagagcatcacagagcgcatcactaactcccgaaataaaataaagcaggtaaaagagaacctgctttcatgcaagatgctgctgcactgcaaacgggatgagcttcggaaactgtggattgaaggaattgagcataagcatgtcctgaacttgttggatgaaattgagaatatcaagcaagtgcctcaaaagctggaacagtgcatggccagcaagcactatctcagtgccactgacatgttggtgtcagcagttgagtctttggagggccccctgctccaggtggaaggactgagtgaccttcgactagagcttcacagcaagaagatgaaccttcacttggttctcatagatgaactacaccggcacctgtacatcaaatcgactagccgagttgtgcagcgtaacaaggaaaaagggaaaatcagctccctcgtgaaagatgcttctgttcctctgattgatgttacaaacctccctactcctcgaaaattccttgatacctctcactattctactgctggaagctcaagtgtgagggagataaatctgcaggacatcaaggaagatttagaattggatccagaggaaaacagcaccctgtttatgggtatcctcattaagggcttggcgaaactgaagaagatcccagaaacagttaaggcaatcatagagcgcttggagcaggagttgaagcaaattgtgaagaggtctacaacccaggtggcagacagtggctatcagcggggggagaacgttactgtggagaaccaaccaaggttgcttctagaactgctggagttactgtttgacaagtttaatgctgtagccgctgcacactctgtggtcctgggatacctgcaggacactgtagtgactccactgactcagcaggaagatatcaaactgtatgatatggcagatgtatgggtgaagatccaagatgttctacagatgctattaactgagtacttggatatgaaaaatactcgtacggcctctgaaccatcagctcaactaagctatgccagcactggacgagagtttgcagccttttttgccaagaagaaacctcaaaggccaaaaaattctcttttcaagttcgaatcgtcctcccatgccatcagtatgagcgcctatctgcgagaacagagaagggagctctatagtcggagtggagaactgcaagggggtcctgatgacaacttaattgaaggtggaggaacaaaatttgtctgcaaacctggagccagaaacattaccgtcatattccacccattactaagatttattcaggagattgagcatgctctgggtcttggcccagccaaacagtgtcctcttcgagagtttctcaccgtgtacatcaaaaacatctttctcaatcaagtcttggctgagatcaacaaggagattgaaggagtcactaaaacatctgaccctttgaagattctggccaacgcagacaccatgaaggtgctgggagtgcagcggcctctcctacagagcacaatcattgtggagaagacagttcaagacctcctgaacctgatgcatgacttgagtgcatattcagatcaattcctcaacatggtgtgcgtgaagctccaggagtacaaggacacctgcactgcagcttacaggggtattgtccagtcagaagaaaaacttgtcatcagtgcatcctgggcaaaagatgatgatatcagcagactcttgaaatctctaccaaactggatgaatatggctcaacccaaacagctgaggccaaaaagagaggaggaagaagatttcataagggcagcttttggcaaggagtctgaagttcttattgggaacctgggtgataaattaatccctccacaagacatccttcgtgacgtcagtgacctcaaagccttggccaacatgcatgaaagcctggaatggttggcaagtcgaacaaagtcagctttctccaatctttctacatcccagatgctttctcctgctcaagacagccacacgaacacggatctccccccagtgtcagagcagatcatgcagactctcagtgaacttgccaaatcgttccaggatatggctgaccgctgcttgcttgtcttacatctggaagtgagggttcactgtttccactatcttatccctcttgcaaaggaggggaactatgccattgtggctaatgtggaaagtatggattatgaccccctggtggtcaagctcaacaaagatatcagcgccattgaagaggccatgagcgccagccttcagcagcacaagttccagtatatcttcgaaggcctgggccacctgatctcctgcatcctcattaatggtgcccagtacttcaggcgcatcagtgagtctggcatcaagaaaatgtgtaggaacatttttgttcttcagcagaatttgaccaacatcaccatgtcccccggtcaccagtcctcttgctgcccatggttcataggtcatagaaggcagcaatgcactgactgggccacatcttgaaaactcgtggaaagggaaaggggaggagatgggactttgaccacacacagtgatgcctcacaccctgaaggtgggggattttgtacctgtttgtacaactttggtcttgatgggaaaaatggagaattaaaaagtgttttgagaagcttaaaaaaaacatg

SEQ ID NO: 313674 - DNA, 2849 bp, Homo sapiens
gacagaatttacgcacccttggcttccttggagcctagcggctctccccgcgtccaagatggcggcagaagcagctggtgggaaatacagaagcacagtcagcaaaagcaaagacccctcggggctgctcatctctgtgatcaggactctgtctactagtgacgatgtcgaagacagggaaaatgaaaagggtcgccttgaagaagcctacgagaaatgtgaccgtgacctggatgaattgattgtacagcactacacagaattgacgacagccattcgcacataccagagcatcacagagcgcatcactaactcccgaaataaaataaagcaggtaaaagagaacctgctttcatgcaagatgctgctgcactgcaaacgggatgagcttcggaaactgtggattgaaggaattgagcataagcatgtcctgaacttgttggatgaaattgagaatatcaagcaagtgcctcaaaagctggaacagtgcatggccagcaagcactatctcagtgccactgacatgttggtgtcagcagttgagtctttggagggccccctgctccaggtggaaggactgagtgaccttcgactagagcttcacagcaagaagatgaaccttcacttggttctcatagatgaactacaccggcacctgtacatcaaatcgactagccgagttgtgcagcgtaacaaggaaaaagggaaaatcagctccctcgtgaaagatgcttctgttcctctgattgatgttacaaacctccctactcctcgaaaattccttgatacctctcactattctactgctggaagctcaagtgtgagggagataaatctgcaggacatcaaggaagatttagaattggatccagaggaaaacagcaccctgtttatgggtatcctcattaagggcttggcgaaactgaagaagatcccagaaacagttaaggcaatcatagagcgcttggagcaggagttgaagcaaattgtgaagaggtctacaacccaggtggcagacagtggctatcagcggggggagaacgttactgtggagaaccaaccaaggttgcttctagaactgctggagttactgtttgacaagtttaatgctgtagccgctgcacactctgtggtcctgggatacctgcaggacactgtagtgactccactgactcagcaggaagatatcaaactgtatgatatggcagatgtatgggtgaagatccaagatgttctacagatgctattaactgagtacttggatatgaaaaatactcgtacggcctctgaaccatcagctcaactaagctatgccagcactggacgagagtttgcagccttttttgccaagaagaaacctcaaaggccaaaaaattctcttttcaagttcgaatcgtcctcccatgccatcagtatgagcgcctatctgcgagaacagagaagggagctctatagtcggagtggagaactgcaagggggtcctgatgacaacttaattgaaggtggaggaacaaaatttgtctgcaaacctggagccagaaacattaccgtcatattccacccattactaagatttattcaggagattgagcatgctctgggtcttggcccagccaaacagtgtcctcttcgagagtttctcaccgtgtacatcaaaaacatctttctcaatcaagtcttggctgagatcaacaaggagattgaaggagtcactaaaacatctgaccctttgaagattctggccaacgcagacaccatgaaggtgctgggagtgcagcggcctctcctacagagcacaatcattgtggagaagacagttcaagacctcctgaacctgatgcatgacttgagtgcatattcagatcaattcctcaacatggtgtgcgtgaagctccaggagtacaaggacacctgcactgcagcttacaggggtattgtccagtcagaagaaaaacttgtcatcagtgcatcctgggcaaaagatgatgatatcagcagactcttgaaatctctaccaaactggatgaatatggctcaacccaaacagctgaggccaaaaagagaggaggaagaagatttcataagggcagcttttggcaaggagtctgaagttcttattgggaacctgggtgataaattaatccctccacaagacatccttcgtgacgtcagtgacctcaaagccttggccaacatgcatgaaagcctggaatggttggcaagtcgaacaaagtcagctttctccaatctttctacatcccagatgctttctcctgctcaagacagccacacgaacacggatctccccccagtgtcagagcagatcatgcagactctcagtgaacttgccaaatcgttccaggatatggctgaccgctgcttgcttgtcttacatctggaagtgagggttcactgtttccactatcttatccctcttgcaaaggaggggaactatgccattgtggctaatgtggaaagtatggattatgaccccctggtggtcaagctcaacaaagatatcagcgccattgaagaggccatgagcgccagccttcagcagcacaagttccagtatatcttcgaaggcctgggccacctgatctcctgcatcctcattaatggtgcccagtacttcaggcgcatcagtgagtctggcatcaagaaaatgtgtaggaacatttttgttcttcagcagaatttgaccaacatcaccatgtcgcgggaggcagacctggactttgcaaggtaggagggaaaactgggtttagtttcttatgccaaagctaagacctcgttgcctgtgaagtcatttttaaaaatagactcttggtgcagaaaaagcttagttt

SEQ ID NO: 313675 - DNA, 2396 bp, Homo sapiens
gacagaatttacgcacccttggcttccttggagcctagcggctctccccgcgtccaagatggcggcagaagcagctggtgggaaatacagaagcacagtcagcaaaagcaaagacccctcggggctgctcatctctgtgatcaggactctgtctactagtgacgatgtcgaagacagggaaaatgaaaagggtcgccttgaagaagcctacgagaaatgtgaccgtgacctggatgaattgattgtacagcactacacagaattgacgacagccattcgcacataccagagcatcacagagcgcatcactaactcccgaaataaaataaagcaggtaaaagagaacctgctttcatgcaagatgctgctgcactgcaaacgggatgagcttcggaaactgtggattgaaggaattgagcataagcatgtcctgaacttgttggatgaaattgagaatatcaagcaagtgcctcaaaagctggaacagtgcatggccagcaagcactatctcagtgccactgacatgttggtgtcagcagttgagtctttggagggccccctgctccaggtggaaggactgagtgaccttcgactagagcttcacagcaagaagatgaaccttcacttggttctcatagatgaactacaccggcacctgtacatcaaatcgactagccgagttgtgcagcgtaacaaggaaaaagggaaaatcagctccctcgtgaaagatgcttctgttcctctgattgatgttacaaacctccctactcctcgaaaattccttgatacctctcactattctactgctggaagctcaagtgtgagggagataaatctgcaggacatcaaggaagatttagaattggatccagaggaaaacagcaccctgtttatgggtatcctcattaagggcttggcgaaactgaagaagatcccagaaacagttaaggcaatcatagagcgcttggagcaggagttgaagcaaattgtgaagaggtctacaacccaggtggcagacagtggctatcagcggggggagaacgttactgtggagaaccaaccaaggttgcttctagaactgctggagttactgtttgacaagtttaatgctgtagccgctgcacactctgtggtcctgggatacctgcaggacactgtagtgactccactgactcagcaggaagatatcaaactgtatgatatggcagatgtatgggtgaagatccaagatgttctacagatgctattaactgagtacttggatatgaaaaatactcgtacggcctctgaaccatcagctcaactaagctatgccagcactggacgagagtttgcagccttttttgccaagaagaaacctcaaaggccaaaaaattctcttttcaagttcgaatcgtcctcccatgccatcagtatgagcgcctatctgcgagaacagagaagggagctctatagtcggagtggagaactgcaaggtgagtgattgagcttctctggaaaaattaattttctggaggagtatttcctttattacacatgagtttgtgtcctgcattcacacgatcctttcaaggtaacaaacacttagtgacttaataatttgtttcttctgtaatttcccagcatctgctgccaagcaggtaaaactattactgtggccataggacttgtagacctgctactgttcaagtgggaattcaaagcaaaaagagatgaggccaggctcgtcttgcttaaacagaagacctgagtccagtcacaatctaggagaatgttggtcttctgcgactgccactgttacttctaattgttgtttttgacaccttctagaatatgacaggagtacctgagatttgggaaagggaaaatgcaaccactgtcattatttaaagggaaaaagatgcctctaaatagtatgttataatcaatataactgtgatgaacaggctatttgatacccatgtatagttaccaaagagttgtaagctgaagaagaaaatatttagaaaataaattaaatataaataaatatattagactgataacatttccttctgtgacaaaaagatgctgatcatgtaaatgtaatgagttaagaaaggtttggaggtcaggtgtggtgactaacacctgtaatctcagcactttgggagactgaggcaggcagatcacttgagtccaggagttcaagaccagcctgggcgacatggcgaagccctgtctctataaaaaaatacaaaaattagttggacatggtggcacgtgcgtattcccagctactcaggaggctgaggtgagattgcttgagcctgagaggcagaggttgcagtgagctgagatcatgccactgcacttcagcctgtgtgacaaagtgagaccatgtctcaaaaaaagaa

SEQ ID NO: 313676 - DNA, 1861 bp, Homo sapiens
gacagaatttacgcacccttggcttccttggagcctagcggctctccccgcgtccaagatggcggcagaagcagctggtgggaaatacagaagcacagtcagcaaaagcaaagacccctcggggctgctcatctctgtgatcaggactctgtctactagtgacgatgtcgaagacagggaaaatgaaaagggtcgccttgaagaagcctacgagaaatgtgaccgtgacctggatgaattgattgtacagcactacacagaattgacgacagccattcgcacataccagagcatcacagagcgcatcactaactcccgaaataaaataaagcaggtaaaagagaacctgctttcatgcaagatgctgctgcactgcaaacgggatgagcttcggaaactgtggattgaaggaattgagcataagcatgtcctgaacttgttggatgaaattgagaatatcaagcaagtgcctcaaaagctggaacagtgcatggccagcaagcactatctcagtgccactgacatgttggtgtcagcagttgagtctttggagggccccctgctccaggtggaaggactgagtgaccttcgactagagcttcacagcaagaagatgaaccttcacttggttctcatagatgaactacaccggcacctgtacatcaaatcgactagccgagttgtgcagcgtaacaaggaaaaagggaaaatcagctccctcgtgaaagatgcttctgttcctctgattgatgttacaaacctccctactcctcgaaaattccttgatacctctcactattctactgctggaagctcaagtgtgagggagataaatctgcaggacatcaaggaagatttagaattggatccagaggaaaacagcaccctgtttatgggtatcctcattaagggcttggcgaaactgaagaagatcccagaaacagttaaggcaatcatagagcgcttggagcaggagttgaagcaaattgtgaagaggtctacaacccaggtggcagacagtggctatcagcggggggagaacgttactgtggagaaccaaccaaggttgcttctagaactgctggagttactgtttgacaagtttaatgctgtagccgctgcacactctgtggtcctgggatacctgcaggacactgtagtgactccactgactcagcaggaagatatcaaactgtatgatatggcagatgtatgggtgaagatccaagatgttctacagatgctattaactgagtacttggatatgaaaaatactcgtacggcctctgaaccatcagctcaactaagctatgccagcactggacgagagtttgcagccttttttgccaagaagaaacctcaaaggccaaaaaattctcttttcaagttcgaatcgtcctcccatgccatcagtatgagcgcctatctgcgagaacagagaagggagctctatagtcggagtggagaactgcaagggggtcctgatgacaacttaattgaaggtggaggaacaaaatttgtctgcaaacctggagccagaaacattaccgtcatattccacccattactaagatttattcaggagattgagcatgctctgggtcttggcccagccaaacagtgtcctcttcgagagtttctcaccgtgtacatcaaaaacatctttctcaatcaagtcttggctgagatcaacaaggagattgaaggagtcactaaaacatctgaccctttgaagattctggccaacgcagacaccatgaaggtgctgggagtgcagcggcctctcctacaggtaataatacactttgaacttactatttttatcagcaattttcattgacttggcaagtgtcataaattt

SEQ ID NO: 313677 - DNA, 734 bp, Homo sapiens
gacagaatttacgcacccttggcttccttggagcctagcggctctccccgcgtccaagatggcggcagaagcagctggtgggaaatacagaagcacagtcagcaaaagcaaagacccctcggggctgctcatctctgtgatcaggactctgtctactagtgacgatgtcgaagacagggaaaatgaaaagggtcgccttgaagaagcctacgagaaatgtgaccgtgacctggatgaattgattgtacagcactacacagaattgacgacagccattcgcacataccagagcatcacagagcgcatcactaactcccgaaataaaataaagcaggtaaaagagaacctgctttcatgcaagatgctgctgcactgcaaacgggatgagcttcggaaactgtggattgaaggaattgagcataagcatgtcctgaacttgttggatgaaattgagaatatcaagcaagtgcctcaaaagctggaacagtgcatggccagcaagcactatctcagtgccactgacatgttggtgtcagcagttgagtctttggagggccccctgctccaggtggaaggactgagtgaccttcgactagagcttcacagcaagaagatgaaccttcacttggttctcatagatgaactacaccggcacctgtacatcaaatcgactagccgagttgtgcagcgtaacaaggaaaaagggaaaatcaggttaaagaggctctttgcta

SEQ ID NO: 313678 - DNA, 7306 bp, Homo sapiens
cttagtttacatcctctcccccaatcttcacacacagagccaaagagcagttatattcttgggataccatgatacctctgggaaaggaattatattcccaaggagaggtcccattggataagaacaataccatgggacttgagtctgaatgccaacttactattcacacatccttcttaaaaacgaacacactgtttcttttcctgacctagagcattctaaagttctgttcaaataaataaagggcaaaataaagtagatttaaccaagtgccaggtggaattcaaaaaacacattcttccagataaattctacctttatggtatggatttgaaagtactttgcaggaaaacagtcagtactctttaaaaagggactgcagggctgggtgtagtggctcacacctgtaatcccagcactttgggaggccaaggcaggtgggtcacttgaggccaggagtttgagaccagcctgaccaacatggcaaaaccccatctctactaaaatacaaaaattagctgggcatgatggtgcactcctgtaatcccagctacttggtaggctgaagcatgagaattgcttaaacctgggaggcagaggttgcagtaagccaagatcatgccactgcattccagcctgggcaacagagtaagactctgtcttaataaataaataagaaaataaaacggaactgcagtgctaacagtaatttatacatttttaaatgttctgagtatgttttgactgggctagtgtaacaatatactaccctgaaagtgcagttttgattgttgttggtgtctttgggtcaggaaagtgaactgtgccaagaagtatttttcagtgacatgaatggattcctgttaatgcaattgactgagagattgtgcttacgctttcttaactgacaaaaagaggctttgtccaacatcagaattgttgaaactggtgctgttttctgttgcactgggattctgatgatctgggattttccctccttggcacagtaaacaccatgactgtctttattgagaatgtcgtcacagtcctttagtgatagattagttagacccatggttgcaatacctttatctccccaaagaaaataatcaaaagaaagcacaaaagctaccctgtttgcagaatatttcactgacattgatttgtcattaattctaccagagctgacctcattcaggcttgatagaaacaggttcctatgtttagggcagatccctagcctctcgctcacagtgagtctgcatgtcctagattctggttattgctggagcatccattaaagtctaccaaactcaggacagaagaagatagcagtggatttgtaaaaatttttagtttataaattacagtcattggggaaacactagtaaggtcatgtgatcttttggaccaggattttctctctgtcttctctctgggtgtgtgtgtgtgtatgtacagaagggctaccaggaagtgtcaaccatgttagattttctgtagtcttccagaaacagtgcagcccatacaacaggaatcttaattttcctcacagcaaatataacaggatggaacagttagtgttttgttttcacaagtgtccaccactccatctgccctgcatggagagggctctctcactgctagatctaggctgagccatctggaaggatcaaagggtgtgggagtatcaccccctctcaggctgcagaaggtctcgagggtggcgtcacagcaggatttccgccttctgcattgcactgcacagccccatggaacatgaggcacttgaggccttgcttcttggagcctctggggagcagagtaggtcactgccctctgggagtgttttgcagtagttttgtaaatgtgttgctacatagtcaagttcctttgtggcaaagaaatattttgttttgatattaggagccagcccatgtaatgcctctcaggcttgcttgcttagaagaaaaaagtcaccctttgtggtttttaagaaaaaaattctgtgcagatctgttcctcctcctgctccttcccttttctctacatacagtgctcattggaggctcctgctaaaccttcttaaccagagaaataataggtatttgttagacctgagtgtacatttcacatgttatccttcacatatttctcattttcatctagtactttcttaatgcctttgttggagtccgcatcctcatctttaaaaaaaaaaaaaaaaaacagcttagcctaagccacattcactttttttagttcacaaaaaggatttaatagccacaatgtgatttttgccacaactgtgtgattttaatattctctaatatcaagggcggatttagaattgcaggaaatacctggagaaatcacagtggaatgaatttttgctttaagagaaatgagagttggctgtctctgtaattgataatacagcttcatcctagtcccatctgcatttcagaaaataaccctcatctttacaaaacacaggacacttgtgggacagttaactcaagcagctatggggagggaggagattattgaatggtgattaaataatgcaaatggctcttctgtttcttaaagactgtggaagaggtcagactgcccagttgaggtgggcagttcatactgctcagttgaggtggcagtcatttattctgagtcctgttggatagagcctatctcctcaaggctacagaggcttccaggatatggagctgtgcatgttaatggctcagccttgcctccatcagggcacctgcctaacttggagcaagtgggagagcaccctagagtcatcctctgtgctgtttcgtgagttttgcagcggagacttcaccatccggaggagctgtgtttctgtgtcacttgggatatcacctaaaaatgaaacatttgatattttaaggtataaaaaaaaagtaaattggggaacattggctgcagtccctaaaagatactgttgtctgtgcatcaggttagcttgaggtcaccacaggtcctgggagcccagagagtttaggcatactctcctttggaggccagcagcctttcacaaaccctgcctctaaaagggcggtttcacatttgaccatgtttttgcattagcctcagaaactcttgtctttagctgataacctttgagggatgtgagaagcctagttggagcatctgagaaaatgatacctctcaccttcaaattaatcaaatagtttgtccttctagtccccttataaattaataaatggagggctggtcatggtggctcacgcctgtaatcccagcactttgggaggccgaggcgggtggatcacaaggtcaggagttcaagaccagcctgaccaatatggtgaaaccccatctctactaaaaatacaaaaattagccaggtgtagtggcacgctcctgtagtcccagctactcgggaggctgaggcaggagaatcgcttgaacccaggaggtggatgttgcagtgagccgagatcccgccactgcactgcagcctaggcgacagagcaagactccgtctcaaaaaaaaaaaaagaaaaaaaaagaaaagggaagggaatcccattttgtgatgatttgggcacactacttgagctgaggctagcagtcacatgattttggctgtctctgacctgaagcttttgaagtaaggttatgtctcttccctgaagctttgtttatagtggtaatttggtgagtttgagctttgagcttgtcttagaaaataagactgtccacctggggaggggagcttatagggaacccgtgttaactcagaatgctgaagaaagtgcttttagccaacaaaagtaagattactatctagaaggtggaaagaagtcattgcttctgttcctccagcagtcagttgactctaggtttcctttggtttatatccccagttcttaatactaaaacttatttgacttcctatcaggaagcacacaaaaaaagcgtcatttaaaaccctggatataggctttaaaggatacaaaaacagcagcattgtcgttttgccaggttcatcaccattttgatgtgctacccatccttccaccctccctttcctgcccccaagcctcccagccaggccagatgtgaagattctattaatcactgtttcagagaacattaattcttgtatagaataattatctactaaattgcttattatctgtgactaccttgcagagaacatctcaacagtgcagtaaaatagctctcctagacttgagcttccagccaggcatttagatcactcttaagcctttgtggaattctgaggaaaaaaagcaagatgcctcaatgccaatgctgggccataagattctactcccctccctgtagggtggggcgcgtggctcagctttggaaaatcattttgccagtaatattgcctgtgaatccctttaagaagtcgtcctgatctgagcctgtctttctgagcactttggtgctgaattgaaaatggtaagctaaagcagtgacagatccacgtagcctctttaacctctttattatcttgccaaaaaaaaagtttctcaggttaaacctttgtctttaacctccctttgttgtggagaaaatgtgtcactaatcagtggtccaagggatatctagctttggttactcagttcctgcagcataacagatatgacttatgccagggaaggtagaggctgattatggagacacccaggaacaggaataagaagggataggtctgctccacgtagaacctccccagatcggaagttaagtcttggagagtttccaaagtgctgaagtaaaaaggagacttggagggcctttgcttaatgagcaagaggcttgtgtcctcccaagaacatgagggagttcagaagggagctatagctcacagacagaaacctgcccgctcaccccatccctcgtgactgggagcatgtttgctcagaattttctaagaggactctcccttcaaaaatccaatttgctcccagaatgttgtttagcctctgagaatctcactctttcatttccatctgtgaatggacatagatgtgttgctcagggatcagaaacatcagagtccagggcccagtggcatggtgttgcattagtagttagaaaagtaattggtcagctctactgtaaaagaaataagtatgtagtacagttttgtaaatgtcaggtctgttctattgttttgtgatctgaagactgtcaaactggttgataatcaaagaaaaggttggttagaataagtaaaatttcagttagaaagatatagcttaccagttttccatgtgcttaaggaagtcaagaatatttcaggttgttgagaactgttgtaaaatggaattgaagctagtgtctctcaccttcttaggtgtatcagagagaggaagtggaaggccagtagtagcatcttcatacttacttttgccagcccagcctccatttcaaagactttgtcttccatcctatccaatgacatggtcagggatgggctctgaggaggcagtgaggccccaccttggtttgctccactgtggtgtgtagtctccaaacagcttaagggtttttaagttttctcacgattacctccactccactcatctactatcagcatcagaaaggttaacatccctgggaccattctacttataaaagagatgaactagtgtgctttctccccttttccaggtgtgccatccatatacaatctcctcttggccaagttcaacaaatgtttccagggaaccccgtgggttgaggcaaagtagccaagatgtattgagttaagtttttctagaggacaaaagtatttcttgtcccttttccctcatgctcatatgttttagctgaggcgtaaatggccaagttgagtaatatctgtggaactgagacagagagccagggacccatgtacccagggaccagtcccctggggaatcacacagtggctcagactagactgctctatcccaccagaactctgctgctgttcatttccatcaggaccacccaggaaagcaaataagttagccttctcatcattaggtcacctaatctcttgggttgcaggatgagagcatatatagatctcctgtttagagagtgtgttcataattgtagaaagggatagaaaatggaataaccaagaggctgtgtcattttttaagaggatggcaaggatgacctcaaatgagctcaacaaaactgggaatccaaggaatggtgcttgtagggaaagagaggtcagttgtggtccttaaacctcttggcaccttgtgcgggttataaaacaaggagctggagtaaaattgcccttacccccaatccaaatgctgtccaggatttaggagctacccaacctgtggttatatggtgttggtttccattttttgtttgtttgcttgtttccaaaatagccttgcttggtactgcatggaaagttcaagcttttcttcttgcccgctcagggctggcctcttccccgtgtcttcacagcgtccctaaggaagatttttgcagcactctctggagctgaggggagtgaaatttggtccagagaaggcggaaggaaatagttttcctgtttccttttctcgaggtggatgtcctcaggcttccttcacacctccttctcatgggtgcggctggcagtacagtcaggctgtggaggagggctgagaagaaaggggcactggtccagccccaggtttggtctgagacaggtacacagcagataccatcccaccttcctctctaaagaacaggccagccacacatataaccctttccctactttactaatgtatcccttatgtggtaccagcaatggaggacaggcagacttaccccctgccatctagagagaatgttgttattacccgtaaaacttgaccacccccatatcccactcctttttgtaaaaacaaatgcttaaacctgtgagcctgccgttcctttctatgtgttaatcagtttccttccatttgagctgtgtgggagggaagggcattgaaattgtaggttgtaatcttgtgccaaccaataaaaaccagtatttcacacacaaaaaaaaaaaaaaaaaaaaaaaaaaaaaaaaaaaaaaacccggggggctctttttctgcgggggcgggggaaaaggaggtttgagagaaggggcaggggccaaagggggttcccgggacccgagtttttttgggcaacaggggggagaaaccggggggccccccaaggggggggggggaaaaatcggaaaaacccggggttcccggtagatgttcggtcgaac

SEQ ID NO: 313679 - DNA, 7269 bp, Homo sapiens
cttagtttacatcctctcccccaatcttcacacacagagccaaagagcagttatattcttgggataccatgatacctctgggaaaggaattatattcccaaggagaggtcccattggataagaacaataccatgggacttgagtctgaatgccaacttactattcacacatccttcttaaaaacgaacacactgtttcttttcctgacctagagcattctaaagttctgttcaaataaataaagggcaaaataaagtagatttaaccaagtgccaggtggaattcaaaaaacacattcttccagataaattctacctttatggtatggatttgaaagtactttgcaggaaaacagtcagtactctttaaaaagggactgcagggctgggtgtagtggctcacacctgtaatcccagcactttgggaggccaaggcaggtgggtcacttgaggccaggagtttgagaccagcctgaccaacatggcaaaaccccatctctactaaaatacaaaaattagctgggcatgatggtgcactcctgtaatcccagctacttggtaggctgaagcatgagaattgcttaaacctgggaggcagaggttgcagtaagccaagatcatgccactgcattccagcctgggcaacagagtaagactctgtcttaataaataaataagaaaataaaacggaactgcagtgctaacagtaatttatacatttttaaatgttctgagtatgttttgactgggctagtgtaacaatatactaccctgaaagtgcagttttgattgttgttggtgtctttgggtcaggaaagtgaactgtgccaagaagtatttttcagtgacatgaatggattcctgttaattgacaaaaagaggctttgtccaacatcagaattgttgaaactggtgctgttttctgttgcactgggattctgatgatctgggattttccctccttggcacagtaaacaccatgactgtctttattgagaatgtcgtcacagtcctttagtgatagattagttagacccatggttgcaatacctttatctccccaaagaaaataatcaaaagaaagcacaaaagctaccctgtttgcagaatatttcactgacattgatttgtcattaattctaccagagctgacctcattcaggcttgatagaaacaggttcctatgtttagggcagatccctagcctctcgctcacagtgagtctgcatgtcctagattctggttattgctggagcatccattaaagtctaccaaactcaggacagaagaagatagcagtggatttgtaaaaatttttagtttataaattacagtcattggggaaacactagtaaggtcatgtgatcttttggaccaggattttctctctgtcttctctctgggtgtgtgtgtgtgtatgtacagaagggctaccaggaagtgtcaaccatgttagattttctgtagtcttccagaaacagtgcagcccatacaacaggaatcttaattttcctcacagcaaatataacaggatggaacagttagtgttttgttttcacaagtgtccaccactccatctgccctgcatggagagggctctctcactgctagatctaggctgagccatctggaaggatcaaagggtgtgggagtatcaccccctctcaggctgcagaaggtctcgagggtggcgtcacagcaggatttccgccttctgcattgcactgcacagccccatggaacatgaggcacttgaggccttgcttcttggagcctctggggagcagagtaggtcactgccctctgggagtgttttgcagtagttttgtaaatgtgttgctacatagtcaagttcctttgtggcaaagaaatattttgttttgatattaggagccagcccatgtaatgcctctcaggcttgcttgcttagaagaaaaaagtcaccctttgtggtttttaagaaaaaaattctgtgcagatctgttcctcctcctgctccttcccttttctctacatacagtgctcattggaggctcctgctaaaccttcttaaccagagaaataataggtatttgttagacctgagtgtacatttcacatgttatccttcacatatttctcattttcatctagtactttcttaatgcctttgttggagtccgcatcctcatctttaaaaaaaaaaaaaaaaaacagcttagcctaagccacattcactttttttagttcacaaaaaggatttaatagccacaatgtgatttttgccacaactgtgtgattttaatattctctaatatcaagggcggatttagaattgcaggaaatacctggagaaatcacagtggaatgaatttttgctttaagagaaatgagagttggctgtctctgtaattgataatacagcttcatcctagtcccatctgcatttcagaaaataaccctcatctttacaaaacacaggacacttgtgggacagttaactcaagcagctatggggagggaggagattattgaatggtgattaaataatgcaaatggctcttctgtttcttaaagactgtggaagaggtcagactgcccagttgaggtgggcagttcatactgctcagttgaggtggcagtcatttattctgagtcctgttggatagagcctatctcctcaaggctacagaggcttccaggatatggagctgtgcatgttaatggctcagccttgcctccatcagggcacctgcctaacttggagcaagtgggagagcaccctagagtcatcctctgtgctgtttcgtgagttttgcagcggagacttcaccatccggaggagctgtgtttctgtgtcacttgggatatcacctaaaaatgaaacatttgatattttaaggtataaaaaaaaagtaaattggggaacattggctgcagtccctaaaagatactgttgtctgtgcatcaggttagcttgaggtcaccacaggtcctgggagcccagagagtttaggcatactctcctttggaggccagcagcctttcacaaaccctgcctctaaaagggcggtttcacatttgaccatgtttttgcattagcctcagaaactcttgtctttagctgataacctttgagggatgtgagaagcctagttggagcatctgagaaaatgatacctctcaccttcaaattaatcaaatagtttgtccttctagtccccttataaattaataaatggagggctggtcatggtggctcacgcctgtaatcccagcactttgggaggccgaggcgggtggatcacaaggtcaggagttcaagaccagcctgaccaatatggtgaaaccccatctctactaaaaatacaaaaattagccaggtgtagtggcacgctcctgtagtcccagctactcgggaggctgaggcaggagaatcgcttgaacccaggaggtggatgttgcagtgagccgagatcccgccactgcactgcagcctaggcgacagagcaagactccgtctcaaaaaaaaaaaaagaaaaaaaaagaaaagggaagggaatcccattttgtgatgatttgggcacactacttgagctgaggctagcagtcacatgattttggctgtctctgacctgaagcttttgaagtaaggttatgtctcttccctgaagctttgtttatagtggtaatttggtgagtttgagctttgagcttgtcttagaaaataagactgtccacctggggaggggagcttatagggaacccgtgttaactcagaatgctgaagaaagtgcttttagccaacaaaagtaagattactatctagaaggtggaaagaagtcattgcttctgttcctccagcagtcagttgactctaggtttcctttggtttatatccccagttcttaatactaaaacttatttgacttcctatcaggaagcacacaaaaaaagcgtcatttaaaaccctggatataggctttaaaggatacaaaaacagcagcattgtcgttttgccaggttcatcaccattttgatgtgctacccatccttccaccctccctttcctgcccccaagcctcccagccaggccagatgtgaagattctattaatcactgtttcagagaacattaattcttgtatagaataattatctactaaattgcttattatctgtgactaccttgcagagaacatctcaacagtgcagtaaaatagctctcctagacttgagcttccagccaggcatttagatcactcttaagcctttgtggaattctgaggaaaaaaagcaagatgcctcaatgccaatgctgggccataagattctactcccctccctgtagggtggggcgcgtggctcagctttggaaaatcattttgccagtaatattgcctgtgaatccctttaagaagtcgtcctgatctgagcctgtctttctgagcactttggtgctgaattgaaaatggtaagctaaagcagtgacagatccacgtagcctctttaacctctttattatcttgccaaaaaaaaagtttctcaggttaaacctttgtctttaacctccctttgttgtggagaaaatgtgtcactaatcagtggtccaagggatatctagctttggttactcagttcctgcagcataacagatatgacttatgccagggaaggtagaggctgattatggagacacccaggaacaggaataagaagggataggtctgctccacgtagaacctccccagatcggaagttaagtcttggagagtttccaaagtgctgaagtaaaaaggagacttggagggcctttgcttaatgagcaagaggcttgtgtcctcccaagaacatgagggagttcagaagggagctatagctcacagacagaaacctgcccgctcaccccatccctcgtgactgggagcatgtttgctcagaattttctaagaggactctcccttcaaaaatccaatttgctcccagaatgttgtttagcctctgagaatctcactctttcatttccatctgtgaatggacatagatgtgttgctcagggatcagaaacatcagagtccagggcccagtggcatggtgttgcattagtagttagaaaagtaattggtcagctctactgtaaaagaaataagtatgtagtacagttttgtaaatgtcaggtctgttctattgttttgtgatctgaagactgtcaaactggttgataatcaaagaaaaggttggttagaataagtaaaatttcagttagaaagatatagcttaccagttttccatgtgcttaaggaagtcaagaatatttcaggttgttgagaactgttgtaaaatggaattgaagctagtgtctctcaccttcttaggtgtatcagagagaggaagtggaaggccagtagtagcatcttcatacttacttttgccagcccagcctccatttcaaagactttgtcttccatcctatccaatgacatggtcagggatgggctctgaggaggcagtgaggccccaccttggtttgctccactgtggtgtgtagtctccaaacagcttaagggtttttaagttttctcacgattacctccactccactcatctactatcagcatcagaaaggttaacatccctgggaccattctacttataaaagagatgaactagtgtgctttctccccttttccaggtgtgccatccatatacaatctcctcttggccaagttcaacaaatgtttccagggaaccccgtgggttgaggcaaagtagccaagatgtattgagttaagtttttctagaggacaaaagtatttcttgtcccttttccctcatgctcatatgttttagctgaggcgtaaatggccaagttgagtaatatctgtggaactgagacagagagccagggacccatgtacccagggaccagtcccctggggaatcacacagtggctcagactagactgctctatcccaccagaactctgctgctgttcatttccatcaggaccacccaggaaagcaaataagttagccttctcatcattaggtcacctaatctcttgggttgcaggatgagagcatatatagatctcctgtttagagagtgtgttcataattgtagaaagggatagaaaatggaataaccaagaggctgtgtcattttttaagaggatggcaaggatgacctcaaatgagctcaacaaaactgggaatccaaggaatggtgcttgtagggaaagagaggtcagttgtggtccttaaacctcttggcaccttgtgcgggttataaaacaaggagctggagtaaaattgcccttacccccaatccaaatgctgtccaggatttaggagctacccaacctgtggttatatggtgttggtttccattttttgtttgtttgcttgtttccaaaatagccttgcttggtactgcatggaaagttcaagcttttcttcttgcccgctcagggctggcctcttccccgtgtcttcacagcgtccctaaggaagatttttgcagcactctctggagctgaggggagtgaaatttggtccagagaaggcggaaggaaatagttttcctgtttccttttctcgaggtggatgtcctcaggcttccttcacacctccttctcatgggtgcggctggcagtacagtcaggctgtggaggagggctgagaagaaaggggcactggtccagccccaggtttggtctgagacaggtacacagcagataccatcccaccttcctctctaaagaacaggccagccacacatataaccctttccctactttactaatgtatcccttatgtggtaccagcaatggaggacaggcagacttaccccctgccatctagagagaatgttgttattacccgtaaaacttgaccacccccatatcccactcctttttgtaaaaacaaatgcttaaacctgtgagcctgccgttcctttctatgtgttaatcagtttccttccatttgagctgtgtgggagggaagggcattgaaattgtaggttgtaatcttgtgccaaccaataaaaaccagtatttcacacacaaaaaaaaaaaaaaaaaaaaaaaaaaaaaaaaaaaaaaacccggggggctctttttctgcgggggcgggggaaaaggaggtttgagagaaggggcaggggccaaagggggttcccgggacccgagtttttttgggcaacaggggggagaaaccggggggccccccaaggggggggggggaaaaatcggaaaaacccggggttcccggtagatgttcggtcgaac

SEQ ID NO: 313680 - DNA, 7278 bp, Homo sapiens
cttagtttacatcctctcccccaatcttcacacacagagccaaagagcagttatattcttgggataccatgatacctctgggaaaggaattatattcccaaggagaggtcccattggataagaacaataccatgggacttgagtctgaatgccaacttactattcacacatccttcttaaaaacgaacacactgtttcttttcctgacctagagcattctaaagttctgttcaaataaataaagggcaaaataaagtagatttaaccaagtgccaggtggaattcaaaaaacacattcttccagataaattctacctttatggtatggatttgaaagtactttgcaggaaaacagtcagtactctttaaaaagggactgcagggctgggtgtagtggctcacacctgtaatcccagcactttgggaggccaaggcaggtgggtcacttgaggccaggagtttgagaccagcctgaccaacatggcaaaaccccatctctactaaaatacaaaaattagctgggcatgatggtgcactcctgtaatcccagctacttggtaggctgaagcatgagaattgcttaaacctgggaggcagaggttgcagtaagccaagatcatgccactgcattccagcctgggcaacagagtaagactctgtcttaataaataaataagaaaataaaacggaactgcagtgctaacagtaatttatacatttttaaatgttctgagtatgttttgactgggctagtgtaacaatatactaccctgaaagtgcagttttgattgttgttggtgtctttgggtcaggaaagtgaactgtgccaagaagtatttttcagtgacatgaatggattcctgttaatgcaattgactgagagattgtgcttacgctttcttaactgacaaaaagaggctttgtccaacatcagaattgttgaaactggtgctgttttctgttgcactgggattctgatgatctgggattttccctccttggcacagtaaacaccatgactgtctttattgagaatgtcgtcacagtcctttagtgatagattagttagacccatggttgcaatacctttatctccccaaagaaaataatcaaaagaaagcacaaaagctaccctgtttgcagaatatttcactgacattgatttgtcattaattctaccagagctgacctcattcaggcttgatagaaacaggttcctatgtttagggcagatccctagcctctcgctcacagtgagtctgcatgtcctagattctggttattgctggagcatccattaaagtctaccaaactcaggacagaagaagatagcagtggatttgtaaaaatttttagtttataaattacagtcattggggaaacactagtaaggtcatgtgatcttttggaccaggattttctctctgtcttctctctgggtgtgtgtgtgtgtatgtacagaagggctaccaggaagtgtcaaccatgttagattttctgtagtcttccagaaacagtgcagcccatacaacaggaatcttaattttcctcacagcaaatataacaggatggaacagttagtgttttgttttcacaagtgtccaccactccatctgccctgcatggagagggctctctcactgctagatctaggctgagccatctggaaggatcaaagggtgtgggagtatcaccccctctcaggctgcagaaggtctcgagggtggcgtcacagcaggatttccgccttctgcattgcactgcacagccccatggaacatgaggcacttgaggccttgcttcttggagcctctggggagcagagtaggtcactgccctctgggagtgttttgcagtagttttgtaaatgtgttgctacatagtcaagttcctttgtggcaaagaaatattttgttttgatattaggagccagcccatgtaatgcctctcaggcttgcttgcttagaagaaaaaagtcaccctttgtggtttttaagaaaaaaattctgtgcagatctgttcctcctcctgctccttcccttttctctacatacagtgctcattggaggctcctgctaaaccttcttaaccagagaaataataggtatttgttagacctgagtgtacatttcacatgttatccttcacatatttctcattttcatctagtactttcttaatgcctttgttggagtccgcatcctcatctttaaaaaaaaaaaaaaaaaacagcttagcctaagccacattcactttttttagttcacaaaaagcacaactgtgtgattttaatattctctaatatcaagggcggatttagaattgcaggaaatacctggagaaatcacagtggaatgaatttttgctttaagagaaatgagagttggctgtctctgtaattgataatacagcttcatcctagtcccatctgcatttcagaaaataaccctcatctttacaaaacacaggacacttgtgggacagttaactcaagcagctatggggagggaggagattattgaatggtgattaaataatgcaaatggctcttctgtttcttaaagactgtggaagaggtcagactgcccagttgaggtgggcagttcatactgctcagttgaggtggcagtcatttattctgagtcctgttggatagagcctatctcctcaaggctacagaggcttccaggatatggagctgtgcatgttaatggctcagccttgcctccatcagggcacctgcctaacttggagcaagtgggagagcaccctagagtcatcctctgtgctgtttcgtgagttttgcagcggagacttcaccatccggaggagctgtgtttctgtgtcacttgggatatcacctaaaaatgaaacatttgatattttaaggtataaaaaaaaagtaaattggggaacattggctgcagtccctaaaagatactgttgtctgtgcatcaggttagcttgaggtcaccacaggtcctgggagcccagagagtttaggcatactctcctttggaggccagcagcctttcacaaaccctgcctctaaaagggcggtttcacatttgaccatgtttttgcattagcctcagaaactcttgtctttagctgataacctttgagggatgtgagaagcctagttggagcatctgagaaaatgatacctctcaccttcaaattaatcaaatagtttgtccttctagtccccttataaattaataaatggagggctggtcatggtggctcacgcctgtaatcccagcactttgggaggccgaggcgggtggatcacaaggtcaggagttcaagaccagcctgaccaatatggtgaaaccccatctctactaaaaatacaaaaattagccaggtgtagtggcacgctcctgtagtcccagctactcgggaggctgaggcaggagaatcgcttgaacccaggaggtggatgttgcagtgagccgagatcccgccactgcactgcagcctaggcgacagagcaagactccgtctcaaaaaaaaaaaaagaaaaaaaaagaaaagggaagggaatcccattttgtgatgatttgggcacactacttgagctgaggctagcagtcacatgattttggctgtctctgacctgaagcttttgaagtaaggttatgtctcttccctgaagctttgtttatagtggtaatttggtgagtttgagctttgagcttgtcttagaaaataagactgtccacctggggaggggagcttatagggaacccgtgttaactcagaatgctgaagaaagtgcttttagccaacaaaagtaagattactatctagaaggtggaaagaagtcattgcttctgttcctccagcagtcagttgactctaggtttcctttggtttatatccccagttcttaatactaaaacttatttgacttcctatcaggaagcacacaaaaaaagcgtcatttaaaaccctggatataggctttaaaggatacaaaaacagcagcattgtcgttttgccaggttcatcaccattttgatgtgctacccatccttccaccctccctttcctgcccccaagcctcccagccaggccagatgtgaagattctattaatcactgtttcagagaacattaattcttgtatagaataattatctactaaattgcttattatctgtgactaccttgcagagaacatctcaacagtgcagtaaaatagctctcctagacttgagcttccagccaggcatttagatcactcttaagcctttgtggaattctgaggaaaaaaagcaagatgcctcaatgccaatgctgggccataagattctactcccctccctgtagggtggggcgcgtggctcagctttggaaaatcattttgccagtaatattgcctgtgaatccctttaagaagtcgtcctgatctgagcctgtctttctgagcactttggtgctgaattgaaaatggtaagctaaagcagtgacagatccacgtagcctctttaacctctttattatcttgccaaaaaaaaagtttctcaggttaaacctttgtctttaacctccctttgttgtggagaaaatgtgtcactaatcagtggtccaagggatatctagctttggttactcagttcctgcagcataacagatatgacttatgccagggaaggtagaggctgattatggagacacccaggaacaggaataagaagggataggtctgctccacgtagaacctccccagatcggaagttaagtcttggagagtttccaaagtgctgaagtaaaaaggagacttggagggcctttgcttaatgagcaagaggcttgtgtcctcccaagaacatgagggagttcagaagggagctatagctcacagacagaaacctgcccgctcaccccatccctcgtgactgggagcatgtttgctcagaattttctaagaggactctcccttcaaaaatccaatttgctcccagaatgttgtttagcctctgagaatctcactctttcatttccatctgtgaatggacatagatgtgttgctcagggatcagaaacatcagagtccagggcccagtggcatggtgttgcattagtagttagaaaagtaattggtcagctctactgtaaaagaaataagtatgtagtacagttttgtaaatgtcaggtctgttctattgttttgtgatctgaagactgtcaaactggttgataatcaaagaaaaggttggttagaataagtaaaatttcagttagaaagatatagcttaccagttttccatgtgcttaaggaagtcaagaatatttcaggttgttgagaactgttgtaaaatggaattgaagctagtgtctctcaccttcttaggtgtatcagagagaggaagtggaaggccagtagtagcatcttcatacttacttttgccagcccagcctccatttcaaagactttgtcttccatcctatccaatgacatggtcagggatgggctctgaggaggcagtgaggccccaccttggtttgctccactgtggtgtgtagtctccaaacagcttaagggtttttaagttttctcacgattacctccactccactcatctactatcagcatcagaaaggttaacatccctgggaccattctacttataaaagagatgaactagtgtgctttctccccttttccaggtgtgccatccatatacaatctcctcttggccaagttcaacaaatgtttccagggaaccccgtgggttgaggcaaagtagccaagatgtattgagttaagtttttctagaggacaaaagtatttcttgtcccttttccctcatgctcatatgttttagctgaggcgtaaatggccaagttgagtaatatctgtggaactgagacagagagccagggacccatgtacccagggaccagtcccctggggaatcacacagtggctcagactagactgctctatcccaccagaactctgctgctgttcatttccatcaggaccacccaggaaagcaaataagttagccttctcatcattaggtcacctaatctcttgggttgcaggatgagagcatatatagatctcctgtttagagagtgtgttcataattgtagaaagggatagaaaatggaataaccaagaggctgtgtcattttttaagaggatggcaaggatgacctcaaatgagctcaacaaaactgggaatccaaggaatggtgcttgtagggaaagagaggtcagttgtggtccttaaacctcttggcaccttgtgcgggttataaaacaaggagctggagtaaaattgcccttacccccaatccaaatgctgtccaggatttaggagctacccaacctgtggttatatggtgttggtttccattttttgtttgtttgcttgtttccaaaatagccttgcttggtactgcatggaaagttcaagcttttcttcttgcccgctcagggctggcctcttccccgtgtcttcacagcgtccctaaggaagatttttgcagcactctctggagctgaggggagtgaaatttggtccagagaaggcggaaggaaatagttttcctgtttccttttctcgaggtggatgtcctcaggcttccttcacacctccttctcatgggtgcggctggcagtacagtcaggctgtggaggagggctgagaagaaaggggcactggtccagccccaggtttggtctgagacaggtacacagcagataccatcccaccttcctctctaaagaacaggccagccacacatataaccctttccctactttactaatgtatcccttatgtggtaccagcaatggaggacaggcagacttaccccctgccatctagagagaatgttgttattacccgtaaaacttgaccacccccatatcccactcctttttgtaaaaacaaatgcttaaacctgtgagcctgccgttcctttctatgtgttaatcagtttccttccatttgagctgtgtgggagggaagggcattgaaattgtaggttgtaatcttgtgccaaccaataaaaaccagtatttcacacacaaaaaaaaaaaaaaaaaaaaaaaaaaaaaaaaaaaaaaacccggggggctctttttctgcgggggcgggggaaaaggaggtttgagagaaggggcaggggccaaagggggttcccgggacccgagtttttttgggcaacaggggggagaaaccggggggccccccaaggggggggggggaaaaatcggaaaaacccggggttcccggtagatgttcggtcgaac

SEQ ID NO: 313681 - DNA, 7252 bp, Homo sapiens
cttagtttacatcctctcccccaatcttcacacacagagccaaagagcagttatattcttgggataccatgatacctctgggaaaggaattatattcccaaggagaggtcccattggataagaacaataccatgggacttgagtctgaatgccaacttactattcacacatccttcttaaaaacgaacacactgtttcttttcctgacctagagcattctaaagttctgttcaaataaataaagggcaaaataaagtagatttaaccaagtgccaggtggaattcaaaaaacacattcttccagataaattctacctttatggtatggatttgaaagtactttgcaggaaaacagtcagtactctttaaaaagggactgcagggctgggtgtagtggctcacacctgtaatcccagcactttgggaggccaaggcaggtgggtcacttgaggccaggagtttgagaccagcctgaccaacatggcaaaaccccatctctactaaaatacaaaaattagctgggcatgatggtgcactcctgtaatcccagctacttggtaggctgaagcatgagaattgcttaaacctgggaggcagaggttgcagtaagccaagatcatgccactgcattccagcctgggcaacagagtaagactctgtcttaataaataaataagaaaataaaacggaactgcagtgctaacagtaatttatacatttttaaatgttctgagtatgttttgactgggctagtgtaacaatatactaccctgaaagtgcagttttgattgttgttggtgtctttgggtcaggaaagtgaactgtgccaagaagtatttttcagtgacatgaatggattcctgttaatgcaattgactgagagattgtgcttacgctttcttaactgacaaaaagaggctttgtccaacatcagaattgttgaaactggtgctgttttctgttgcactgggattctgatgatctgggattttccctccttggcacagtaaacaccatgactgtctttattgagaatgtcgtcacagtcctttagtgatagattagttagacccatggttgcaatacctttatctccccaaagaaaataatcaaaagaaagcacaaaagctaccctgtttgcagaatatttcactgacattgatttgtcattaattctaccagagctgacctcattcaggcttgatagaaacaggttcctatgtttagggcagatccctagcctctcgctcacagtgagtctgcatgtcctagattctggttattgctggagcatccattaaagtctaccaaactcaggacagaagaagatagcagtggatttgtaaaaatttttagtttataaattacagtcattggggaaacactagtaaggtcatgtgatcttttggaccaggattttctctctgtcttctctctgggtgtgtgtgtgtgtatgtacagaagggctaccaggaagtgtcaaccatgttagattttctgtagtcttccagaaacagtgcagcccatacaacaggaatcttaattttcctcacagcaaatataacaggatggaacagttagtgttttgttttcacaagtgtccaccactccatctgccctgcatggagagggctctctcactgctagatctaggctgagccatctggaaggatcaaagggtgtgggagtatcaccccctctcaggctgcagaaggtctcgagggtggcgtcacagcaggatttccgccttctgcattgcactgcacagccccatggaacatgaggcacttgaggccttgcttcttggagcctctggggagcagagtaggtcactgccctctgggagtgttttgcagtagttttgtaaatgtgttgctacatagtcaagttcctttgtggcaaagaaatattttgttttgatattaggagccagcccatgtaatgcctctcaggcttgcttgcttagaagaaaaaagtcaccctttgtggtttttaagaaaaaaattctgtgcagatctgttcctcctcctgctccttcccttttctctacatacagtgctcattggaggctcctgctaaaccttcttaaccagagaaataataggtatttgttagacctgagtgtacatttcacatgttatccttcacatatttctcattttcatctagtactttcttaatgcctttgttggagtccgcatcctcatctttaaaaaaaaaaaaaaaaaacagcttagcctaagccacattcactttttttagttcacaaaaaggatttaatagccacaatgtgatttttgccacaactgtgtgattttaatattctctaatatcaagggcggatttagaattgcaggaaatacctggagaaatcacagtggaatgaatttttgctttaagagaaatgagagttggctgtctctgtaattgataatacagcttcatcctagtcccatctgcatttcagaaaataaccctcatctttacaaaacacaggacacttgtgggacagttaactcaagcagctatggggagggaggagattattgaatggtgattaaataatgcaaatggctcttctgtttcttaaagactgtggaagaggtcagactgcccagttgaggtgggcagttcatactgctcagttgaggtggcagtcatttattctgagtcctgttggatagagcctatctcctcaaggctacagaggcttccaggatatggagctgtgcatgttaatggctcagccttgcctccatcagggcacctgcctaacttggagcaagtgggagagcaccctagagtcatcctctgtgctgtttcgtgagttttgcagcggagacttcaccatccggaggagctgtgtttctgtgtcacttgggatatcacctaaaaatgaaacatttgatattttaaggtataaaaaaaaagtaaattggggaacattggctgcagtccctaaaagatactgttgtctgtgcatcaggttagcttgaggtcaccacaggtcctgggagcccagagagtttaggcatactctcctttggaggccagcagcctttcacaaaccctgcctctaaaagggcggtttcacatttgaccatgtttttgcattagcctcagaaactcttgtctttagctgataacctttgagggatgtgagaagcctagttggagcatctgagaaaatgatacctctcaccttcaaattaatcaaatagtttgtccttctagtccccttataaattaataaatggagggctggtcatggtggctcacgcctgtaatcccagcactttgggaggccgaggcgggtggatcacaaggtcaggagttcaagaccagcctgaccaatatggtgaaaccccatctctactaaaaatacaaaagcaggagaatcgcttgaacccaggaggtggatgttgcagtgagccgagatcccgccactgcactgcagcctaggcgacagagcaagactccgtctcaaaaaaaaaaaaagaaaaaaaaagaaaagggaagggaatcccattttgtgatgatttgggcacactacttgagctgaggctagcagtcacatgattttggctgtctctgacctgaagcttttgaagtaaggttatgtctcttccctgaagctttgtttatagtggtaatttggtgagtttgagctttgagcttgtcttagaaaataagactgtccacctggggaggggagcttatagggaacccgtgttaactcagaatgctgaagaaagtgcttttagccaacaaaagtaagattactatctagaaggtggaaagaagtcattgcttctgttcctccagcagtcagttgactctaggtttcctttggtttatatccccagttcttaatactaaaacttatttgacttcctatcaggaagcacacaaaaaaagcgtcatttaaaaccctggatataggctttaaaggatacaaaaacagcagcattgtcgttttgccaggttcatcaccattttgatgtgctacccatccttccaccctccctttcctgcccccaagcctcccagccaggccagatgtgaagattctattaatcactgtttcagagaacattaattcttgtatagaataattatctactaaattgcttattatctgtgactaccttgcagagaacatctcaacagtgcagtaaaatagctctcctagacttgagcttccagccaggcatttagatcactcttaagcctttgtggaattctgaggaaaaaaagcaagatgcctcaatgccaatgctgggccataagattctactcccctccctgtagggtggggcgcgtggctcagctttggaaaatcattttgccagtaatattgcctgtgaatccctttaagaagtcgtcctgatctgagcctgtctttctgagcactttggtgctgaattgaaaatggtaagctaaagcagtgacagatccacgtagcctctttaacctctttattatcttgccaaaaaaaaagtttctcaggttaaacctttgtctttaacctccctttgttgtggagaaaatgtgtcactaatcagtggtccaagggatatctagctttggttactcagttcctgcagcataacagatatgacttatgccagggaaggtagaggctgattatggagacacccaggaacaggaataagaagggataggtctgctccacgtagaacctccccagatcggaagttaagtcttggagagtttccaaagtgctgaagtaaaaaggagacttggagggcctttgcttaatgagcaagaggcttgtgtcctcccaagaacatgagggagttcagaagggagctatagctcacagacagaaacctgcccgctcaccccatccctcgtgactgggagcatgtttgctcagaattttctaagaggactctcccttcaaaaatccaatttgctcccagaatgttgtttagcctctgagaatctcactctttcatttccatctgtgaatggacatagatgtgttgctcagggatcagaaacatcagagtccagggcccagtggcatggtgttgcattagtagttagaaaagtaattggtcagctctactgtaaaagaaataagtatgtagtacagttttgtaaatgtcaggtctgttctattgttttgtgatctgaagactgtcaaactggttgataatcaaagaaaaggttggttagaataagtaaaatttcagttagaaagatatagcttaccagttttccatgtgcttaaggaagtcaagaatatttcaggttgttgagaactgttgtaaaatggaattgaagctagtgtctctcaccttcttaggtgtatcagagagaggaagtggaaggccagtagtagcatcttcatacttacttttgccagcccagcctccatttcaaagactttgtcttccatcctatccaatgacatggtcagggatgggctctgaggaggcagtgaggccccaccttggtttgctccactgtggtgtgtagtctccaaacagcttaagggtttttaagttttctcacgattacctccactccactcatctactatcagcatcagaaaggttaacatccctgggaccattctacttataaaagagatgaactagtgtgctttctccccttttccaggtgtgccatccatatacaatctcctcttggccaagttcaacaaatgtttccagggaaccccgtgggttgaggcaaagtagccaagatgtattgagttaagtttttctagaggacaaaagtatttcttgtcccttttccctcatgctcatatgttttagctgaggcgtaaatggccaagttgagtaatatctgtggaactgagacagagagccagggacccatgtacccagggaccagtcccctggggaatcacacagtggctcagactagactgctctatcccaccagaactctgctgctgttcatttccatcaggaccacccaggaaagcaaataagttagccttctcatcattaggtcacctaatctcttgggttgcaggatgagagcatatatagatctcctgtttagagagtgtgttcataattgtagaaagggatagaaaatggaataaccaagaggctgtgtcattttttaagaggatggcaaggatgacctcaaatgagctcaacaaaactgggaatccaaggaatggtgcttgtagggaaagagaggtcagttgtggtccttaaacctcttggcaccttgtgcgggttataaaacaaggagctggagtaaaattgcccttacccccaatccaaatgctgtccaggatttaggagctacccaacctgtggttatatggtgttggtttccattttttgtttgtttgcttgtttccaaaatagccttgcttggtactgcatggaaagttcaagcttttcttcttgcccgctcagggctggcctcttccccgtgtcttcacagcgtccctaaggaagatttttgcagcactctctggagctgaggggagtgaaatttggtccagagaaggcggaaggaaatagttttcctgtttccttttctcgaggtggatgtcctcaggcttccttcacacctccttctcatgggtgcggctggcagtacagtcaggctgtggaggagggctgagaagaaaggggcactggtccagccccaggtttggtctgagacaggtacacagcagataccatcccaccttcctctctaaagaacaggccagccacacatataaccctttccctactttactaatgtatcccttatgtggtaccagcaatggaggacaggcagacttaccccctgccatctagagagaatgttgttattacccgtaaaacttgaccacccccatatcccactcctttttgtaaaaacaaatgcttaaacctgtgagcctgccgttcctttctatgtgttaatcagtttccttccatttgagctgtgtgggagggaagggcattgaaattgtaggttgtaatcttgtgccaaccaataaaaaccagtatttcacacacaaaaaaaaaaaaaaaaaaaaaaaaaaaaaaaaaaaaaaacccggggggctctttttctgcgggggcgggggaaaaggaggtttgagagaaggggcaggggccaaagggggttcccgggacccgagtttttttgggcaacaggggggagaaaccggggggccccccaaggggggggggggaaaaatcggaaaaacccggggttcccggtagatgttcggtcgaac

SEQ ID NO: 313682 - DNA, 7252 bp, Homo sapiens
cttagtttacatcctctcccccaatcttcacacacagagccaaagagcagttatattcttgggataccatgatacctctgggaaaggaattatattcccaaggagaggtcccattggataagaacaataccatgggacttgagtctgaatgccaacttactattcacacatccttcttaaaaacgaacacactgtttcttttcctgacctagagcattctaaagttctgttcaaataaataaagggcaaaataaagtagatttaaccaagtgccaggtggaattcaaaaaacacattcttccagataaattctacctttatggtatggatttgaaagtactttgcaggaaaacagtcagtactctttaaaaagggactgcagggctgggtgtagtggctcacacctgtaatcccagcactttgggaggccaaggcaggtgggtcacttgaggccaggagtttgagaccagcctgaccaacatggcaaaaccccatctctactaaaatacaaaaattagctgggcatgatggtgcactcctgtaatcccagctacttggtaggctgaagcatgagaattgcttaaacctgggaggcagaggttgcagtaagccaagatcatgccactgcattccagcctgggcaacagagtaagactctgtcttaataaataaataagaaaataaaacggaactgcagtgctaacagtaatttatacatttttaaatgttctgagtatgttttgactgggctagtgtaacaatatactaccctgaaagtgcagttttgattgttgttggtgtctttgggtcaggaaagtgaactgtgccaagaagtatttttcagtgacatgaatggattcctgttaatgcaattgactgagagattgtgcttacgctttcttaactgacaaaaagaggctttgtccaacatcagaattgttgaaactggtgctgttttctgttgcactgggattctgatgatctgggattttccctccttggcacagtaaacaccatgactgtctttattgagaatgtcgtcacagtcctttagtgatagattagttagacccatggttgcaatacctttatctccccaaagaaaataatcaaaagaaagcacaaaagctaccctgtttgcagaatatttcactgacattgatttgtcattaattctaccagagctgacctcattcaggcttgatagaaacaggttcctatgtttagggcagatccctagcctctcgctcacagtgagtctgcatgtcctagattctggttattgctggagcatccattaaagtctaccaaactcaggacagaagaagatagcagtggatttgtaaaaatttttagtttataaattacagtcattggggaaacactagtaaggtcatgtgatcttttggaccaggattttctctctgtcttctctctgggtgtgtgtgtgtgtatgtacagaagggctaccaggaagtgtcaaccatgttagattttctgtagtcttccagaaacagtgcagcccatacaacaggaatcttaattttcctcacagcaaatataacaggatggaacagttagtgttttgttttcacaagtgtccaccactccatctgccctgcatggagagggctctctcactgctagatctaggctgagccatctggaaggatcaaagggtgtgggagtatcaccccctctcaggctgcagaaggtctcgagggtggcgtcacagcaggatttccgccttctgcattgcactgcacagccccatggaacatgaggcacttgaggccttgcttcttggagcctctggggagcagagtaggtcactgccctctgggagtgttttgcagtagttttgtaaatgtgttgctacatagtcaagttcctttgtggcaaagaaatattttgttttgatattaggagccagcccatgtaatgcctctcaggcttgcttgcttagaagaaaaaagtcaccctttgtggtttttaagaaaaaaattctgtgcagatctgttcctcctcctgctccttcccttttctctacatacagtgctcattggaggctcctgctaaaccttcttaaccagagaaataataggtatttgttagacctgagtgtacatttcacatgttatccttcacatatttctcattttcatctagtactttcttaatgcctttgttggagtccgcatcctcatctttaaaaaaaaaaaaaaaaaacagcttagcctaagccacattcactttttttagttcacaaaaaggatttaatagccacaatgtgatttttgccacaactgtgtgattttaatattctctaatatcaagggcggatttagaattgcaggaaatacctggagaaatcacagtggaatgaatttttgctttaagagaaatgagagttggctgtctctgtaattgataatacagcttcatcctagtcccatctgcatttcagaaaataaccctcatctttacaattattgaatggtgattaaataatgcaaatggctcttctgtttcttaaagactgtggaagaggtcagactgcccagttgaggtgggcagttcatactgctcagttgaggtggcagtcatttattctgagtcctgttggatagagcctatctcctcaaggctacagaggcttccaggatatggagctgtgcatgttaatggctcagccttgcctccatcagggcacctgcctaacttggagcaagtgggagagcaccctagagtcatcctctgtgctgtttcgtgagttttgcagcggagacttcaccatccggaggagctgtgtttctgtgtcacttgggatatcacctaaaaatgaaacatttgatattttaaggtataaaaaaaaagtaaattggggaacattggctgcagtccctaaaagatactgttgtctgtgcatcaggttagcttgaggtcaccacaggtcctgggagcccagagagtttaggcatactctcctttggaggccagcagcctttcacaaaccctgcctctaaaagggcggtttcacatttgaccatgtttttgcattagcctcagaaactcttgtctttagctgataacctttgagggatgtgagaagcctagttggagcatctgagaaaatgatacctctcaccttcaaattaatcaaatagtttgtccttctagtccccttataaattaataaatggagggctggtcatggtggctcacgcctgtaatcccagcactttgggaggccgaggcgggtggatcacaaggtcaggagttcaagaccagcctgaccaatatggtgaaaccccatctctactaaaaatacaaaaattagccaggtgtagtggcacgctcctgtagtcccagctactcgggaggctgaggcaggagaatcgcttgaacccaggaggtggatgttgcagtgagccgagatcccgccactgcactgcagcctaggcgacagagcaagactccgtctcaaaaaaaaaaaaagaaaaaaaaagaaaagggaagggaatcccattttgtgatgatttgggcacactacttgagctgaggctagcagtcacatgattttggctgtctctgacctgaagcttttgaagtaaggttatgtctcttccctgaagctttgtttatagtggtaatttggtgagtttgagctttgagcttgtcttagaaaataagactgtccacctggggaggggagcttatagggaacccgtgttaactcagaatgctgaagaaagtgcttttagccaacaaaagtaagattactatctagaaggtggaaagaagtcattgcttctgttcctccagcagtcagttgactctaggtttcctttggtttatatccccagttcttaatactaaaacttatttgacttcctatcaggaagcacacaaaaaaagcgtcatttaaaaccctggatataggctttaaaggatacaaaaacagcagcattgtcgttttgccaggttcatcaccattttgatgtgctacccatccttccaccctccctttcctgcccccaagcctcccagccaggccagatgtgaagattctattaatcactgtttcagagaacattaattcttgtatagaataattatctactaaattgcttattatctgtgactaccttgcagagaacatctcaacagtgcagtaaaatagctctcctagacttgagcttccagccaggcatttagatcactcttaagcctttgtggaattctgaggaaaaaaagcaagatgcctcaatgccaatgctgggccataagattctactcccctccctgtagggtggggcgcgtggctcagctttggaaaatcattttgccagtaatattgcctgtgaatccctttaagaagtcgtcctgatctgagcctgtctttctgagcactttggtgctgaattgaaaatggtaagctaaagcagtgacagatccacgtagcctctttaacctctttattatcttgccaaaaaaaaagtttctcaggttaaacctttgtctttaacctccctttgttgtggagaaaatgtgtcactaatcagtggtccaagggatatctagctttggttactcagttcctgcagcataacagatatgacttatgccagggaaggtagaggctgattatggagacacccaggaacaggaataagaagggataggtctgctccacgtagaacctccccagatcggaagttaagtcttggagagtttccaaagtgctgaagtaaaaaggagacttggagggcctttgcttaatgagcaagaggcttgtgtcctcccaagaacatgagggagttcagaagggagctatagctcacagacagaaacctgcccgctcaccccatccctcgtgactgggagcatgtttgctcagaattttctaagaggactctcccttcaaaaatccaatttgctcccagaatgttgtttagcctctgagaatctcactctttcatttccatctgtgaatggacatagatgtgttgctcagggatcagaaacatcagagtccagggcccagtggcatggtgttgcattagtagttagaaaagtaattggtcagctctactgtaaaagaaataagtatgtagtacagttttgtaaatgtcaggtctgttctattgttttgtgatctgaagactgtcaaactggttgataatcaaagaaaaggttggttagaataagtaaaatttcagttagaaagatatagcttaccagttttccatgtgcttaaggaagtcaagaatatttcaggttgttgagaactgttgtaaaatggaattgaagctagtgtctctcaccttcttaggtgtatcagagagaggaagtggaaggccagtagtagcatcttcatacttacttttgccagcccagcctccatttcaaagactttgtcttccatcctatccaatgacatggtcagggatgggctctgaggaggcagtgaggccccaccttggtttgctccactgtggtgtgtagtctccaaacagcttaagggtttttaagttttctcacgattacctccactccactcatctactatcagcatcagaaaggttaacatccctgggaccattctacttataaaagagatgaactagtgtgctttctccccttttccaggtgtgccatccatatacaatctcctcttggccaagttcaacaaatgtttccagggaaccccgtgggttgaggcaaagtagccaagatgtattgagttaagtttttctagaggacaaaagtatttcttgtcccttttccctcatgctcatatgttttagctgaggcgtaaatggccaagttgagtaatatctgtggaactgagacagagagccagggacccatgtacccagggaccagtcccctggggaatcacacagtggctcagactagactgctctatcccaccagaactctgctgctgttcatttccatcaggaccacccaggaaagcaaataagttagccttctcatcattaggtcacctaatctcttgggttgcaggatgagagcatatatagatctcctgtttagagagtgtgttcataattgtagaaagggatagaaaatggaataaccaagaggctgtgtcattttttaagaggatggcaaggatgacctcaaatgagctcaacaaaactgggaatccaaggaatggtgcttgtagggaaagagaggtcagttgtggtccttaaacctcttggcaccttgtgcgggttataaaacaaggagctggagtaaaattgcccttacccccaatccaaatgctgtccaggatttaggagctacccaacctgtggttatatggtgttggtttccattttttgtttgtttgcttgtttccaaaatagccttgcttggtactgcatggaaagttcaagcttttcttcttgcccgctcagggctggcctcttccccgtgtcttcacagcgtccctaaggaagatttttgcagcactctctggagctgaggggagtgaaatttggtccagagaaggcggaaggaaatagttttcctgtttccttttctcgaggtggatgtcctcaggcttccttcacacctccttctcatgggtgcggctggcagtacagtcaggctgtggaggagggctgagaagaaaggggcactggtccagccccaggtttggtctgagacaggtacacagcagataccatcccaccttcctctctaaagaacaggccagccacacatataaccctttccctactttactaatgtatcccttatgtggtaccagcaatggaggacaggcagacttaccccctgccatctagagagaatgttgttattacccgtaaaacttgaccacccccatatcccactcctttttgtaaaaacaaatgcttaaacctgtgagcctgccgttcctttctatgtgttaatcagtttccttccatttgagctgtgtgggagggaagggcattgaaattgtaggttgtaatcttgtgccaaccaataaaaaccagtatttcacacacaaaaaaaaaaaaaaaaaaaaaaaaaaaaaaaaaaaaaaacccggggggctctttttctgcgggggcgggggaaaaggaggtttgagagaaggggcaggggccaaagggggttcccgggacccgagtttttttgggcaacaggggggagaaaccggggggccccccaaggggggggggggaaaaatcggaaaaacccggggttcccggtagatgttcggtcgaac

SEQ ID NO: 313683 - DNA, 7252 bp, Homo sapiens
cttagtttacatcctctcccccaatcttcacacacagagccaaagagcagttatattcttgggataccatgatacctctgggaaaggaattatattcccaaggagaggtcccattggataagaacaataccatgggacttgagtctgaatgccaacttactattcacacatccttcttaaaaacgaacacactgtttcttttcctgacctagagcattctaaagttctgttcaaataaataaagggcaaaataaagtagatttaaccaagtgccaggtggaattcaaaaaacacattcttccagataaattctacctttatggtatggatttgaaagtactttgcaggaaaacagtcagtactctttaaaaagggactgcagggctgggtgtagtggctcacacctgtaatcccagcactttgggaggccaaggcaggtgggtcacttgaggccaggagtttgagaccagcctgaccaacatggcaaaaccccatctctactaaaatacaaaaattagctgggcatgatggtgcactcctgtaatcccagctacttggtaggctgaagcatgagaattgcttaaacctgggaggcagaggttgcagtaagccaagatcatgccactgcattccagcctgggcaacagagtaagactctgtcttaataaataaataagaaaataaaacggaactgcagtgctaacagtaatttatacatttttaaatgttctgagtatgttttgactgggctagtgtaacaatatactaccctgaaagtgcagttttgattgttgttggtgtctttgggtcaggaaagtgaactgtgccaagaagtatttttcagtgacatgaatggattcctgttaatgcaattgactgagagattgtgcttacgctttcttaactgacaaaaagaggctttgtccaacatcagaattgttgaaactggtgctgttttctgttgcactgggattctgatgatctgggattttccctccttggcacagtaaacaccatgactgtctttattgagaatgtcgtcacagtcctttagtgatagattagttagacccatggttgcaatacctttatctccccaaagaaaataatcaaaagaaagcacaaaagctaccctgtttgcagaatatttcactgacattgatttgtcattaattctaccagagctgacctcattcaggcttgatagaaacaggttcctatgtttagggcagatccctagcctctcgctcacagtgagtctgcatgtcctagattctggttattgctggagcatccattaaagtctaccaaactcaggacagaagaagatagcagtggatttgtaaaaatttttagtttataaattacagtcattggggaaacactagtaaggtcatgtgatcttttggaccaggattttctctctgtcttctctctgggtgtgtgtgtgtgtatgtacagaagggctaccaggaagtgtcaaccatgttagattttctgtagtcttccagaaacagtgcagcccatacaacaggaatcttaattttcctcacagcaaatataacaggatggaacagttagtgttttgttttcacaagtgtccaccactccatctgccctgcatggagagggctctctcactgctagatctaggctgagccatctggaaggatcaaagggtgtgggagtatcaccccctctcaggctgcagaaggtctcgagggtggcgtcacagcaggatttccgccttctgcattgcactgcacagccccatggaacatgaggcacttgaggccttgcttcttggagcctctggggagcagagtaggtcactgccctctgggagtgttttgcagtagttttgtaaatgtgttgctacatagtcaagttcctttgtggcaaagaaatattttgttttgatattaggagccagcccatgtaatgcctctcaggcttgcttgcttagaagaaaaaagtcaccctttgtggtttttaagaaaaaaattctgtgcagatctgttcctcctcctgctccttcccttttctctacatacagtgctcattggaggctcctgctaaaccttcttaaccagagaaataataggtatttgttagacctgagtgtacatttcacatgttatccttcacatatttctcattttcatctagtactttcttaatgcctttgttggagtccgcatcctcatctttaaaaaaaaaaaaaaaaaacagcttagcctaagccacattcactttttttagttcacaaaaaggatttaatagccacaatgtgatttttgccacaactgtgtgattttaatattctctaatatcaagggcggatttagaattgcaggaaatacctggagaaatcacagtggaatgaatttttgctttaagagaaatgagagttggctgtctctgtaattgataatacagcttcatcctagtcccatctgcatttcagaaaataaccctcatctttacaaaacacaggacacttgtgggacagttaactcaagcagctatggggagggaggagattattgaatggtgattaaataatgcaaatggctcttctgtttcttaaagactgtggaagaggtcagactgcccagttgaggtgggcagttcatactgctcagttgaggtggcagtcatttattctgagtcctgttggatagagcctatctcctcaaggctacagaggcttccaggatatggagctgtgcatgttaatggctcagccttgcctccatcagggcacctgcctaacttggagcaagtgggagagcaccctagagtcatcctctgtgctgtttcgtgagttttgcagcggagacttcaccatccggaggagctgtgtttctgtgtcacttgggatatcacctaaaaatgaaacatttgatattttaaggtataaaaaaaaagtaaattggggaacattggctgcagtccctaaaagatactgttgtctgtgcatcaggttagcttgaggtcaccacaggtcctgggagcccagagagtttaggcatactctcctttggaggccagcagcctttcacaaaccctgcctctaaaagggcggtttcacatttgaccatgtttttgcattagcctcagaaactcttgtctttagctgataacctttgagggatgtgagaagcctagttggagcatctgagttataaattaataaatggagggctggtcatggtggctcacgcctgtaatcccagcactttgggaggccgaggcgggtggatcacaaggtcaggagttcaagaccagcctgaccaatatggtgaaaccccatctctactaaaaatacaaaaattagccaggtgtagtggcacgctcctgtagtcccagctactcgggaggctgaggcaggagaatcgcttgaacccaggaggtggatgttgcagtgagccgagatcccgccactgcactgcagcctaggcgacagagcaagactccgtctcaaaaaaaaaaaaagaaaaaaaaagaaaagggaagggaatcccattttgtgatgatttgggcacactacttgagctgaggctagcagtcacatgattttggctgtctctgacctgaagcttttgaagtaaggttatgtctcttccctgaagctttgtttatagtggtaatttggtgagtttgagctttgagcttgtcttagaaaataagactgtccacctggggaggggagcttatagggaacccgtgttaactcagaatgctgaagaaagtgcttttagccaacaaaagtaagattactatctagaaggtggaaagaagtcattgcttctgttcctccagcagtcagttgactctaggtttcctttggtttatatccccagttcttaatactaaaacttatttgacttcctatcaggaagcacacaaaaaaagcgtcatttaaaaccctggatataggctttaaaggatacaaaaacagcagcattgtcgttttgccaggttcatcaccattttgatgtgctacccatccttccaccctccctttcctgcccccaagcctcccagccaggccagatgtgaagattctattaatcactgtttcagagaacattaattcttgtatagaataattatctactaaattgcttattatctgtgactaccttgcagagaacatctcaacagtgcagtaaaatagctctcctagacttgagcttccagccaggcatttagatcactcttaagcctttgtggaattctgaggaaaaaaagcaagatgcctcaatgccaatgctgggccataagattctactcccctccctgtagggtggggcgcgtggctcagctttggaaaatcattttgccagtaatattgcctgtgaatccctttaagaagtcgtcctgatctgagcctgtctttctgagcactttggtgctgaattgaaaatggtaagctaaagcagtgacagatccacgtagcctctttaacctctttattatcttgccaaaaaaaaagtttctcaggttaaacctttgtctttaacctccctttgttgtggagaaaatgtgtcactaatcagtggtccaagggatatctagctttggttactcagttcctgcagcataacagatatgacttatgccagggaaggtagaggctgattatggagacacccaggaacaggaataagaagggataggtctgctccacgtagaacctccccagatcggaagttaagtcttggagagtttccaaagtgctgaagtaaaaaggagacttggagggcctttgcttaatgagcaagaggcttgtgtcctcccaagaacatgagggagttcagaagggagctatagctcacagacagaaacctgcccgctcaccccatccctcgtgactgggagcatgtttgctcagaattttctaagaggactctcccttcaaaaatccaatttgctcccagaatgttgtttagcctctgagaatctcactctttcatttccatctgtgaatggacatagatgtgttgctcagggatcagaaacatcagagtccagggcccagtggcatggtgttgcattagtagttagaaaagtaattggtcagctctactgtaaaagaaataagtatgtagtacagttttgtaaatgtcaggtctgttctattgttttgtgatctgaagactgtcaaactggttgataatcaaagaaaaggttggttagaataagtaaaatttcagttagaaagatatagcttaccagttttccatgtgcttaaggaagtcaagaatatttcaggttgttgagaactgttgtaaaatggaattgaagctagtgtctctcaccttcttaggtgtatcagagagaggaagtggaaggccagtagtagcatcttcatacttacttttgccagcccagcctccatttcaaagactttgtcttccatcctatccaatgacatggtcagggatgggctctgaggaggcagtgaggccccaccttggtttgctccactgtggtgtgtagtctccaaacagcttaagggtttttaagttttctcacgattacctccactccactcatctactatcagcatcagaaaggttaacatccctgggaccattctacttataaaagagatgaactagtgtgctttctccccttttccaggtgtgccatccatatacaatctcctcttggccaagttcaacaaatgtttccagggaaccccgtgggttgaggcaaagtagccaagatgtattgagttaagtttttctagaggacaaaagtatttcttgtcccttttccctcatgctcatatgttttagctgaggcgtaaatggccaagttgagtaatatctgtggaactgagacagagagccagggacccatgtacccagggaccagtcccctggggaatcacacagtggctcagactagactgctctatcccaccagaactctgctgctgttcatttccatcaggaccacccaggaaagcaaataagttagccttctcatcattaggtcacctaatctcttgggttgcaggatgagagcatatatagatctcctgtttagagagtgtgttcataattgtagaaagggatagaaaatggaataaccaagaggctgtgtcattttttaagaggatggcaaggatgacctcaaatgagctcaacaaaactgggaatccaaggaatggtgcttgtagggaaagagaggtcagttgtggtccttaaacctcttggcaccttgtgcgggttataaaacaaggagctggagtaaaattgcccttacccccaatccaaatgctgtccaggatttaggagctacccaacctgtggttatatggtgttggtttccattttttgtttgtttgcttgtttccaaaatagccttgcttggtactgcatggaaagttcaagcttttcttcttgcccgctcagggctggcctcttccccgtgtcttcacagcgtccctaaggaagatttttgcagcactctctggagctgaggggagtgaaatttggtccagagaaggcggaaggaaatagttttcctgtttccttttctcgaggtggatgtcctcaggcttccttcacacctccttctcatgggtgcggctggcagtacagtcaggctgtggaggagggctgagaagaaaggggcactggtccagccccaggtttggtctgagacaggtacacagcagataccatcccaccttcctctctaaagaacaggccagccacacatataaccctttccctactttactaatgtatcccttatgtggtaccagcaatggaggacaggcagacttaccccctgccatctagagagaatgttgttattacccgtaaaacttgaccacccccatatcccactcctttttgtaaaaacaaatgcttaaacctgtgagcctgccgttcctttctatgtgttaatcagtttccttccatttgagctgtgtgggagggaagggcattgaaattgtaggttgtaatcttgtgccaaccaataaaaaccagtatttcacacacaaaaaaaaaaaaaaaaaaaaaaaaaaaaaaaaaaaaaaacccggggggctctttttctgcgggggcgggggaaaaggaggtttgagagaaggggcaggggccaaagggggttcccgggacccgagtttttttgggcaacaggggggagaaaccggggggccccccaaggggggggggggaaaaatcggaaaaacccggggttcccggtagatgttcggtcgaac

SEQ ID NO: 313684 - DNA, 7252 bp, Homo sapiens
cttagtttacatcctctcccccaatcttcacacacagagccaaagagcagttatattcttgggataccatgatacctctgggaaaggaattatattcccaaggagaggtcccattggataagaacaataccatgggacttgagtctgaatgccaacttactattcacacatccttcttaaaaacgaacacactgtttcttttcctgacctagagcattctaaagttctgttcaaataaataaagggcaaaataaagtagatttaaccaagtgccaggtggaattcaaaaaacacattcttccagataaattctacctttatggtatggatttgaaagtactttgcaggaaaacagtcagtactctttaaaaagggactgcagggctgggtgtagtggctcacacctgtaatcccagcactttgggaggccaaggcaggtgggtcacttgaggccaggagtttgagaccagcctgaccaacatggcaaaaccccatctctactaaaatacaaaaattagctgggcatgatggtgcactcctgtaatcccagctacttggtaggctgaagcatgagaattgcttaaacctgggaggcagaggttgcagtaagccaagatcatgccactgcattccagcctgggcaacagagtaagactctgtcttaataaataaataagaaaataaaacggaactgcagtgctaacagtaatttatacatttttaaatgttctgagtatgttttgactgggctagtgtaacaatatactaccctgaaagtgcagttttgattgttgttggtgtctttgggtcaggaaagtgaactgtgccaagaagtatttttcagtgacatgaatggattcctgttaatgcaattgactgagagattgtgcttacgctttcttaactgacaaaaagaggctttgtccaacatcagaattgttgaaactggtgctgttttctgttgcactgggattctgatgatctgggattttccctccttggcacagtaaacaccatgactgtctttattgagaatgtcgtcacagtcctttagtgatagattagttagacccatggttgcaatacctttatctccccaaagaaaataatcaaaagaaagcacaaaagctaccctgtttgcagaatatttcactgacattgatttgtcattaattctaccagagctgacctcattcaggcttgatagaaacaggttcctatgtttagggcagatccctagcctctcgctcacagtgagtctgcatgtcctagattctggttattgctggagcatccattaaagtctaccaaactcaggacagaagaagatagcagtggatttgtaaaaatttttagtttataaattacagtcattggggaaacactagtaaggtcatgtgatcttttggaccaggattttctctctgtcttctctctgggtgtgtgtgtgtgtatgtacagaagggctaccaggaagtgtcaaccatgttagattttctgtagtcttccagaaacagtgcagcccatacaacaggaatcttaattttcctcacagcaaatataacaggatggaacagttagtgttttgttttcacaagtgtccaccactccatctgccctgcatggagagggctctctcactgctagatctaggctgagccatctggaaggatcaaagggtgtgggagtatcaccccctctcaggctgcagaaggtctcgagggtggcgtcacagcaggatttccgccttctgcattgcactgcacagccccatggaacatgaggcacttgaggccttgcttcttggagcctctggggagcagagtaggtcactgccctctgggagtgttttgcagtagttttgtaaatgtgttgctacatagtcaagttcctttgtggcaaagaaatattttgttttgatattaggagccagcccatgtaatgcctctcaggcttgcttgcttagaagaaaaaagtcaccctttgtggtttttaagaaaaaaattctgtgcagatctgttcctcctcctgctccttcccttttctctacatacagtgctcattggaggctcctgctaaaccttcttaaccagagaaataataggtatttgttagacctgagtgtacatttcacatgttatccttcacatatttctcattttcatctagtactttcttaatgcctttgttggagtccgcatcctcatctttaaaaaaaaaaaaaaaaaacagcttagcctaagccacattcactttttttagttcacaaaaaggatttaatagccacaatgtgatttttgccacaactgtgtgattttaatattctctaatatcaagggcggatttagaattgcaggaaatacctggagaaatcacagtggaatgaatttttgctttaagagaaatgagagttggctgtctctgtaattgataatacagcttcatcctagtcccatctgcatttcagaaaataaccctcatctttacaaaacacaggacacttgtgggacagttaactcaagcagctatggggagggaggagattattgaatggtgattaaataatgcaaatggctcttctgtttcttaaagactgtggaagaggtcagactgcccagttgaggtgggcagttcatactgctcagttgaggtggcagtcatttattctgagtcctgttggatagagcctatctcctcaaggctacagaggcttccaggatatggagctgtgcatgttaatggctcagccttgcctccatcagggcacctgcctaacttggagcaagtgggagagcaccctagagtcatcctctgtgctgtttcgtgagttttgcagcggagacttcaccatccggaggagctgtgtttctgtgtcacttgggatatcacctaaaaatgaaacatttgatattttaaggtataaaaaaaaagtaaattggggaacattggctgcagtccctaaaagatactgttgtctgtgcatcaggttagcttgaggtcaccacaggtcctgggagcccagagagtttaggcatactctcctttggaggccagcagcctttcacaaaccctgcctctaaaagggcggtttcacatttgaccatgtttttgcattagcctcagaaactcttgtctttagctgataacctttgagggatgtgagaagcctagttggagcatctgagaaaatgatacctctcaccttcaaattaatcaaatagtttgtccttctagtccccttataaattaataaatggagggctggtcatggtggctcacgcctgtaatcccagcactttgggaggccgaggcgggtggatcacaaggtcaggagttcaagaccagcctgaccaatatggtgaaaccccatctctactaaaaatacaaaaattagccaggtgtagtggcacgctcctgtagtcccagctactcgggaggctgaggcaggagaatcgcttgaacccaggaggtggatgttgcagtgagccgagatcccgccactgcactgcagcctaggcgacagagcaagactccgtctcaaaaaaaaaaaaagaaaaaaaaagaaaagggaagggaatcccattttgtgatgatttgggcacactacttgagctgaggctagcagtcacatgattttggctgtctctgacctgaagcttttgaagtaaggttatgtctcttccctgaagctttgtttatagtggtaatttggtgagtttgagctttgagcttgtcttagaaaataagactgtccacctggggaggggagcttatagggaacccgtgttaactcagaatgctgaagaaagtgcttttagccaacaaaagtaagattactatctagaaggtggaaagaagtcattgcttctgttcctccagcagtcagttgactctaggtttcctttggtttatatccccagttcttaatactaaaacttatttgacttcctatcaggaagcacacaaaaaaagcgtcatttaaaaccctggatataggctttaaaggatacaaaaacagcagcattgtcgttttgccaggttcatcaccattttgatgtgctacccatccttccaccctccctttcctgcccccaagcctcccagccaggccagatgtgaagattctattaatcactgtttcagagaacattaattcttgtatagaataattatctactaaattgcttattatctgtgactaccttgcagagaacatctcaacagtgcagtaaaatagctctcctagacttgagcttccagccaggcatttagatcactcttaagcctttgtggaattctgaggaaaaaaagcaagatgcctcaatgccaatgctgggccataagattctactcccctccctgtagggtggggcgcgtggctcagctttggaaaatcattttgccagtaatattgcctgtgaatccctttaagaagtcgtcctgatctgagcctgtctttctgagcactttggtgctgaattgaaaatggtaagctaaagcagtgacagatccacgtagcctctttaacctctttattatcttgccaaaaaaaaagtttctcaggttaaacctttgtctttaacctccctttgttgtggagaaaatgtgtcactaatcagtggtccaagggatatctagctttggttactcagttcctgcagcataacagatatgacttatgccagggaaggtagaggctgattatggagacacccaggaacaggaataagaagggataggtctgctccacgtagaacctccccagatcggaagttaagtcttggagagtttccaaagtgctgaagtaaaaaggagacttggagggcctttgcttaatgagcaagaggcttgtgtcctcccaagaacatgagggagttcagaagggagctatagctcacagacagaaacctgcccgctcaccccatccctcgtgactgggagcatgtttgctcagaattttctaagaggactctcccttcaaaaatccaatttgctcccagaatgttgtttagcctctgagaatctcactctttcatttccatctgtgaatggacatagatgtgttgctcagggatcagaaacatcagagtccagggcccagtggcatggtgttgcattagtagttagaaaagtaattggtcagctctactgtaaaagaaataagtatgtagtacagttttgtaaatgtcaggtctgttctattgttttgtgatctgaagactgtcaaactggttgataatcaaagaaaaggttggttagaataagtaaaatttcagttagaaagatatagcttaccagttttccatgtgcttaaggaagtcaagaatatttcaggttgttgagaactgttgtaaaatggaattgaagctagtgtctctcaccttcttaggtgtatcagagagaggaagtggaaggccagtagtagcatcttcatacttacttttgccagcccagcctccatttcaaagactttgtcttccatcctatccaatgacatggtcagggatgggctctgaggaggcagtgaggccccaccttggtttgctccactgtggtgtgtagtctccaaacagcttaagggtttttaagttttctcacgattacctccactccactcatctactatcagcatcagaaaggttaacatccctgggaccattctacttataaaagagatgaactagtgtgctttctccccttttccaggtgtgccatccatatacaatctcctcttggccaagttcaacaaatgtttccagggaaccccgtgggttgaggcaaagtagccaagatgtattgagttaagtttttctagaggacaaaagtatttcttgtcccttttccctcatgctcatatgttttagctgaggcgtaaatggccaagttgagtaatatctgtggaactgagacagagagccagggacccatgtacccagggaccagtcccctggggaatcacacagtggctcagactagactgctctatcccaccagaactctgctgctgttcatttccatcaggaccacccaggaaagcaaataagttagccttctcatcattaggtcacctaatctcttgggttgcaggatgagagcatatatagatctcctgtttagagagtgtgttcataattgtagaaagggatagaaaatggaataaccaagaggctgtgtcattttttaagaggatggcaaggatgacctcaaatgagctcaacaaaactgggaatccaaggaatggtgcttgtagggaaagagaggtcagttgtggtccttaaacctcttggcaccttgtgcgggttataaaacaaggagctggagtaaaattgcccttacccccaatccaaatgctgtccaggatttaggagctacccaacctgtggttatatggtgttggtttccattttttgtttgtttgcttgtttcctcagggctggcctcttccccgtgtcttcacagcgtccctaaggaagatttttgcagcactctctggagctgaggggagtgaaatttggtccagagaaggcggaaggaaatagttttcctgtttccttttctcgaggtggatgtcctcaggcttccttcacacctccttctcatgggtgcggctggcagtacagtcaggctgtggaggagggctgagaagaaaggggcactggtccagccccaggtttggtctgagacaggtacacagcagataccatcccaccttcctctctaaagaacaggccagccacacatataaccctttccctactttactaatgtatcccttatgtggtaccagcaatggaggacaggcagacttaccccctgccatctagagagaatgttgttattacccgtaaaacttgaccacccccatatcccactcctttttgtaaaaacaaatgcttaaacctgtgagcctgccgttcctttctatgtgttaatcagtttccttccatttgagctgtgtgggagggaagggcattgaaattgtaggttgtaatcttgtgccaaccaataaaaaccagtatttcacacacaaaaaaaaaaaaaaaaaaaaaaaaaaaaaaaaaaaaaaacccggggggctctttttctgcgggggcgggggaaaaggaggtttgagagaaggggcaggggccaaagggggttcccgggacccgagtttttttgggcaacaggggggagaaaccggggggccccccaaggggggggggggaaaaatcggaaaaacccggggttcccggtagatgttcggtcgaac

SEQ ID NO: 313685 - DNA, 7306 bp, Homo sapiens
  misc_feature (6411)..(6412): n is a, c, g, or t
  misc_feature (6415)..(6415): n is a, c, g, or t
  misc_feature (6423)..(6423): n is a, c, g, or t
  misc_feature (6436)..(6437): n is a, c, g, or t
  misc_feature (6442)..(6442): n is a, c, g, or t
  misc_feature (6463)..(6463): n is a, c, g, or t
  misc_feature (6481)..(6481): n is a, c, g, or t
  misc_feature (6488)..(6488): n is a, c, g, or t
  misc_feature (6493)..(6493): n is a, c, g, or t
  misc_feature (6495)..(6495): n is a, c, g, or t
cttagtttacatcctctcccccaatcttcacacacagagccaaagagcagttatattcttgggataccatgatacctctgggaaaggaattatattcccaaggagaggtcccattggataagaacaataccatgggacttgagtctgaatgccaacttactattcacacatccttcttaaaaacgaacacactgtttcttttcctgacctagagcattctaaagttctgttcaaataaataaagggcaaaataaagtagatttaaccaagtgccaggtggaattcaaaaaacacattcttccagataaattctacctttatggtatggatttgaaagtactttgcaggaaaacagtcagtactctttaaaaagggactgcagggctgggtgtagtggctcacacctgtaatcccagcactttgggaggccaaggcaggtgggtcacttgaggccaggagtttgagaccagcctgaccaacatggcaaaaccccatctctactaaaatacaaaaattagctgggcatgatggtgcactcctgtaatcccagctacttggtaggctgaagcatgagaattgcttaaacctgggaggcagaggttgcagtaagccaagatcatgccactgcattccagcctgggcaacagagtaagactctgtcttaataaataaataagaaaataaaacggaactgcagtgctaacagtaatttatacatttttaaatgttctgagtatgttttgactgggctagtgtaacaatatactaccctgaaagtgcagttttgattgttgttggtgtctttgggtcaggaaagtgaactgtgccaagaagtatttttcagtgacatgaatggattcctgttaatgcaattgactgagagattgtgcttacgctttcttaactgacaaaaagaggctttgtccaacatcagaattgttgaaactggtgctgttttctgttgcactgggattctgatgatctgggattttccctccttggcacagtaaacaccatgactgtctttattgagaatgtcgtcacagtcctttagtgatagattagttagacccatggttgcaatacctttatctccccaaagaaaataatcaaaagaaagcacaaaagctaccctgtttgcagaatatttcactgacattgatttgtcattaattctaccagagctgacctcattcaggcttgatagaaacaggttcctatgtttagggcagatccctagcctctcgctcacagtgagtctgcatgtcctagattctggttattgctggagcatccattaaagtctaccaaactcaggacagaagaagatagcagtggatttgtaaaaatttttagtttataaattacagtcattggggaaacactagtaaggtcatgtgatcttttggaccaggattttctctctgtcttctctctgggtgtgtgtgtgtgtatgtacagaagggctaccaggaagtgtcaaccatgttagattttctgtagtcttccagaaacagtgcagcccatacaacaggaatcttaattttcctcacagcaaatataacaggatggaacagttagtgttttgttttcacaagtgtccaccactccatctgccctgcatggagagggctctctcactgctagatctaggctgagccatctggaaggatcaaagggtgtgggagtatcaccccctctcaggctgcagaaggtctcgagggtggcgtcacagcaggatttccgccttctgcattgcactgcacagccccatggaacatgaggcacttgaggccttgcttcttggagcctctggggagcagagtaggtcactgccctctgggagtgttttgcagtagttttgtaaatgtgttgctacatagtcaagttcctttgtggcaaagaaatattttgttttgatattaggagccagcccatgtaatgcctctcaggcttgcttgcttagaagaaaaaagtcaccctttgtggtttttaagaaaaaaattctgtgcagatctgttcctcctcctgctccttcccttttctctacatacagtgctcattggaggctcctgctaaaccttcttaaccagagaaataataggtatttgttagacctgagtgtacatttcacatgttatccttcacatatttctcattttcatctagtactttcttaatgcctttgttggagtccgcatcctcatctttaaaaaaaaaaaaaaaaaacagcttagcctaagccacattcactttttttagttcacaaaaaggatttaatagccacaatgtgatttttgccacaactgtgtgattttaatattctctaatatcaagggcggatttagaattgcaggaaatacctggagaaatcacagtggaatgaatttttgctttaagagaaatgagagttggctgtctctgtaattgataatacagcttcatcctagtcccatctgcatttcagaaaataaccctcatctttacaaaacacaggacacttgtgggacagttaactcaagcagctatggggagggaggagattattgaatggtgattaaataatgcaaatggctcttctgtttcttaaagactgtggaagaggtcagactgcccagttgaggtgggcagttcatactgctcagttgaggtggcagtcatttattctgagtcctgttggatagagcctatctcctcaaggctacagaggcttccaggatatggagctgtgcatgttaatggctcagccttgcctccatcagggcacctgcctaacttggagcaagtgggagagcaccctagagtcatcctctgtgctgtttcgtgagttttgcagcggagacttcaccatccggaggagctgtgtttctgtgtcacttgggatatcacctaaaaatgaaacatttgatattttaaggtataaaaaaaaagtaaattggggaacattggctgcagtccctaaaagatactgttgtctgtgcatcaggttagcttgaggtcaccacaggtcctgggagcccagagagtttaggcatactctcctttggaggccagcagcctttcacaaaccctgcctctaaaagggcggtttcacatttgaccatgtttttgcattagcctcagaaactcttgtctttagctgataacctttgagggatgtgagaagcctagttggagcatctgagaaaatgatacctctcaccttcaaattaatcaaatagtttgtccttctagtccccttataaattaataaatggagggctggtcatggtggctcacgcctgtaatcccagcactttgggaggccgaggcgggtggatcacaaggtcaggagttcaagaccagcctgaccaatatggtgaaaccccatctctactaaaaatacaaaaattagccaggtgtagtggcacgctcctgtagtcccagctactcgggaggctgaggcaggagaatcgcttgaacccaggaggtggatgttgcagtgagccgagatcccgccactgcactgcagcctaggcgacagagcaagactccgtctcaaaaaaaaaaaaagaaaaaaaaagaaaagggaagggaatcccattttgtgatgatttgggcacactacttgagctgaggctagcagtcacatgattttggctgtctctgacctgaagcttttgaagtaaggttatgtctcttccctgaagctttgtttatagtggtaatttggtgagtttgagctttgagcttgtcttagaaaataagactgtccacctggggaggggagcttatagggaacccgtgttaactcagaatgctgaagaaagtgcttttagccaacaaaagtaagattactatctagaaggtggaaagaagtcattgcttctgttcctccagcagtcagttgactctaggtttcctttggtttatatccccagttcttaatactaaaacttatttgacttcctatcaggaagcacacaaaaaaagcgtcatttaaaaccctggatataggctttaaaggatacaaaaacagcagcattgtcgttttgccaggttcatcaccattttgatgtgctacccatccttccaccctccctttcctgcccccaagcctcccagccaggccagatgtgaagattctattaatcactgtttcagagaacattaattcttgtatagaataattatctactaaattgcttattatctgtgactaccttgcagagaacatctcaacagtgcagtaaaatagctctcctagacttgagcttccagccaggcatttagatcactcttaagcctttgtggaattctgaggaaaaaaagcaagatgcctcaatgccaatgctgggccataagattctactcccctccctgtagggtggggcgcgtggctcagctttggaaaatcattttgccagtaatattgcctgtgaatccctttaagaagtcgtcctgatctgagcctgtctttctgagcactttggtgctgaattgaaaatggtaagctaaagcagtgacagatccacgtagcctctttaacctctttattatcttgccaaaaaaaaagtttctcaggttaaacctttgtctttaacctccctttgttgtggagaaaatgtgtcactaatcagtggtccaagggatatctagctttggttactcagttcctgcagcataacagatatgacttatgccagggaaggtagaggctgattatggagacacccaggaacaggaataagaagggataggtctgctccacgtagaacctccccagatcggaagttaagtcttggagagtttccaaagtgctgaagtaaaaaggagacttggagggcctttgcttaatgagcaagaggcttgtgtcctcccaagaacatgagggagttcagaagggagctatagctcacagacagaaacctgcccgctcaccccatccctcgtgactgggagcatgtttgctcagaattttctaagaggactctcccttcaaaaatccaatttgctcccagaatgttgtttagcctctgagaatctcactctttcatttccatctgtgaatggacatagatgtgttgctcagggatcagaaacatcagagtccagggcccagtggcatggtgttgcattagtagttagaaaagtaattggtcagctctactgtaaaagaaataagtatgtagtacagttttgtaaatgtcaggtctgttctattgttttgtgatctgaagactgtcaaactggttgataatcaaagaaaaggttggttagaataagtaaaatttcagttagaaagatatagcttaccagttttccatgtgcttaaggaagtcaagaatatttcaggttgttgagaactgttgtaaaatggaattgaagctagtgtctctcaccttcttaggtgtatcagagagaggaagtggaaggccagtagtagcatcttcatacttacttttgccagcccagcctccatttcaaagactttgtcttccatcctatccaatgacatggtcagggatgggctctgaggaggcagtgaggccccaccttggtttgctccactgtggtgtgtagtctccaaacagcttaagggtttttaagttttctcacgattacctccactccactcatctactatcagcatcagaaaggttaacatccctgggaccattctacttataaaagagatgaactagtgtgctttctccccttttccaggtgtgccatccatatacaatctcctcttggccaagttcaacaaatgtttccagggaaccccgtgggttgaggcaaagtagccaagatgtattgagttaagtttttctagaggacaaaagtatttcttgtcccttttccctcatgctcatatgttttagctgaggcgtaaatggccaagttgagtaatatctgtggaactgagacagagagccagggacccatgtacccagggaccagtcccctggggaatcacacagtggctcagactagactgctctatcccaccagaactctgctgctgttcatttccatcaggaccacccaggaaagcaaataagttagccttctcatcattaggtcacctaatctcttgggttgcaggatgagagcatatatagatctcctgtttagagagtgtgttcataattgtagaaagggatagaaaatggaataaccaagaggctgtgtcattttttaagaggatggcaaggatgacctcaaatgagctcaacaaaactgggaatccaaggaatggtgcttgtagggaaagagaggtcagttgtggtccttaaacctcttggcaccttgtgcgggttataaaacaaggagctggagtaaaattgcccttacccccaatccaaatgctgtccaggatttaggagctacccaacctgtggttatatggtgttgggggccagggggggnnggngggcgggnggccaaaagagcnnggcgnggggcggcggggaaagggcangcggggcggcgggcccgngcagggngggcngnggccccggggcggcacagcgtccctaaggaagatttttgcagcactctctggagctgaggggagtgaaatttggtccagagaaggcggaaggaaatagttttcctgtttccttttctcgaggtggatgtcctcaggcttccttcacacctccttctcatgggtgcggctggcagtacagtcaggctgtggaggagggctgagaagaaaggggcactggtccagccccaggtttggtctgagacaggtacacagcagataccatcccaccttcctctctaaagaacaggccagccacacatataaccctttccctactttactaatgtatcccttatgtggtaccagcaatggaggacaggcagacttaccccctgccatctagagagaatgttgttattacccgtaaaacttgaccacccccatatcccactcctttttgtaaaaacaaatgcttaaacctgtgagcctgccgttcctttctatgtgttaatcagtttccttccatttgagctgtgtgggagggaagggcattgaaattgtaggttgtaatcttgtgccaaccaataaaaaccagtatttcacacacaaaaaaaaaaaaaaaaaaaaaaaaaaaaaaaaaaaaaaacccggggggctctttttctgcgggggcgggggaaaaggaggtttgagagaaggggcaggggccaaagggggttcccgggacccgagtttttttgggcaacaggggggagaaaccggggggccccccaaggggggggggggaaaaatcggaaaaacccggggttcccggtagatgttcggtcgaac

SEQ ID NO: 313686 - DNA, 3605 bp, Homo sapiens
  misc_feature (15)..(15): n is a, c, g, or t
ccttgtctggttacnccctcggagtattggatatcagtcgatcacacgcgctcagggagggagagcgggagtagcggaacccgtgttaactcagaatgctgaagaaagtgcttttagccaacaaaagtaagattactatctagaaggtggaaagaagtcattgcttctgttcctccagcagtcagttgactctaggtttcctttggtttatatccccagttcttaatactaaaacttatttgacttcctatcaggaagcacacaaaaaaagcgtcatttaaaaccctggatataggctttaaaggatacaaaaacagcagcattgtcgttttgccaggttcatcaccattttgatgtgctacccatccttccaccctccctttcctgcccccaagcctcccagccaggccagatgtgaagattctattaatcactgtttcagagaacattaattcttgtatagaataattatctactaaattgcttattatctgtgactaccttgcagagaacatctcaacagtgcagtaaaatagctctcctagacttgagcttccagccaggcatttagatcactcttaagcctttgtggaattctgaggaaaaaaagcaagatgcctcaatgccaatgctgggccataagattctactcccctccctgtagggtggggcgcgtggctcagctttggaaaatcattttgccagtaatattgcctgtgaatccctttaagaagtcgtcctgatctgagcctgtctttctgagcactttggtgctgaattgaaaatggtaagctaaagcagtgacagatccacgtagcctctttaacctctttattatcttgccaaaaaaaaagtttctcaggttaaacctttgtctttaacctccctttgttgtggagaaaatgtgtcactaatcagtggtccaagggatatctagctttggttactcagttcctgcagcataacagatatgacttatgccagggaaggtagaggctgattatggagacacccaggaacaggaataagaagggataggtctgctccacgtagaacctccccagatcggaagttaagtcttggagagtttccaaagtgctgaagtaaaaaggagacttggagggcctttgcttaatgagcaagaggcttgtgtcctcccaagaacatgagggagttcagaagggagctatagctcacagacagaaacctgcccgctcaccccatccctcgtgactgggagcatgtttgctcagaattttctaagaggactctcccttcaaaaatccaatttgctcccagaatgttgtttagcctctgagaatctcactctttcatttccatctgtgaatggacatagatgtgttgctcagggatcagaaacatcagagtccagggcccagtggcatggtgttgcattagtagttagaaaagtaattggtcagctctactgtaaaagaaataagtatgtagtacagttttgtaaatgtcaggtctgttctattgttttgtgatctgaagactgtcaaactggttgataatcaaagaaaaggttggttagaataagtaaaatttcagttagaaagatatagcttaccagttttccatgtgcttaaggaagtcaagaatatttcaggttgttgagaactgttgtaaaatggaattgaagctagtgtctctcaccttcttaggtgtatcagagagaggaagtggaaggccagtagtagcatcttcatacttacttttgccagcccagcctccatttcaaagactttgtcttccatcctatccaatgacatggtcagggatgggctctgaggaggcagtgaggccccaccttggtttgctccactgtggtgtgtagtctccaaacagcttaagggtttttaagttttctcacgattacctccactccactcatctactatcagcatcagaaaggttaacatccctgggaccattctacttataaaagagatgaactagtgtgctttctccccttttccaggtgtgccatccatatacaatctcctcttggccaagttcaacaaatgtttccagggaaccccgtgggttgaggcaaagtagccaagatgtattgagttaagtttttctagaggacaaaagtatttcttgtcccttttccctcatgctcatatgttttagctgaggcgtaaatggccaagttgagtaatatctgtggaactgagacagagagccagggacccatgtacccagggaccagtcccctggggaatcacacagtggctcagactagactgctctatcccaccagaactctgctgctgttcatttccatcaggaccacccaggaaagcaaataagttagccttctcatcattaggtcacctaatctcttgggttgcaggatgagagcatatatagatctcctgtttagagagtgtgttcataattgtagaaagggatagaaaatggaataaccaagaggctgtgtcattttttaagaggatggcaaggatgacctcaaatgagctcaacaaaactgggaatccaaggaatggtgcttgtagggaaagagaggtcagttgtggtccttaaacctcttggcaccttgtgcgggttataaaacaaggagctggagtaaaattgcccttacccccaatccaaatgctgtccaggatttaggagctacccaacctgtggttatatggtgttggtttccattttttgtttgtttgcttgtttccaaaatagccttgcttggtactgcatggaaagttcaagcttttcttcttgcccgctcagggctggcctcttccccgtgtcttcacagcgtccctaaggaagatttttgcagcactctctggagctgaggggagtgaaatttggtccagagaaggcggaaggaaatagttttcctgtttccttttctcgaggtggatgtcctcaggcttccttcacacctccttctcatgggtgcggctggcagtacagtcaggctgtggaggagggctgagaagaaaggggcactggtccagccccaggtttggtctgagacaggtacacagcagataccatcccaccttcctctctaaagaacaggccagccacacatataaccctttccctactttactaatgtatcccttatgtggtaccagcaatggaggacaggcagacttaccccctgccatctagagagaatgttgttattacccgtaaaacttgaccacccccatatcccactcctttttgtaaaaacaaatgcttaaacctgtgagcctgccgttcctttctatgtgttaatcagtttccttccatttgagctgtgtgggagggaagggcattgaaattgtaggttgtaatcttgtgccaaccaataaaaaccagtatttcacacacaaaaaaaaaaaaaaaaaaaaaaaaaaaaaaaaaaaaaaacccggggggctctttttctgcgggggcgggggaaaaggaggtttgagagaaggggcaggggccaaagggggttcccgggacccgagtttttttgggcaacaggggggagaaaccggggggccccccaaggggggggggggaaaaatcggaaaaacccggggttcccggtagatgttcggtcgaac

SEQ ID NO: 313687 - DNA, 7250 bp, Homo sapiens
cttagtttacatcctctcccccaatcttcacacacagagccaaagagcagttatattcttgggataccatgatacctctgggaaaggaattatattcccaaggagaggtcccattggataagaacaataccatgggacttgagtctgaatgccaacttactattcacacatccttcttaaaaacgaacacactgtttcttttcctgacctagagcattctaaagttctgttcaaataaataaagggcaaaataaagtagatttaaccaagtgccaggtggaattcaaaaaacacattcttccagataaattctacctttatggtatggatttgaaagtactttgcaggaaaacagtcagtactctttaaaaagggactgcagggctgggtgtagtggctcacacctgtaatcccagcactttgggaggccaaggcaggtgggtcacttgaggccaggagtttgagaccagcctgaccaacatggcaaaaccccatctctactaaaatacaaaaattagctgggcatgatggtgcactcctgtaatcccagctacttggtaggctgaagcatgagaattgcttaaacctgggaggcagaggttgcagtaagccaagatcatgccactgcattccagcctgggcaacagagtaagactctgtcttaataaataaataagaaaataaaacggaactgcagtgctaacagtaatttatacatttttaaatgttctgagtatgttttgactgggctagtgtaacaatatactaccctgaaagtgcagttttgattgttgttggtgtctttgggtcaggaaagtgaactgtgccaagaagtatttttcagtgacatgaatggattcctgttaatgcaattgactgagagattgtgcttacgctttcttaactgacaaaaagaggctttgtccaacatcagaattgttgaaactggtgctgttttctgttgcactgggattctgatgatctgggattttccctccttggcacagtaaacaccatgactgtctttattgagaatgtcgtcacagtcctttagtgatagattagttagacccatggttgcaatacctttatctccccaaagaaaataatcaaaagaaagcacaaaagctaccctgtttgcagaatatttcactgacattgatttgtcattaattctaccagagctgacctcattcaggcttgatagaaacaggttcctatgtttagggcagatccctagcctctcgctcacagtgagtctgcatgtcctagattctggttattgctggagcatccattaaagtctaccaaactcaggacagaagaagatagcagtggatttgtaaaaatttttagtttataaattacagtcattggggaaacactagtaaggtcatgtgatcttttggaccaggattttctctctgtcttctctctgggtgtgtgtgtgtgtatgtacagaagggctaccaggaagtgtcaaccatgttagattttctgtagtcttccagaaacagtgcagcccatacaacaggaatcttaattttcctcacagcaaatataacaggatggaacagttagtgttttgttttcacaagtgtccaccactccatctgccctgcatggagagggctctctcactgctagatctaggctgagccatctggaaggatcaaagggtgtgggagtatcaccccctctcaggctgcagaaggtctcgagggtggcgtcacagcaggatttccgccttctgcattgcactgcacagccccatggaacatgaggcacttgaggccttgcttcttggagcctctggggagcagagtaggtcactgccctctgggagtgttttgcagtagttttgtaaatgtgttgctacatagtcaagttcctttgtggcaaagaaatattttgttttgatattaggagccagcccatgtaatgcctctcaggcttgcttgcttagaagaaaaaagtcaccctttgtggtttttaagaaaaaaattctgtgcagatctgttcctcctcctgctccttcccttttctctacatacagtgctcattggaggctcctgctaaaccttcttaaccagagaaataataggtatttgttagacctgagtgtacatttcacatgttatccttcacatatttctcattttcatctagtactttcttaatgcctttgttggagtccgcatcctcatctttaaaaaaaaaaaaaaaaaacagcttagcctaagccacattcactttttttagttcacaaaaaggatttaatagccacaatgtgatttttgccacaactgtgtgattttaatattctctaatatcaagggcggatttagaattgcaggaaatacctggagaaatcacagtggaatgaatttttgctttaagagaaatgagagttggctgtctctgtaattgataatacagcttcatcctagtcccatctgcatttcagaaaataaccctcatctttacaaaacacaggacacttgtgggacagttaactcaagcagctatggggagggaggagattattgaatggtgattaaataatgcaaatggctcttctgtttcttaaagactgtggaagaggtcagactgcccagttgaggtgggcagttcatactgctcagttgaggtggcagtcatttattctgagtcctgttggatagagcctatctcctcaaggctacagaggcttccaggatatggagctgtgcatgttaatggctcagccttgcctccatcagggcacctgcctaacttggagcaagtgggagagcaccctagagtcatcctctgtgctgtttcgtgagttttgcagcggagacttcaccatccggaggagctgtgtttctgtgtcacttgggatatcacctaaaaatgaaacatttgatattttaaggtataaaaaaaaagtaaattggggaacattggctgcagtccctaaaagatactgttgtctgtgcatcaggttagcttgaggtcaccacaggtcctgggagcccagagagtttaggcatactctcctttggaggccagcagcctttcacaaaccctgcctctaaaagggcggtttcacatttgaccatgtttttgcattagcctcagaaactcttgtctttagctgataacctttgagggatgtgagaagcctagttggagcatctgagaaaatgatacctctcaccttcaaattaatcaaatagtttgtccttctagtccccttataaattaataaatggagggctggtcatggtggctcacgcctgtaatcccagcactttgggaggccgaggcgggtggatcacaaggtcaggagttcaagaccagcctgaccaatatggtgaaaccccatctctactaaaaatacaaaaattagccaggtgtagtggcacgctcctgtagtcccagctactcgggaggctgaggcaggagaatcgcttgaacccaggaggtggatgttgcagtgagccgagatcccgccactgcactgcagcctaggcgacagagcaagactccgtctcaaaaaaaaaaaaagaaaaaaaaagaaaagggaagggaatcccattttgtgatgatttgggcacactacttgagctgaggctagcagtcacatgattttggctgtctctgacctgaagcttttgaagtaaggttatgtctcttccctgaagctttgtttatagtggtaatttggtgagtttgagctttgagcttgtcttagaaaataagactgtccacctggggaggggagcttatagggaacccgtgttaactcagaatgctgaagaaagtgcttttagccaacaaaagtaagattactatctagaaggtggaaagaagtcattgcttctgttcctccagcagtcagttgactctaggtttcctttggtttatatccccagttcttaatactaaaacttatttgacttcctatcaggaagcacacaaaaaaagcgtcatttaaaaccctggatataggctttaaaggatacaaaaacagcagcattgtcgttttgccaggttcatcaccattttgatgtgctacccatccttccaccctccctttcctgcccccaagcctcccagccaggccagatgtgaagattctattaatcactgtttcagagaacattaattcttgtatagaataattatctactaaattgcttattatctgtgactaccttgcagagaacatctcaacagtgcagtaaaatagctctcctagacttgagcttccagccaggcatttagatcactcttaagcctttgtggaattctgaggaaaaaaagcaagatgcctcaatgccaatgctgggccataagattctactcccctccctgtagggtggggcgcgtggctcagctttggaaaatcattttgccagtaatattgcctgtgaatccctttaagaagtcgtcctgatctgagcctgtctttctgagcactttggtgctgaattgaaaatggtaagctaaagcagtgacagatccacgtagcctctttaacctctttattatcttgccaaaaaaaaagtttctcaggttaaacctttgtctttaacctccctttgttgtggagaaaatgtgtcactaatcagtggtccaagggatatctagctttggttactcagttcctgcagcataacagatatgacttatgccagggaaggtagaggctgattatggagacacccaggaacaggaataagaagggataggtctgctccacgtagaacctccccagatcggaagttaagtcttggagagtttccaaagtgctgaagtaaaaaggagacttggagggcctttgcttaatgagcaagaggcttgtgtcctcccaagaacatgagggagttcagaagggagctatagctcacagacagaaacctgcccgctcaccccatccctcgtgactgggagcatgtttgctcagaattttctaagaggactctcccttcaaaaatccaatttgctcccagaatgttgtttagcctctgagaatctcactctttcatttccatctgtgaatggacatagatgtgttgctcagggatcagaaacatcagagtccagggcccagtggcatggtgttgcattagtagttagaaaagtaattggtcagctctactgtaaaagaaataagtatgtagtacagttttgtaaatgtcaggtctgttctattgttttgtgatctgaagactgtcaaactggttgataatcaaagaaaaggttggttagaataagtaaaatttcagttagaaagatatagcttaccagttttccatgtgcttaaggaagtcaagaatatttcaggttgttgagaactgttgtaaaatggaattgaagctagtgtctctcaccttcttaggtgtatcagagagaggaagtggaaggccagtagtagcatcttcatacttacttttgccagcccagcctccatttcaaagactttgtcttccatcctatccaatgacatggtcagggatgggctctgaggaggcagtgaggccccaccttggtttgctccactgtggtgtgtagtctccaaacagcttaagggtttttaagttttctcacgattacctccactccactcatctactatcagcatcagaaaggttaacatccctgggaccattctacttataaaagagatgaactagtgtgctttctccccttttccaggtgtgccatccatatacaatctcctcttggccaagttcaacaaatgtttccagggaaccccgtgggttgaggcaaagtagccaagatgtattgagttaagtttttctagaggacaaaagtatttcttgtcccttttccctcatgctcatatgttttagctgaggcgtaaatggccaagttgagtaatatctgtggaactgagacagagagccagggacccatgtacccagggaccagtcccctggggaatcacacagtggctcagactagactgctctatcccaccagaactctgctgctgttcatttccatcaggaccacccaggaaagcaaataagttagccttctcatcattaggtcacctaatctcttgggttgcaggatgagagcatatatagatctcctgtttagagagtgtgttcataattgtagaaagggatagaaaatggaataaccaagaggctgtgtcattttttaagaggatggcaaggatgacctcaaatgagctcaacaaaactgggaatccaaggaatggtgcttgtagggaaagagaggtcagttgtggtccttaaacctcttggcaccttgtgcgggttataaaacaaggagctggagtaaaattgcccttacccccaatccaaatgctgtccaggatttaggagctacccaacctgtggttatatggtgttggtttccattttttgtttgtttgcttgtttccaaaatagccttgcttggtactgcatggaaagttcaagcttttcttcttgcccgctcagggctggcctcttccccgtgtcttcacagcgtccctaaggaagatttttgcagcactctctggagctgaggggagtgaaatttggtccagagaaggcggaaggctccttctcatgggtgcggctggcagtacagtcaggctgtggaggagggctgagaagaaaggggcactggtccagccccaggtttggtctgagacaggtacacagcagataccatcccaccttcctctctaaagaacaggccagccacacatataaccctttccctactttactaatgtatcccttatgtggtaccagcaatggaggacaggcagacttaccccctgccatctagagagaatgttgttattacccgtaaaacttgaccacccccatatcccactcctttttgtaaaaacaaatgcttaaacctgtgagcctgccgttcctttctatgtgttaatcagtttccttccatttgagctgtgtgggagggaagggcattgaaattgtaggttgtaatcttgtgccaaccaataaaaaccagtatttcacacacaaaaaaaaaaaaaaaaaaaaaaaaaaaaaaaaaaaaaaacccggggggctctttttctgcgggggcgggggaaaaggaggtttgagagaaggggcaggggccaaagggggttcccgggacccgagtttttttgggcaacaggggggagaaaccggggggccccccaaggggggggggggaaaaatcggaaaaacccggggttcccggtagatgttcggtcgaac

SEQ ID NO: 313688 - DNA, 7085 bp, Homo sapiens
cttagtttacatcctctcccccaatcttcacacacagagccaaagagcagttatattcttgggataccatgatacctctgggaaaggaattatattcccaaggagaggtcccattggataagaacaataccatgggacttgagtctgaatgccaacttactattcacacatccttcttaaaaacgaacacactgtttcttttcctgacctagagcattctaaagttctgttcaaataaataaagggcaaaataaagtagatttaaccaagtgccaggtggaattcaaaaaacacattcttccagataaattctacctttatggtatggatttgaaagtactttgcaggaaaacagtcagtactctttaaaaagggactgcagggctgggtgtagtggctcacacctgtaatcccagcactttgggaggccaaggcaggtgggtcacttgaggccaggagtttgagaccagcctgaccaacatggcaaaaccccatctctactaaaatacaaaaattagctgggcatgatggtgcactcctgtaatcccagctacttggtaggctgaagcatgagaattgcttaaacctgggaggcagaggttgcagtaagccaagatcatgccactgcattccagcctgggcaacagagtaagactctgtcttaataaataaataagaaaataaaacggaactgcagtgctaacagtaatttatacatttttaaatgttctgagtatgttttgactgggctagtgtaacaatatactaccctgaaagtgcagttttgattgttgttggtgtctttgggtcaggaaagtgaactgtgccaagaagtatttttcagtgacatgaatggattcctgttaatgcaattgactgagagattgtgcttacgctttcttaactgacaaaaagaggctttgtccaacatcagaattgttgaaactggtgctgttttctgttgcactgggattctgatgatctgggattttccctccttggcacagtaaacaccatgactgtctttattgagaatgtcgtcacagtcctttagtgatagattagttagacccatggttgcaatacctttatctccccaaagaaaataatcaaaagaaagcacaaaagctaccctgtttgcagaatatttcactgacattgatttgtcattaattctaccagagctgacctcattcaggcttgatagaaacaggttcctatgtttagggcagatccctagcctctcgctcacagtgagtctgcatgtcctagattctggttattgctggagcatccattaaagtctaccaaactcaggacagaagaagatagcagtggatttgtaaaaatttttagtttataaattacagtcattggggaaacactagtaaggtcatgtgatcttttggaccaggattttctctctgtcttctctctgggtgtgtgtgtgtgtatgtacagaagggctaccaggaagtgtcaaccatgttagattttctgtagtcttccagaaacagtgcagcccatacaacaggaatcttaattttcctcacagcaaatataacaggatggaacagttagtgttttgttttcacaagtgtccaccactccatctgccctgcatggagagggctctctcactgctagatctaggctgagccatctggaaggatcaaagggtgtgggagtatcaccccctctcaggctgcagaaggtctcgagggtggcgtcacagcaggatttccgccttctgcattgcactgcacagccccatggaacatgaggcacttgaggccttgcttcttggagcctctggggagcagagtaggtcactgccctctgggagtgttttgcagtagttttgtaaatgtgttgctacatagtcaagttcctttgtggcaaagaaatattttgttttgatattaggagccagcccatgtaatgcctctcaggcttgcttgcttagaagaaaaaagtcaccctttgtggtttttaagaaaaaaattctgtgcagatctgttcctcctcctgctccttcccttttctctacatacagtgctcattggaggctcctgctaaaccttcttaaccagagaaataataggtatttgttagacctgagtgtacatttcacatgttatccttcacatatttctcattttcatctagtactttcttaatgcctttgttggagtccgcatcctcatctttaaaaaaaaaaaaaaaaaacagcttagcctaagccacattcactttttttagttcacaaaaaggatttaatagccacaatgtgatttttgccacaactgtgtgattttaatattctctaatatcaagggcggatttagaattgcaggaaatacctggagaaatcacagtggaatgaatttttgctttaagagaaatgagagttggctgtctctgtaattgataatacagcttcatcctagtcccatctgcatttcagaaaataaccctcatctttacaaaacacaggacacttgtgggacagttaactcaagcagctatggggagggaggagattattgaatggtgattaaataatgcaaatggctcttctgtttcttaaagactgtggaagaggtcagactgcccagttgaggtgggcagttcatactgctcagttgaggtggcagtcatttattctgagtcctgttggatagagcctatctcctcaaggctacagaggcttccaggatatggagctgtgcatgttaatggctcagccttgcctccatcagggcacctgcctaacttggagcaagtgggagagcaccctagagtcatcctctgtgctgtttcgtgagttttgcagcggagacttcaccatccggaggagctgtgtttctgtgtcacttgggatatcacctaaaaatgaaacatttgatattttaaggtataaaaaaaaagtaaattggggaacattggctgcagtccctaaaagatactgttgtctgtgcatcaggttagcttgaggtcaccacaggtcctgggagcccagagagtttaggcatactctcctttggaggccagcagcctttcacaaaccctgcctctaaaagggcggtttcacatttgaccatgtttttgcattagcctcagaaactcttgtctttagctgataacctttgagggatgtgagaagcctagttggagcatctgagaaaatgatacctctcaccttcaaattaatcaaatagtttgtccttctagtccccttataaattaataaatggagggctggtcatggtggctcacgcctgtaatcccagcactttgggaggccgaggcgggtggatcacaaggtcaggagttcaagaccagcctgaccaatatggtgaaaccccatctctactaaaaatacaaaaattagccaggtgtagtggcacgctcctgtagtcccagctactcgggaggctgaggcaggagaatcgcttgaacccaggaggtggatgttgcagtgagccgagatcccgccactgcactgcagcctaggcgacagagcaagactccgtctcaaaaaaaaaaaaagaaaaaaaaagaaaagggaagggaatcccattttgtgatgatttgggcacactacttgagctgaggctagcagtcacatgattttggctgtctctgacctgaagcttttgaagtaaggttatgtctcttccctgaagctttgtttatagtggtaatttggtgagtttgagctttgagcttgtcttagaaaataagactgtccacctggggaggggagcttatagggaacccgtgttaactcagaatgctgaagaaagtgcttttagccaacaaaagtaagattactatctagaaggtggaaagaagtcattgcttctgttcctccagcagtcagttgactctaggtttcctttggtttatatccccagttcttaatactaaaacttatttgacttcctatcaggaagcacacaaaaaaagcgtcatttaaaaccctggatataggctttaaaggatacaaaaacagcagcattgtcgttttgccaggttcatcaccattttgatgtgctacccatccttccaccctccctttcctgcccccaagcctcccagccaggccagatgtgaagattctattaatcactgtttcagagaacattaattcttgtatagaataattatctactaaattgcttattatctgtgactaccttgcagagaacatctcaacagtgcagtaaaatagctctcctagacttgagcttccagccaggcatttagatcactcttaagcctttgtggaattctgaggaaaaaaagcaagatgcctcaatgccaatgctgggccataagattctactcccctccctgtagggtggggcgcgtggctcagctttggaaaatcattttgccagtaatattgcctgtgaatccctttaagaagtcgtcctgatctgagcctgtctttctgagcactttggtgctgaattgaaaatggtaagctaaagcagtgacagatccacgtagcctctttaacctctttattatcttgccaaaaaaaaagtttctcaggttaaacctttgtctttaacctccctttgttgtggagaaaatgtgtcactaatcagtggtccaagggatatctagctttggttactcagttcctgcagcataacagatatgacttatgccagggaaggtagaggctgattatggagacacccaggaacaggaataagaagggataggtctgctccacgtagaacctccccagatcggaagttaagtcttggagagtttccaaagtgctgaagtaaaaaggagacttggagggcctttgcttaatgagcaagaggcttgtgtcctcccaagaacatgagggagttcagaagggagctatagctcacagacagaaacctgcccgctcaccccatccctcgtgactgggagcatgtttgctcagaattttctaagaggactctcccttcaaaaatccaatttgctcccagaatgttgtttagcctctgagaatctcactctttcatttccatctgtgaatggacatagatgtgttgctcagggatcagaaacatcagagtccagggcccagtggcatggtgttgcattagtagttagaaaagtaattggtcagctctactgtaaaagaaataagtatgtagtacagttttgtaaatgtcaggtctgttctattgttttgtgatctgaagactgtcaaactggttgataatcaaagaaaaggttggttagaataagtaaaatttcagttagaaagatatagcttaccagttttccatgtgcttaaggaagtcaagaatatttcaggttgttgagaactgttgtaaaatggaattgaagctagtgtctctcaccttcttaggtgtatcagagagaggaagtggaaggccagtagtagcatcttcatacttacttttgccagcccagcctccatttcaaagactttgtcttccatcctatccaatgacatggtcagggatgggctctgaggaggcagtgaggccccaccttggtttgctccactgtggtgtgtagtctccaaacagcttaagggtttttaagttttctcacgattacctccactccactcatctactatcagcatcagaaaggttaacatccctgggaccattctacttataaaagagatgaactagtgtgctttctccccttttccaggtgtgccatccatatacaatctcctcttggccaagttcaacaaatgtttccagggaaccccgtgggttgaggcaaagtagccaagatgtattgagttaagtttttctagaggacaaaagtatttcttgtcccttttccctcatgctcatatgttttagctgaggcgtaaatggccaagttgagtaatatctgtggaactgagacagagagccagggacccatgtacccagggaccagtcccctggggaatcacacagtggctcagactagactgctctatcccaccagaactctgctgctgttcatttccatcaggaccacccaggaaagcaaataagttagccttctcatcattaggtcacctaatctcttgggttgcaggatgagagcatatatagatctcctgtttagagagtgtgttcataattgtagaaagggatagaaaatggaataaccaagaggctgtgtcattttttaagaggatggcaaggatgacctcaaatgagctcaacaaaactgggaatccaaggaatggtgcttgtagggaaagagaggtcagttgtggtccttaaacctcttggcaccttgtgcgggttataaaacaaggagctggagtaaaattgcccttacccccaatccaaatgctgtccaggatttaggagctacccaacctgtggttatatggtgttggtttccattttttgtttgtttgcttgtttccaaaatagccttgcttggtactgcatggaaagttcaagcttttcttcttgcccgctcagggctggcctcttccccgtgtcttcacagcgtccctaaggaagatttttgcagcactctctggagctgaggggagtgaaatttggtccagagaaggcggaaggaaatagttttcctgtttccttttctcgaggtggatgtcctcaggcttccttcacacctccttctcatgggtgcggctggcagtacagtcaggctgtggaggagggctgagaagaaaggggcactggtccagccccaggtttggtctgagacaggtacacagcagataccatcccaccttcctctctaaagaacaggccagccacacatataaccctttccctactttactaatgtatcccttatgtggtaccagcaatggaggacaggcagacttaccccctgccatctagagagaatgttgttattacccgtaaaacttgaccacccccatatcccactcctttttgtaaaaacaaatgcttaaacctgtgagcctgccgttcctttctatgtgttaatcagtttccttccatttgagctgtgtgggagggaagggcattgaaattgtaggttgtaatcttgtgccaaccgttagcaggggaggcctctagagtcga

SEQ ID NO: 313689 - DNA, 2743 bp, Homo sapiens
ttcaccccgtaataatgcccagaagacaaaatgaaacacggacagatggtcattatttatcacccctttgttttgctttggttactcagttcctgcagcataacagatatgacttatgccagggaaggtagaggctgattatggagacacccaggaacaggaataagaagggataggtctgctccacgtagaacctccccagatcggaagttaagtcttggagagtttccaaagtgctgaagtaaaaaggagacttggagggcctttgcttaatgagcaagaggcttgtgtcctcccaagaacatgagggagttcagaagggagctatagctcacagacagaaacctgcccgctcaccccatccctcgtgactgggagcatgtttgctcagaattttctaagaggactctcccttcaaaaatccaatttgctcccagaatgttgtttagcctctgagaatctcactctttcatttccatctgtgaatggacatagatgtgttgctcagggatcagaaacatcagagtccagggcccagtggcatggtgttgcattagtagttagaaaagtaattggtcagctctactgtaaaagaaataagtatgtagtacagttttgtaaatgtcaggtctgttctattgttttgtgatctgaagactgtcaaactggttgataatcaaagaaaaggttggttagaataagtaaaatttcagttagaaagatatagcttaccagttttccatgtgcttaaggaagtcaagaatatttcaggttgttgagaactgttgtaaaatggaattgaagctagtgtctctcaccttcttaggtgtatcagagagaggaagtggaaggccagtagtagcatcttcatacttacttttgccagcccagcctccatttcaaagactttgtcttccatcctatccaatgacatggtcagggatgggctctgaggaggcagtgaggccccaccttggtttgctccactgtggtgtgtagtctccaaacagcttaagggtttttaagttttctcacgattacctccactccactcatctactatcagcatcagaaaggttaacatccctgggaccattctacttataaaagagatgaactagtgtgctttctccccttttccaggtgtgccatccatatacaatctcctcttggccaagttcaacaaatgtttccagggaaccccgtgggttgaggcaaagtagccaagatgtattgagttaagtttttctagaggacaaaagtatttcttgtcccttttccctcatgctcatatgttttagctgaggcgtaaatggccaagttgagtaatatctgtggaactgagacagagagccagggacccatgtacccagggaccagtcccctggggaatcacacagtggctcagactagactgctctatcccaccagaactctgctgctgttcatttccatcaggaccacccaggaaagcaaataagttagccttctcatcattaggtcacctaatctcttgggttgcaggatgagagcatatatagatctcctgtttagagagtgtgttcataattgtagaaagggatagaaaatggaataaccaagaggctgtgtcattttttaagaggatggcaaggatgacctcaaatgagctcaacaaaactgggaatccaaggaatggtgcttgtagggaaagagaggtcagttgtggtccttaaacctcttggcaccttgtgcgggttataaaacaaggagctggagtaaaattgcccttacccccaatccaaatgctgtccaggatttaggagctacccaacctgtggttatatggtgttggtttccattttttgtttgtttgcttgtttccaaaatagccttgcttggtactgcatggaaagttcaagcttttcttcttgcccgctcagggctggcctcttccccgtgtcttcacagcgtccctaaggaagatttttgcagcactctctggagctgaggggagtgaaatttggtccagagaaggcggaaggaaatagttttcctgtttccttttctcgaggtggatgtcctcaggcttccttcacacctccttctcatgggtgcggctggcagtacagtcaggctgtggaggagggctgagaagaaaggggcactggtccagccccaggtttggtctgagacaggtacacagcagataccatcccaccttcctctctaaagaacaggccagccacacatataaccctttccctactttactaatgtatcccttatgtggtaccagcaatggaggacaggcagacttaccccctgccatctagagagaatgttgttattacccgtaaaacttgaccacccccatatcccactcctttttgtaaaaacaaatgcttaaacctgtgagcctgccgttcctttctatgtgttaatcagtttccttccatttgagctgtgtgggagggaagggcattgaaattgtaggttgtaatcttgtgccaaccaataaaaaccagtatttcacacacaaaaaaaaaaaaaaaaaaaaaaaaaaaaaaaaaaaaaaacccggggggctctttttctgcgggggcgggggaaaaggaggtttgagagaaggggcaggggccaaagggggttcccgggacccgagtttttttgggcaacaggggggagaaaccggggggccccccaaggggggggggggaaaaatcggaaaaacccggggttcccggtagatgttcggtcgaac

SEQ ID NO: 313690 - DNA, 5952 bp, Homo sapiens
cttagtttacatcctctcccccaatcttcacacacagagccaaagagcagttatattcttgggataccatgatacctctgggaaaggaattatattcccaaggagaggtcccattggataagaacaataccatgggacttgagtctgaatgccaacttactattcacacatccttcttaaaaacgaacacactgtttcttttcctgacctagagcattctaaagttctgttcaaataaataaagggcaaaataaagtagatttaaccaagtgccaggtggaattcaaaaaacacattcttccagataaattctacctttatggtatggatttgaaagtactttgcaggaaaacagtcagtactctttaaaaagggactgcagggctgggtgtagtggctcacacctgtaatcccagcactttgggaggccaaggcaggtgggtcacttgaggccaggagtttgagaccagcctgaccaacatggcaaaaccccatctctactaaaatacaaaaattagctgggcatgatggtgcactcctgtaatcccagctacttggtaggctgaagcatgagaattgcttaaacctgggaggcagaggttgcagtaagccaagatcatgccactgcattccagcctgggcaacagagtaagactctgtcttaataaataaataagaaaataaaacggaactgcagtgctaacagtaatttatacatttttaaatgttctgagtatgttttgactgggctagtgtaacaatatactaccctgaaagtgcagttttgattgttgttggtgtctttgggtcaggaaagtgaactgtgccaagaagtatttttcagtgacatgaatggattcctgttaatgcaattgactgagagattgtgcttacgctttcttaactgacaaaaagaggctttgtccaacatcagaattgttgaaactggtgctgttttctgttgcactgggattctgatgatctgggattttccctccttggcacagtaaacaccatgactgtctttattgagaatgtcgtcacagtcctttagtgatagattagttagacccatggttgcaatacctttatctccccaaagaaaataatcaaaagaaagcacaaaagctaccctgtttgcagaatatttcactgacattgatttgtcattaattctaccagagctgacctcattcaggcttgatagaaacaggttcctatgtttagggcagatccctagcctctcgctcacagtgagtctgcatgtcctagattctggttattgctggagcatccattaaagtctaccaaactcaggacagaagaagatagcagtggatttgtaaaaatttttagtttataaattacagtcattggggaaacactagtaaggtcatgtgatcttttggaccaggattttctctctgtcttctctctgggtgtgtgtgtgtgtatgtacagaagggctaccaggaagtgtcaaccatgttagattttctgtagtcttccagaaacagtgcagcccatacaacaggaatcttaattttcctcacagcaaatataacaggatggaacagttagtgttttgttttcacaagtgtccaccactccatctgccctgcatggagagggctctctcactgctagatctaggctgagccatctggaaggatcaaagggtgtgggagtatcaccccctctcaggctgcagaaggtctcgagggtggcgtcacagcaggatttccgccttctgcattgcactgcacagccccatggaacatgaggcacttgaggccttgcttcttggagcctctggggagcagagtaggtcactgccctctgggagtgttttgcagtagttttgtaaatgtgttgctacatagtcaagttcctttgtggcaaagaaatattttgttttgatattaggagccagcccatgtaatgcctctcaggcttgcttgcttagaagaaaaaagtcaccctttgtggtttttaagaaaaaaattctgtgcagatctgttcctcctcctgctccttcccttttctctacatacagtgctcattggaggctcctgctaaaccttcttaaccagagaaataataggtatttgttagacctgagtgtacatttcacatgttatccttcacatatttctcattttcatctagtactttcttaatgcctttgttggagtccgcatcctcatctttaaaaaaaaaaaaaaaaaacagcttagcctaagccacattcactttttttagttcacaaaaaggatttaatagccacaatgtgatttttgccacaactgtgtgattttaatattctctaatatcaagggcggatttagaattgcaggaaatacctggagaaatcacagtggaatgaatttttgctttaagagaaatgagagttggctgtctctgtaattgataatacagcttcatcctagtcccatctgcatttcagaaaataaccctcatctttacaaaacacaggacacttgtgggacagttaactcaagcagctatggggagggaggagattattgaatggtgattaaataatgcaaatggctcttctgtttcttaaagactgtggaagaggtcagactgcccagttgaggtgggcagttcatactgctcagttgaggtggcagtcatttattctgagtcctgttggatagagcctatctcctcaaggctacagaggcttccaggatatggagctgtgcatgttaatggctcagccttgcctccatcagggcacctgcctaacttggagcaagtgggagagcaccctagagtcatcctctgtgctgtttcgtgagttttgcagcggagacttcaccatccggaggagctgtgtttctgtgtcacttgggatatcacctaaaaatgaaacatttgatattttaaggtataaaaaaaaagtaaattggggaacattggctgcagtccctaaaagatactgttgtctgtgcatcaggttagcttgaggtcaccacaggtcctgggagcccagagagtttaggcatactctcctttggaggccagcagcctttcacaaaccctgcctctaaaagggcggtttcacatttgaccatgtttttgcattagcctcagaaactcttgtctttagctgataacctttgagggatgtgagaagcctagttggagcatctgagaaaatgatacctctcaccttcaaattaatcaaatagtttgtccttctagtccccttataaattaataaatggagggctggtcatggtggctcacgcctgtaatcccagcactttgggaggccgaggcgggtggatcacaaggtcaggagttcaagaccagcctgaccaatatggtgaaaccccatctctactaaaaatacaaaaattagccaggtgtagtggcacgctcctgtagtcccagctactcgggaggctgaggcaggagaatcgcttgaacccaggaggtggatgttgcagtgagccgagatcccgccactgcactgcagcctaggcgacagagcaagactccgtctcaaaaaaaaaaaaagaaaaaaaaagaaaagggaagggaatcccattttgtgatgatttgggcacactacttgagctgaggctagcagtcacatgattttggctgtctctgacctgaagcttttgaagtaaggttatgtctcttccctgaagctttgtttatagtggtaatttggtgagtttgagctttgagcttgtcttagaaaataagactgtccacctggggaggggagcttatagggaacccgtgttaactcagaatgctgaagaaagtgcttttagccaacaaaagtaagattactatctagaaggtggaaagaagtcattgcttctgttcctccagcagtcagttgactctaggtttcctttggtttatatccccagttcttaatactaaaacttatttgacttcctatcaggaagcacacaaaaaaagcgtcatttaaaaccctggatataggctttaaaggatacaaaaacagcagcattgtcgttttgccaggttcatcaccattttgatgtgctacccatccttccaccctccctttcctgcccccaagcctcccagccaggccagatgtgaagattctattaatcactgtttcagagaacattaattcttgtatagaataattatctactaaattgcttattatctgtgactaccttgcagagaacatctcaacagtgcagtaaaatagctctcctagacttgagcttccagccaggcatttagatcactcttaagcctttgtggaattctgaggaaaaaaagcaagatgcctcaatgccaatgctgggccataagattctactcccctccctgtagggtggggcgcgtggctcagctttggaaaatcattttgccagtaatattgcctgtgaatccctttaagaagtcgtcctgatctgagcctgtctttctgagcactttggtgctgaattgaaaatggtaagctaaagcagtgacagatccacgtagcctctttaacctctttattatcttgccaaaaaaaaagtttctcaggttaaacctttgtctttaacctccctttgttgtggagaaaatgtgtcactaatcagtggtccaagggatatctagctttggttactcagttcctgcagcataacagatatgacttatgccagggaaggtagaggctgattatggagacacccaggaacaggaataagaagggataggtctgctccacgtagaacctccccagatcggaagttaagtcttggagagtttccaaagtgctgaagtaaaaaggagacttggagggcctttgcttaatgagcaagaggcttgtgtcctcccaagaacatgagggagttcagaagggagctatagctcacagacagaaacctgcccgctcaccccatccctcgtgactgggagcatgtttgctcagaattttctaagaggactctcccttcaaaaatccaatttgctcccagaatgttgtttagcctctgagaatctcactctttcatttccatctgtgaatggacatagatgtgttgctcagggatcagaaacatcagagtccagggcccagtggcatggtgttgcattagtagttagaaaagtaattggtcagctctactgtaaaagaaataagtatgtagtacagttttgtaaatgtcaggtctgttctattgttttgtgatctgaagactgtcaaactggttgataatcaaagaaaaggttggttagaataagtaaaatttcagttagaaagatatagcttaccagttttccatgtgcttaaggaagtcaagaatatttcaggttgttgagaacaaaggggcactggtccagccccaggtttggtctgagacaggtacacagcagataccatcccaccttcctctctaaagaacaggccagccacacatataaccctttccctactttactaatgtatcccttatgtggtaccagcaatggaggacaggcagacttaccccctgccatctagagagaatgttgttattacccgtaaaacttgaccacccccatatcccactcctttttgtaaaaacaaatgcttaaacctgtgagcctgccgttcctttctatgtgttaatcagtttccttccatttgagctgtgtgggagggaagggcattgaaattgtaggttgtaatcttgtgccaaccaataaaaaccagtatttcacacacaaaaaaaaaaaaaaaaaaaaaaaaaaaaaaaaaaaaaaacccggggggctctttttctgcgggggcgggggaaaaggaggtttgagagaaggggcaggggccaaagggggttcccgggacccgagtttttttgggcaacaggggggagaaaccggggggccccccaaggggggggggggaaaaatcggaaaaacccggggttcccggtagatgttcggtcgaac

SEQ ID NO: 313691 - DNA, 6491 bp, Homo sapiens
  misc_feature (6340)..(6340): n is a, c, g, or t
  misc_feature (6398)..(6398): n is a, c, g, or t
  misc_feature (6438)..(6438): n is a, c, g, or t
cttagtttacatcctctcccccaatcttcacacacagagccaaagagcagttatattcttgggataccatgatacctctgggaaaggaattatattcccaaggagaggtcccattggataagaacaataccatgggacttgagtctgaatgccaacttactattcacacatccttcttaaaaacgaacacactgtttcttttcctgacctagagcattctaaagttctgttcaaataaataaagggcaaaataaagtagatttaaccaagtgccaggtggaattcaaaaaacacattcttccagataaattctacctttatggtatggatttgaaagtactttgcaggaaaacagtcagtactctttaaaaagggactgcagggctgggtgtagtggctcacacctgtaatcccagcactttgggaggccaaggcaggtgggtcacttgaggccaggagtttgagaccagcctgaccaacatggcaaaaccccatctctactaaaatacaaaaattagctgggcatgatggtgcactcctgtaatcccagctacttggtaggctgaagcatgagaattgcttaaacctgggaggcagaggttgcagtaagccaagatcatgccactgcattccagcctgggcaacagagtaagactctgtcttaataaataaataagaaaataaaacggaactgcagtgctaacagtaatttatacatttttaaatgttctgagtatgttttgactgggctagtgtaacaatatactaccctgaaagtgcagttttgattgttgttggtgtctttgggtcaggaaagtgaactgtgccaagaagtatttttcagtgacatgaatggattcctgttaatgcaattgactgagagattgtgcttacgctttcttaactgacaaaaagaggctttgtccaacatcagaattgttgaaactggtgctgttttctgttgcactgggattctgatgatctgggattttccctccttggcacagtaaacaccatgactgtctttattgagaatgtcgtcacagtcctttagtgatagattagttagacccatggttgcaatacctttatctccccaaagaaaataatcaaaagaaagcacaaaagctaccctgtttgcagaatatttcactgacattgatttgtcattaattctaccagagctgacctcattcaggcttgatagaaacaggttcctatgtttagggcagatccctagcctctcgctcacagtgagtctgcatgtcctagattctggttattgctggagcatccattaaagtctaccaaactcaggacagaagaagatagcagtggatttgtaaaaatttttagtttataaattacagtcattggggaaacactagtaaggtcatgtgatcttttggaccaggattttctctctgtcttctctctgggtgtgtgtgtgtgtatgtacagaagggctaccaggaagtgtcaaccatgttagattttctgtagtcttccagaaacagtgcagcccatacaacaggaatcttaattttcctcacagcaaatataacaggatggaacagttagtgttttgttttcacaagtgtccaccactccatctgccctgcatggagagggctctctcactgctagatctaggctgagccatctggaaggatcaaagggtgtgggagtatcaccccctctcaggctgcagaaggtctcgagggtggcgtcacagcaggatttccgccttctgcattgcactgcacagccccatggaacatgaggcacttgaggccttgcttcttggagcctctggggagcagagtaggtcactgccctctgggagtgttttgcagtagttttgtaaatgtgttgctacatagtcaagttcctttgtggcaaagaaatattttgttttgatattaggagccagcccatgtaatgcctctcaggcttgcttgcttagaagaaaaaagtcaccctttgtggtttttaagaaaaaaattctgtgcagatctgttcctcctcctgctccttcccttttctctacatacagtgctcattggaggctcctgctaaaccttcttaaccagagaaataataggtatttgttagacctgagtgtacatttcacatgttatccttcacatatttctcattttcatctagtactttcttaatgcctttgttggagtccgcatcctcatctttaaaaaaaaaaaaaaaaaacagcttagcctaagccacattcactttttttagttcacaaaaaggatttaatagccacaatgtgatttttgccacaactgtgtgattttaatattctctaatatcaagggcggatttagaattgcaggaaatacctggagaaatcacagtggaatgaatttttgctttaagagaaatgagagttggctgtctctgtaattgataatacagcttcatcctagtcccatctgcatttcagaaaataaccctcatctttacaaaacacaggacacttgtgggacagttaactcaagcagctatggggagggaggagattattgaatggtgattaaataatgcaaatggctcttctgtttcttaaagactgtggaagaggtcagactgcccagttgaggtgggcagttcatactgctcagttgaggtggcagtcatttattctgagtcctgttggatagagcctatctcctcaaggctacagaggcttccaggatatggagctgtgcatgttaatggctcagccttgcctccatcagggcacctgcctaacttggagcaagtgggagagcaccctagagtcatcctctgtgctgtttcgtgagttttgcagcggagacttcaccatccggaggagctgtgtttctgtgtcacttgggatatcacctaaaaatgaaacatttgatattttaaggtataaaaaaaaagtaaattggggaacattggctgcagtccctaaaagatactgttgtctgtgcatcaggttagcttgaggtcaccacaggtcctgggagcccagagagtttaggcatactctcctttggaggccagcagcctttcacaaaccctgcctctaaaagggcggtttcacatttgaccatgtttttgcattagcctcagaaactcttgtctttagctgataacctttgagggatgtgagaagcctagttggagcatctgagaaaatgatacctctcaccttcaaattaatcaaatagtttgtccttctagtccccttataaattaataaatggagggctggtcatggtggctcacgcctgtaatcccagcactttgggaggccgaggcgggtggatcacaaggtcaggagttcaagaccagcctgaccaatatggtgaaaccccatctctactaaaaatacaaaaattagccaggtgtagtggcacgctcctgtagtcccagctactcgggaggctgaggcaggagaatcgcttgaacccaggaggtggatgttgcagtgagccgagatcccgccactgcactgcagcctaggcgacagagcaagactccgtctcaaaaaaaaaaaaagaaaaaaaaagaaaagggaagggaatcccattttgtgatgatttgggcacactacttgagctgaggctagcagtcacatgattttggctgtctctgacctgaagcttttgaagtaaggttatgtctcttccctgaagctttgtttatagtggtaatttggtgagtttgagctttgagcttgtcttagaaaataagactgtccacctggggaggggagcttatagggaacccgtgttaactcagaatgctgaagaaagtgcttttagccaacaaaagtaagattactatctagaaggtggaaagaagtcattgcttctgttcctccagcagtcagttgactctaggtttcctttggtttatatccccagttcttaatactaaaacttatttgacttcctatcaggaagcacacaaaaaaagcgtcatttaaaaccctggatataggctttaaaggatacaaaaacagcagcattgtcgttttgccaggttcatcaccattttgatgtgctacccatccttccaccctccctttcctgcccccaagcctcccagccaggccagatgtgaagattctattaatcactgtttcagagaacattaattcttgtatagaataattatctactaaattgcttattatctgtgactaccttgcagagaacatctcaacagtgcagtaaaatagctctcctagacttgagcttccagccaggcatttagatcactcttaagcctttgtggaattctgaggaaaaaaagcaagatgcctcaatgccaatgctgggccataagattctactcccctccctgtagggtggggcgcgtggctcagctttggaaaatcattttgccagtaatattgcctgtgaatccctttaagaagtcgtcctgatctgagcctgtctttctgagcactttggtgctgaattgaaaatggtaagctaaagcagtgacagatccacgtagcctctttaacctctttattatcttgccaaaaaaaaagtttctcaggttaaacctttgtctttaacctccctttgttgtggagaaaatgtgtcactaatcagtggtccaagggatatctagctttggttactcagttcctgcagcataacagatatgacttatgccagggaaggtagaggctgattatggagacacccaggaacaggaataagaagggataggtctgctccacgtagaacctccccagatcggaagttaagtcttggagagtttccaaagtgctgaagtaaaaaggagacttggagggcctttgcttaatgagcaagaggcttgtgtcctcccaagaacatgagggagttcagaagggagctatagctcacagacagaaacctgcccgctcaccccatccctcgtgactgggagcatgtttgctcagaattttctaagaggactctcccttcaaaaatccaatttgctcccagaatgttgtttagcctctgagaatctcactctttcatttccatctgtgaatggacatagatgtgttgctcagggatcagaaacatcagagtccagggcccagtggcatggtgttgcattagtagttagaaaagtaattggtcagctctactgtaaaagaaataagtatgtagtacagttttgtaaatgtcaggtctgttctattgttttgtgatctgaagactgtcaaactggttgataatcaaagaaaaggttggttagaataagtaaaatttcagttagaaagatatagcttaccagttttccatgtgcttaaggaagtcaagaatatttcaggttgttgagaactgttgtaaaatggaattgaagctagtgtctctcaccttcttaggtgtatcagagagaggaagtggaaggccagtagtagcatcttcatacttacttttgccagcccagcctccatttcaaagactttgtcttccatcctatccaatgacatggtcagggatgggctctgaggaggcagtgaggccccaccttggtttgctccactgtggtgtgtagtctccaaacagcttaagggtttttaagttttctcacgattacctccactccactcatctactatcagcatcagaaaggttaacatccctgggaccattctacttataaaagagatgaactagtgtgctttctccccttttccaggtgtgccatccatatacaatctcctcttggccaagttcaacaaatgtttccagggaaccccgtgggttgaggcaaagtagccaagatgtattgagttaagtttttctagaggacaaaagtatttcttgtcccttttccctcatgctcatatgttttagctgaggcgtaaatggccaagttgagtaatatctgtggaactgagacagagagccagggacccatgtacccagggaccagtcccctggggaatcacacagtggctcagactagactgctctatcccaccagaactctgctgctgttcatttccatcaggaccacccaggaaagcaaataagttagccttctcatcattaggtcacctaatctcttgggttgcaggatgagagcatatatagatctcctgtttagagagtgtgttcataattgtagaaagggatagaaaatggaataaccaagaggctgtgtcattttttaagaggatggcaaggatgacctcaaatgagctcaacaaaactgggaatccaaggaatggtgcttgtagggaaagagaggtcagttgtggtccttaaacctcttggcaccttgtgcgggttataaaacaaggagctggagtcctgtggggtatatgtgngggtttccattttttgcttgattgcttgtttccacaatagccttcattgatactggcncctctgttcaagcctttccttcctgcccgctcccagcccnccctttcgcccggttctgcacatcgcccccttaaggtggactcccgccaacat

SEQ ID NO: 313692 - DNA, 5872 bp, Homo sapiens
cttagtttacatcctctcccccaatcttcacacacagagccaaagagcagttatattcttgggataccatgatacctctgggaaaggaattatattcccaaggagaggtcccattggataagaacaataccatgggacttgagtctgaatgccaacttactattcacacatccttcttaaaaacgaacacactgtttcttttcctgacctagagcattctaaagttctgttcaaataaataaagggcaaaataaagtagatttaaccaagtgccaggtggaattcaaaaaacacattcttccagataaattctacctttatggtatggatttgaaagtactttgcaggaaaacagtcagtactctttaaaaagggactgcagggctgggtgtagtggctcacacctgtaatcccagcactttgggaggccaaggcaggtgggtcacttgaggccaggagtttgagaccagcctgaccaacatggcaaaaccccatctctactaaaatacaaaaattagctgggcatgatggtgcactcctgtaatcccagctacttggtaggctgaagcatgagaattgcttaaacctgggaggcagaggttgcagtaagccaagatcatgccactgcattccagcctgggcaacagagtaagactctgtcttaataaataaataagaaaataaaacggaactgcagtgctaacagtaatttatacatttttaaatgttctgagtatgttttgactgggctagtgtaacaatatactaccctgaaagtgcagttttgattgttgttggtgtctttgggtcaggaaagtgaactgtgccaagaagtatttttcagtgacatgaatggattcctgttaatgcaattgactgagagattgtgcttacgctttcttaactgacaaaaagaggctttgtccaacatcagaattgttgaaactggtgctgttttctgttgcactgggattctgatgatctgggattttccctccttggcacagtaaacaccatgactgtctttattgagaatgtcgtcacagtcctttagtgatagattagttagacccatggttgcaatacctttatctccccaaagaaaataatcaaaagaaagcacaaaagctaccctgtttgcagaatatttcactgacattgatttgtcattaattctaccagagctgacctcattcaggcttgatagaaacaggttcctatgtttagggcagatccctagcctctcgctcacagtgagtctgcatgtcctagattctggttattgctggagcatccattaaagtctaccaaactcaggacagaagaagatagcagtggatttgtaaaaatttttagtttataaattacagtcattggggaaacactagtaaggtcatgtgatcttttggaccaggattttctctctgtcttctctctgggtgtgtgtgtgtgtatgtacagaagggctaccaggaagtgtcaaccatgttagattttctgtagtcttccagaaacagtgcagcccatacaacaggaatcttaattttcctcacagcaaatataacaggatggaacagttagtgttttgttttcacaagtgtccaccactccatctgccctgcatggagagggctctctcactgctagatctaggctgagccatctggaaggatcaaagggtgtgggagtatcaccccctctcaggctgcagaaggtctcgagggtggcgtcacagcaggatttccgccttctgcattgcactgcacagccccatggaacatgaggcacttgaggccttgcttcttggagcctctggggagcagagtaggtcactgccctctgggagtgttttgcagtagttttgtaaatgtgttgctacatagtcaagttcctttgtggcaaagaaatattttgttttgatattaggagccagcccatgtaatgcctctcaggcttgcttgcttagaagaaaaaagtcaccctttgtggtttttaagaaaaaaattctgtgcagatctgttcctcctcctgctccttcccttttctctacatacagtgctcattggaggctcctgctaaaccttcttaaccagagaaataataggtatttgttagacctgagtgtacatttcacatgttatccttcacatatttctcattttcatctagtactttcttaatgcctttgttggagtccgcatcctcatctttaaaaaaaaaaaaaaaaaacagcttagcctaagccacattcactttttttagttcacaaaaaggatttaatagccacaatgtgatttttgccacaactgtgtgattttaatattctctaatatcaagggcggatttagaattgcaggaaatacctggagaaatcacagtggaatgaatttttgctttaagagaaatgagagttggctgtctctgtaattgataatacagcttcatcctagtcccatctgcatttcagaaaataaccctcatctttacaaaacacaggacacttgtgggacagttaactcaagcagctatggggagggaggagattattgaatggtgattaaataatgcaaatggctcttctgtttcttaaagactgtggaagaggtcagactgcccagttgaggtgggcagttcatactgctcagttgaggtggcagtcatttattctgagtcctgttggatagagcctatctcctcaaggctacagaggcttccaggatatggagctgtgcatgttaatggctcagccttgcctccatcagggcacctgcctaacttggagcaagtgggagagcaccctagagtcatcctctgtgctgtttcgtgagttttgcagcggagacttcaccatccggaggagctgtgtttctgtgtcacttgggatatcacctaaaaatgaaacatttgatattttaaggtataaaaaaaaagtaaattggggaacattggctgcagtccctaaaagatactgttgtctgtgcatcaggttagcttgaggtcaccacaggtcctgggagcccagagagtttaggcatactctcctttggaggccagcagcctttcacaaaccctgcctctaaaagggcggtttcacatttgaccatgtttttgcattagcctcagaaactcttgtctttagctgataacctttgagggatgtgagaagcctagttggagcatctgagaaaatgatacctctcaccttcaaattaatcaaatagtttgtccttctagtccccttataaattaataaatggagggctggtcatggtggctcacgcctgtaatcccagcactttgggaggccgaggcgggtggatcacaaggtcaggagttcaagaccagcctgaccaatatggtgaaaccccatctctactaaaaatacaaaaattagccaggtgtagtggcacgctcctgtagtcccagctactcgggaggctgaggcaggagaatcgcttgaacccaggaggtggatgttgcagtgagccgagatcccgccactgcactgcagcctaggcgacagagcaagactccgtctcaaaaaaaaaaaaagaaaaaaaaagaaaagggaagggaatcccattttgtgatgatttgggcacactacttgagctgaggctagcagtcacatgattttggctgtctctgacctgaagcttttgaagtaaggttatgtctcttccctgaagctttgtttatagtggtaatttggtgagtttgagctttgagcttgtcttagaaaataagactgtccacctggggaggggagcttatagggaacccgtgttaactcagaatgctgaagaaagtgcttttagccaacaaaagtaagattactatctagaaggtggaaagaagtcattgcttctgttcctccagcagtcagttgactctaggtttcctttggtttatatccccagttcttaatactaaaacttatttgacttcctatcaggaagcacacaaaaaaagcgtcatttaaaaccctggatataggctttaaaggatacaaaaacagcagcattgtcgttttgccaggttcatcaccattttgatgtgctacccatccttccaccctccctttcctgcccccaagcctcccagccaggccagatgtgaagattctattaatcactgtttcagagaacattaattcttgtatagaataattatctactaaattgcttattatctgtgactaccttgcagagaacatctcaacagtgcagtaaaatagctctcctagacttgagcttccagccaggcatttagatcactcttaagcctttgtggaattctgaggaaaaaaagcaagatgcctcaatgccaatgctgggccataagattctactcccctccctgtagggtggggcgcgtggctcagctttggaaaatcattttgccagtaatattgcctgtgaatccctttaagaagtcgtcctgatctgagcctgtctttctgagcactttggtgctgaattgaaaatggtaagctaaagcagtgacagatccacgtagcctctttaacctctttattatcttgccaaaaaaaaagtttctcaggttaaacctttgtctttaacctccctttgttgtggagaaaatgtgtcactaatcagtggtccaagggatatctagctttggttactcagttcctgcagcataacagatatgacttatgccagggaaggtagaggctgattatggagacacccaggaacaggaataagaagggataggtctgctccacgtagaacctccccagatcggaagttaagtcttggagagtttccaaagtgctgaagtaaaaaggagacttggagggcctttgcttaatgagcaagaggcttgtgtcctcccaagaacatgagggagttcagaagggagctatagctcacagacagaaacctgcccgctcaccccatccctcgtgactgggagcatgtttgctcagaattttctaagaggactctcccttcaaaaatccaatttgctcccagaatgttgtttagcctctgagaatctcactctttcatttccatctgtgaatggacatagatgtgttgctcagggatcagaaacatcagagtccagggcccagtggcatggtgttgcattagtagttagaaaagtaattggtcagctctactgtaaaagaaataagtatgtagtacagttttgtaaatgtcaggtctgttctattgttttgtgatctgaagactgtcaaactggttgataatcaaagaaaaggttggttagaataagtaaaatttcagttagaaagatatagcttaccagttttccatgtgcttaaggaagtcaagaatatttcaggttgttgagaacaggccagccacacatataaccctttccctactttactaatgtatcccttatgtggtaccagcaatggaggacaggcagacttaccccctgccatctagagagaatgttgttattacccgtaaaacttgaccacccccatatcccactcctttttgtaaaaacaaatgcttaaacctgtgagcctgccgttcctttctatgtgttaatcagtttccttccatttgagctgtgtgggagggaagggcattgaaattgtaggttgtaatcttgtgccaaccaataaaaaccagtatttcacacacaaaaaaaaaaaaaaaaaaaaaaaaaaaaaaaaaaaaaaacccggggggctctttttctgcgggggcgggggaaaaggaggtttgagagaaggggcaggggccaaagggggttcccgggacccgagtttttttgggcaacaggggggagaaaccggggggccccccaaggggggggggggaaaaatcggaaaaacccggggttcccggtagatgttcggtcgaac

SEQ ID NO: 313693 - DNA, 4178 bp, Homo sapiens
  misc_feature (3866)..(3866): n is a, c, g, or t
  misc_feature (3876)..(3876): n is a, c, g, or t
  misc_feature (3879)..(3879): n is a, c, g, or t
  misc_feature (3906)..(3906): n is a, c, g, or t
cttagtttacatcctctcccccaatcttcacacacagagccaaagagcagttatattcttgggataccatgatacctctgggaaaggaattatattcccaaggagaggtcccattggataagaacaataccatgggacttgagtctgaatgccaacttactattcacacatccttcttaaaaacgaacacactgtttcttttcctgacctagagcattctaaagttctgttcaaataaataaagggcaaaataaagtagatttaaccaagtgccaggtggaattcaaaaaacacattcttccagataaattctacctttatggtatggatttgaaagtactttgcaggaaaacagtcagtactctttaaaaagggactgcagggctgggtgtagtggctcacacctgtaatcccagcactttgggaggccaaggcaggtgggtcacttgaggccaggagtttgagaccagcctgaccaacatggcaaaaccccatctctactaaaatacaaaaattagctgggcatgatggtgcactcctgtaatcccagctacttggtaggctgaagcatgagaattgcttaaacctgggaggcagaggttgcagtaagccaagatcatgccactgcattccagcctgggcaacagagtaagactctgtcttaataaataaataagaaaataaaacggaactgcagtgctaacagtaatttatacatttttaaatgttctgagtatgttttgactgggctagtgtaacaatatactaccctgaaagtgcagttttgattgttgttggtgtctttgggtcaggaaagtgaactgtgccaagaagtatttttcagtgacatgaatggattcctgttaatgcaattgactgagagattgtgcttacgctttcttaactgacaaaaagaggctttgtccaacatcagaattgttgaaactggtgctgttttctgttgcactgggattctgatgatctgggattttccctccttggcacagtaaacaccatgactgtctttattgagaatgtcgtcacagtcctttagtgatagattagttagacccatggttgcaatacctttatctccccaaagaaaataatcaaaagaaagcacaaaagctaccctgtttgcagaatatttcactgacattgatttgtcattaattctaccagagctgacctcattcaggcttgatagaaacaggttcctatgtttagggcagatccctagcctctcgctcacagtgagtctgcatgtcctagattctggttattgctggagcatccattaaagtctaccaaactcaggacagaagaagatagcagtggatttgtaaaaatttttagtttataaattacagtcattggggaaacactagtaaggtcatgtgatcttttggaccaggattttctctctgtcttctctctgggtgtgtgtgtgtgtatgtacagaagggctaccaggaagtgtcaaccatgttagattttctgtagtcttccagaaacagtgcagcccatacaacaggaatcttaattttcctcacagcaaatataacaggatggaacagttagtgttttgttttcacaagtgtccaccactccatctgccctgcatggagagggctctctcactgctagatctaggctgagccatctggaaggatcaaagggtgtgggagtatcaccccctctcaggctgcagaaggtctcgagggtggcgtcacagcaggatttccgccttctgcattgcactgcacagccccatggaacatgaggcacttgaggccttgcttcttggagcctctggggagcagagtaggtcactgccctctgggagtgttttgcagtagttttgtaaatgtgttgctacatagtcaagttcctttgtggcaaagaaatattttgttttgatattaggagccagcccatgtaatgcctctcaggcttgcttgcttagaagaaaaaagtcaccctttgtggtttttaagaaaaaaattctgtgcagatctgttcctcctcctgctccttcccttttctctacatacagtgctcattggaggctcctgctaaaccttcttaaccagagaaataataggtatttgttagacctgagtgtacatttcacatgttatccttcacatatttctcattttcatctagtactttcttaatgcctttgttggagtccgcatcctcatctttaaaaaaaaaaaaaaaaaacagcttagcctaagccacattcactttttttagttcacaaaaaggatttaatagccacaatgtgatttttgccacaactgtgtgattttaatattctctaatatcaagggcggatttagaattgcaggaaatacctggagaaatcacagtggaatgaatttttgctttaagagaaatgagagttggctgtctctgtaattgataatacagcttcatcctagtcccatctgcatttcagaaaataaccctcatctttacaaaacacaggacacttgtgggacagttaactcaagcagctatggggagggaggagattattgaatggtgattaaataatgcaaatggctcttctgtttcttaaagactgtggaagaggtcagactgcccagttgaggtgggcagttcatactgctcagttgaggtggcagtcatttattctgagtcctgttggatagagcctatctcctcaaggctacagaggcttccaggatatggagctgtgcatgttaatggctcagccttgcctccatcagggcacctgcctaacttggagcaagtgggagagcaccctagagtcatcctctgtgctgtttcgtgagttttgcagcggagacttcaccatccggaggagctgtgtttctgtgtcacttgggatatcacctaaaaatgaaacatttgatattttaaggtataaaaaaaaagtaaattggggaacattggctgcagtccctaaaagatactgttgtctgtgcatcaggttagcttgaggtcaccacaggtcctgggagcccagagagtttaggcatactctcctttggaggccagcagcctttcacaaaccctgcctctaaaagggcggtttcacatttgaccatgtttttgcattagcctcagaaactcttgtctttagctgataacctttgagggatgtgagaagcctagttggagcatctgagaaaatgatacctctcaccttcaaattaatcaaatagtttgtccttctagtccccttataaattaataaatggagggctggtcatggtggctcacgcctgtaatcccagcactttgggaggccgaggcgggtggatcacaaggtcaggagttcaagaccagcctgaccaatatggtgaaaccccatctctactaaaaatacaaaaattagccaggtgtagtggcacgctcctgtagtcccagctactcgggaggctgaggcaggagaatcgcttgaacccaggaggtggatgttgcagtgagccgagatcccgccactgcactgcagcctaggcgacagagcaagactccgtctcaaaaaaaaaaaaagaaaaaaaaacggaactgcagtgctaacagtaatttatacatttttaaatgttctgagtatgttttgactgggctagtgtaacaatatactaccctgaaagtgcagttttgattgttgttggtgtctttgggtcaggaaagtgaactgtgccaagaagtatttttcagtgacatgaatggattcctgttaatgcaattgactgagagattgtgcttacgctttcttaactgacaaaaagaggctttgtccaacatcagaattgttgaaactggtgctgttttctgttgcactgggattctgatgatctgggatnttccctcctnggncacagtaaacaccatgactgtctttantgagaatgtcgtcacagtcctttagtgatagattagttagacccatggttgcaatacctttatctccccaaagaaaataatcaaaagaaagcacaaaagctaccctgtttgcagaatatttcactgacattgacctgtcattaattctaccagagctgacctcattcaggcttgatagatacaggttcctatgtttagggcagatccctagcctctcgctcacagtgagtctgcatgtcctagattctggttattggtgggagcatctggtg

SEQ ID NO: 313694 - DNA, 2945 bp, Homo sapiens
cttagtttacatcctctcccccaatcttcacacacagagccaaagagcagttatattcttgggataccatgatacctctgggaaaggaattatattcccaaggagaggtcccattggataagaacaataccatgggacttgagtctgaatgccaacttactattcacacatccttcttaaaaacgaacacactgtttcttttcctgacctagagcattctaaagttctgttcaaataaataaagggcaaaataaagtagatttaaccaagtgccaggtggaattcaaaaaacacattcttccagataaattctacctttatggtatggatttgaaagtactttgcaggaaaacagtcagtactctttaaaaagggactgcagggctgggtgtagtggctcacacctgtaatcccagcactttgggaggccaaggcaggtgggtcacttgaggccaggagtttgagaccagcctgaccaacatggcaaaaccccatctctactaaaatacaaaaattagctgggcatgatggtgcactcctgtaatcccagctacttggtaggctgaagcatgagaattgcttaaacctgggaggcagaggttgcagtaagccaagatcatgccactgcattccagcctgggcaacagagtaagactctgtcttaataaataaataagaaaataaaacggaactgcagtgctaacagtaatttatacatttttaaatgttctgagtatgttttgactgggctagtgtaacaatatactaccctgaaagtgcagttttgattgttgttggtgtctttgggtcaggaaagtgaactgtgccaagaagtatttttcagtgacatgaatggattcctgttaatgcaattgactgagagattgtgcttacgctttcttaactgacaaaaagaggctttgtccaacatcagaattgttgaaactggtgctgttttctgttgcactgggattctgatgatctgggattttccctccttggcacagtaaacaccatgactgtctttattgagaatgtcgtcacagtcctttagtgatagattagttagacccatggttgcaatacctttatctccccaaagaaaataatcaaaagaaagcacaaaagctaccctgtttgcagaatatttcactgacattgatttgtcattaattctaccagagctgacctcattcaggcttgatagaaacaggttcctatgtttagggcagatccctagcctctcgctcacagtgagtctgcatgtcctagattctggttattgctggagcatccattaaagtctaccaaactcaggacagaagaagatagcagtggatttgtaaaaatttttagtttataaattacagtcattggggaaacactagtaaggtcatgtgatcttttggaccaggattttctctctgtcttctctctgggtgtgtgtgtgtgtatgtacagaagggctaccaggaagtgtcaaccatgttagattttctgtagtcttccagaaacagtgcagcccatacaacaggaatcttaattttcctcacagcaaatataacaggatggaacagttagtgttttgttttcacaagtgtccaccactccatctgccctgcatggagagggctctctcactgctagatctaggctgagccatctggaaggatcaaagggtgtgggagtatcaccccctctcaggctgcagaaggtctcgagggtggcgtcacagcaggatttccgccttctgcattgcactgcacagccccatggaacatgaggcacttgaggccttgcttcttggagcctctggggagcagagtaggtcactgccctctgggagtgttttgcagtagttttgtaaatgtgttgctacatagtcaagttcctttgtggcaaagaaatattttgttttgatattaggagccagcccatgtaatgcctctcaggcttgcttgcttagaagaaaaaagtcaccctttgtggtttttaagaaaaaaattctgtgcagatctgttcctcctcctgctccttcccttttctctacatacagtgctcattggaggctcctgctaaaccttcttaaccagagaaataataggtatttgttagacctgagtgtacatttcacatgttatccttcacatatttctcattttcatctagtactttcttaatgcctttgttggagtccgcatcctcatctttaaaaaaaaaaaaaaaaaacagcttagcctaagccacattcactttttttagttcacaaaaaggatttaatagccacaatgtgatttttgccacaactgtgtgattttaatattctctaatatcaagggcggatttagaattgcaggaaatacctggagaaatcacagtggaatgaatttttgctttaagagaaatgagagttggctgtctctgtaattgataatacagcttcatcctagtcccatctgcatttcagaaaataaccctcatctttacaaaacacaggacacttgtgggacagttaactcaagcagctatggggagggaggagattattgaatggtgattaaataatgcaaatggctcttctgtttcttaaagactgtggaagaggtcagactgcccagttgaggtgggcagttcatactgctcagttgaggtggcagtcatttattctgagtcctgttggatagagcctatctcctcaaggctacagaggcttccaggatatggagctgtgcatgttaatggctcagccttgcctccatcagggcacctgcctaacttggagcaagtgggagagcaccctagagtcatcctctgtgctgtttcgtgagttttgcagcggagacttcaccatccggaggagctgtgtttctgtgtcacttgggatatcacctaagttcactgaaagggtggcgggttgtgttgtggtgttttatctgggaactcaa

SEQ ID NO: 313695 - DNA, 2944 bp, Homo sapiens
cttagtttacatcctctcccccaatcttcacacacagagccaaagagcagttatattcttgggataccatgatacctctgggaaaggaattatattcccaaggagaggtcccattggataagaacaataccatgggacttgagtctgaatgccaacttactattcacacatccttcttaaaaacgaacacactgtttcttttcctgacctagagcattctaaagttctgttcaaataaataaagggcaaaataaagtagatttaaccaagtgccaggtggaattcaaaaaacacattcttccagataaattctacctttatggtatggatttgaaagtactttgcaggaaaacagtcagtactctttaaaaagggactgcagggctgggtgtagtggctcacacctgtaatcccagcactttgggaggccaaggcaggtgggtcacttgaggccaggagtttgagaccagcctgaccaacatggcaaaaccccatctctactaaaatacaaaaattagctgggcatgatggtgcactcctgtaatcccagctacttggtaggctgaagcatgagaattgcttaaacctgggaggcagaggttgcagtaagccaagatcatgccactgcattccagcctgggcaacagagtaagactctgtcttaataaataaataagaaaataaaacggaactgcagtgctaacagtaatttatacatttttaaatgttctgagtatgttttgactgggctagtgtaacaatatactaccctgaaagtgcagttttgattgttgttggtgtctttgggtcaggaaagtgaactgtgccaagaagtatttttcagtgacatgaatggattcctgttaatgcaattgactgagagattgtgcttacgctttcttaactgacaaaaagaggctttgtccaacatcagaattgttgaaactggtgctgttttctgttgcactgggattctgatgatctgggattttccctccttggcacagtaaacaccatgactgtctttattgagaatgtcgtcacagtcctttagtgatagattagttagacccatggttgcaatacctttatctccccaaagaaaataatcaaaagaaagcacaaaagctaccctgtttgcagaatatttcactgacattgatttgtcattaattctaccagagctgacctcattcaggcttgatagaaacaggttcctatgtttagggcagatccctagcctctcgctcacagtgagtctgcatgtcctagattctggttattgctggagcatccattaaagtctaccaaactcaggacagaagaagatagcagtggatttgtaaaaatttttagtttataaattacagtcattggggaaacactagtaaggtcatgtgatcttttggaccaggattttctctctgtcttctctctgggtgtgtgtgtgtgtatgtacagaagggctaccaggaagtgtcaaccatgttagattttctgtagtcttccagaaacagtgcagcccatacaacaggaatcttaattttcctcacagcaaatataacaggatggaacagttagtgttttgttttcacaagtgtccaccactccatctgccctgcatggagagggctctctcactgctagatctaggctgagccatctggaaggatcaaagggtgtgggagtatcaccccctctcaggctgcagaaggtctcgagggtggcgtcacagcaggatttccgccttctgcattgcactgcacagccccatggaacatgaggcacttgaggccttgcttcttggagcctctggggagcagagtaggtcactgccctctgggagtgttttgcagtagttttgtaaatgtgttgctacatagtcaagttcctttgtggcaaagaaatattttgttttgatattaggagccagcccatgtaatgcctctcaggcttgcttgcttagaagaaaaaagtcaccctttgtggtttttaagaaaaaaattctgtgcagatctgttcctcctcctgctccttcccttttctctacatacagtgctcattggaggctcctgctaaaccttcttaaccagagaaataataggtatttgttagacctgagtgtacatttcacatgttatccttcacatatttctcattttcatctagtactttcttaatgcctttgttggagtccgcatcctcatctttaaaaaaaaaaaaaaaaaacagcttagcctaagccacattcactttttttagttcacaaaaaggatttaatagccacaatgtgatttttgccacaactgtgtgattttaatattctctaatatcaagggcggatttagaattgcaggaaatacctggagaaatcacagtggaatgaatttttgctttaagagaaatgagagttggctgtctctgtaattgataatacagcttcatcctagtcccatctgcatttcagaaaataaccctcatctttacaaaacacaggacacttgtgggacagttaactcaagcagctatggggagggaggagattattgaatggtgattaaataatgcaaatggctcttctgtttcttaaagactgtggaagaggtcagactgcccagttgaggtgggcagttcatactgctcagttgaggtggcagtcatttattctgagtcctgttggatagagcctatctcctcaaggctacagaggcttccaggatatggagctgtgcatgttaatggctcagccttgcctccatcagggcacctgcctaacttggagcaagtgggagagcaccctagagtcatcctctgtgctgtttcgtgagttttgcagcggagacttcaccatccggaggagctgtgtttctgtgtcacttgggatatcacctaagactgtggcacatttttttgttgggtgtacctgtatgagtgtgaaacacaa

SEQ ID NO: 313696 - DNA, 1694 bp, Homo sapiens
ctggaacccggaagcggcagcgcggcgcgacccggcgggcgggctctgggcgcgggaatcccggcggatcccgggcgggcggatgacccccagccctacccttggtgccgcctcctcctctctcctttctcctccggcagccagcgcgcctgtgtcctctctaggaaggggtaggggaggggcgtctggagaggaccccccgcgaatgcccacgtgacgtgcagtccccctggggctgttccggcctgcggggaacatgggcgtgctcagggtcggactgtgccctggccttaccgaggagatgatccagcttctcaggagccacaggatcaagacagtggtggacctggtttctgcagacctggaagaggtagctcagaaatgtggcttgtcttacaagtcttgataaactgcttgatgctggtctctatactggagaagtgactgaaattgtaggaggcccaggtagcggcaaaactcaggtatgtctctgtatggcagcaaatgtggcccatggcctgcagcaaaacgtcctatatgtagattccaatggagggctgacagcttcccgcctcctccagctgcttcaggctaaaacccaggatgaggaggaacaggcagaagctctccggaggatccaggtggtgcatgcatttgacatcttccagatgctggatgtgctgcaggagctccgaggcactgtggcccagcaggtgactggttcttcaggaactgtgaaggtggtggttgtggactcggtcactgcggtggtttccccacttctgggaggtcagcagagggaaggcttggccttgatgatgcagctggcccgagagctgaagaccctggcccgggaccttggcatggcagtggtggtgaccaaccacataactcgagacagggacagcgggaggctcaaacctgccctcggacgctcctggagctttgtgcccagcactcggattctcctggacaccatcgagggagcaggagcatcaggcggccggcgcatggcgtgtctggccaaatcttcccgacagccaacaggtttccaggagatggtagacattgggacctgggggacctcagagcagagtgccacattacagggtgatcagacatgacctgtgctgttgtttgggaaacagggaagcattggggacccctcccaacttttcttcccagtaacgcctgctgtttactgccacctggcactggtgactacagacgttctcaggctggccagaagagacatcttgggttccttggcctcactctctgtaagcatataaaccacaggcgaaagaggatgctgcattgcgaggacccagaaattcatactggtgccacgtttccttcccttatttctaacgtgtatgtttctggtggaaaccaagttcaccctggctgggagcatctctgatgaggcatgctggcgactggatggataatcctgtgcatcaccattgtgtcctgtgctccctcctagcgcagtggccaagccgggaaagcctctaacttgcctttgctgctgctgccttttttttcttttgtctctgcctttccatttgttagatgggggcccactcttccttagctctgtctctgagttactgggtggaaataagcttataaatgaaatactcttcttcatctctgttttgctcttaaaaatataaaaaggcaattccccg

SEQ ID NO: 313697 - DNA, 446 bp, Homo sapiens
  misc_feature (11)..(11): n is a, c, g, or t
tcgagctcggnccagttgacggagactctcataccaactttgtctattgaaatgtatttttgttgtttctctgcttgacaaagttggtatgagagagcaggcttttgtaatgatgctgtaagaggctccggatttctgggcatgatgggagtacattctggacattgtgtgagttgaaaagaggcccatgctatgcagatctctgggacatctctagatgtgatgttacttttctcttcccacaggccaatggccatgtgtctcaggatcaagaggaacccgtctacctggagagcgtggccagagtacctgctgaggatgagacccaggtggggcctctgcttgggtctgtgtcttcacctttcctctttcactggtgttcttcggaacctcttagcagagtcgagtggagagtctccgtcgaactggtaccgagctcgatcaac

SEQ ID NO: 313698 - DNA, 839 bp, Homo sapiens
ctgcttacttacaaatgcaacagttgtcctattttatgctcattgtgttgtcaccagcattttaaatctttacaagtcagggtgggtacctcaggcaggtttgctggaaaattccagtaaacagtttcaaaggagttcaagttgcttgccagactaacttacttttaaaagtaagcagccttccaagttaagagatgattttaaatttcaggtgagttctcaggacattgtgattttttaattatgctgttggtataaatcagctgtgtcagggcctgtcccaccaagagcgttgggtggtaagaaacccaagctttgggtgaccagagagaggagagagaccttgggctttccagccagtaatgcctatgaaacatgtaggtcattggcattttattttatttatttttttgagatggagtctcgctctgtggcccaggctggagtgcagtggtgtgatcttggctcactgcaacctctgcctcccgggttcaagcgatacttctcccttagcctcctgagtagctgggactacaggcatgtgccaccacaccactaatttttgtgtttttagtagagacggggtttcaccatgttgtctaggctggtcttgaactcctgacctcaactgatccgcctgccttggcctcccagagtgctgggattgtaggagtgagccaccatgcccagccatcattttagaattataatttttagctggatgcggtaaaaaaaatcctttctcagccttcaggtctcatctcaagtatcaccgacatgaggagtcctcccccatttacacacaccagctcggtgtgaagaaccgaaaggtcacacta

SEQ ID NO: 313699 - DNA, 686 bp, Homo sapiens
ggccagaccaagggccagtgtgactgtgaagcagcatcatgagaggggtaaaaccaaggaacagactgcatgagcccttgggccccttccagctctaatactccatggtgatggcagccctgcccttctctgaagatctcaaaatgcctgacacctgtgtccttccgcactgccctgggaaggagaataaggatgtcttgataaactgcttgatgctggtctctatactggagaagtgactgaaattgtaggaggcccaggtagcggcaaaactcaggcagaagctctccggaggatccaggtggtgcatgcatttgacatcttccagatgctggatgtgctgcaggagctccgaggcactgtggcccagcaggtgagcctgctgttctgcccctccttgcttaattcagctttctaggtgctatctctgtgggcaggtgtcctactacagactgtttggaaatgcagatgtgcaatctggtgactccaactatgcttgctactcccaggatggaattcccgagcacctaaatcacatacctcattgtttacatgttcatcttccctgctgaacagtaaagccccctgagtggaaggatcatgtcatatttatgtctgcattccccactagtttctaggggttaagaatctgagactaggagcggtggctcacgcctaaaatccca

SEQ ID NO: 313700 - DNA, 330 bp, Homo sapiens
aactaaagaagctacccacttgggttgcttaactccactgactccttacttcttcttccagccaacaggtttccaggagatggtagacattgggacctgggggacctcagagcagagtgccacattacagggtgatcagacatgacctgtgctgttgtttgggaaacagggaagcattggggacccctcccaacttttcttcccagtaacgcctgctgtttactgccacctggcactggtgactacagacgttctcaggctggccagaagagacatcttgggttccttggcctcactctctgtaagcatataaaccacaggcgaaagagg

SEQ ID NO: 313701 - DNA, 2293 bp, Homo sapiens
cggtgtgtgtgttgcggcagaagccagcgcgcctgtgtcctctctaggaaggggtaggggaggggcgtctggagaggaccccccgcgaatgcccacgtgacgtgcagtccccctggggctgttccggcctgcggggaacatgggcgtgctcagggtcggactgtgccctggccttaccgaggagatgatccagcttctcaggagccacaggatcaagacagtggtggacctggtttctgcagacctggaagaggtagctcagaaatgtggcttgtcttacaaggccctggttgccctgaggcgggtgctgctggctcagttctcggctttccccgtgaatggcgctgatctctacgaggaactgaagacctccactgccatcctgtccactggcattggcagtcttgataaactgcttgatgctggtctctatactggagaagtgactgaaattgtaggaggcccaggtagcggcaaaactcaggtatgtctctgtatggcagcaaatgtggcccatggcctgcagcaaaacgtcctatatgtagattccaatggagggctgacagcttcccgcctcctccagctgcttcaggctaaaacccaggatgaggaggaacaggcagaagctctccggaggatccaggtggtgcatgcatttgacatcttccagatgctggatgtgctgcaggagctccgaggcactgtggcccagcaggtgactggttcttcaggaactgtgaaggtggtggttgtggactcggtcactgcggtggtttccccacttctgggaggtcagcagagggaaggcttggccttgatgatgcagctggcccgagagctgaagaccctggcccgggaccttggcatggcagtggtggtgaccaaccacataactcgagacagggacagcgggaggctcaaacctgccctcggacgctcctggagctttgtgcccagcactcggattctcctggacaccatcgagggagcaggagcatcaggcggccggcgcatggcgtgtctggccaaatcttcccgacagccaacaggtttccaggagatggtagacattgggacctgggggacctcagagcagagtgccacattacagggtgatcagacatgacctgtgctgttgtttgggaaacagggaagcattggggacccctcccaacttttcttcccagtaacgcctgctgtttactgccacctggcactggtgactacagacgttctcaggctggccagaagagacatcttgggttccttggcctcactctctgtaagcatataaaccacaggcgaaagaggatgctgcattgcgaggacccagaaattcatactggtgccacgtttccttcccttatttctaacgtgtatgtttctggtggaaaccaagttcaccctggctgggagcatctctgatgaggcatgctggcgactggatggataatcctgtgcatcaccattgtgtcctgtgctccctcctagcgcagtggccaagccgggaaagcctctaacttgcctttgctgctgctgccttttttttcttttgtctctgcctttccatttgttagatgggggcccactcttccttagctctgtctctgagttactgggtggaaataagcttataaatgaaatactcttcttcatctctgttttgctcttaaaaatataaaaaggcaattccccgagccctagagccacctgatttccccttagaaggctgtttttcagtttcccccagtgaggcccaaagaacagtttattcctcctttcctcttgctgatttggtttcagacctgcctgcatcaccatgactaggtgagaacgtgtgggctcgctgcagttccagggatataatttaacagaaagggagggtatgacctgctcctggtgaatccagccactcatttaatatgcatggtgccctgtggggcccctccacagtacagcataaccagaggtgctgaaccatggccttgcccataaacagacagaggagaatttgcacagtaaatagagccagctgggaaaattgatgctgacgtaaataatacatggcaaatctagtcctttatgcagaaattcattgctggtggctccaagatgcaatataattacacctctcttcctgccagctgtaccacagctagtgccctagtgtatgaaataatccctctgtctttcaccagcactgtggccatccgtctgagagccatgaccctggctgggaggggacgaagacaccagggaatggaaaataaaaggaaaagtacagaaatgatca

SEQ ID NO: 313702 - DNA, 2589 bp, Homo sapiens
ctggaacccggaagcggcagcgcggcgcgacccggcgggcgggctctgggcgcgggaatcccggcggatcccgggcgggcggatgacccccagccctacccttggtgccgcctcctcctctctcctttctcctccggcagccagcgcgcctgtgtcctctctaggaaggggtaggggaggggcgtctggagaggaccccccgcgaatgcccacgtgacgtgcagtccccctggggctgttccggcctgcggggaacatgggcgtgctcagggtcggactgtgccctggccttaccgaggagatgatccagcttctcaggagccacaggatcaagacagtggtggacctggtttctgcagacctggaagaggtagctcagaaatgtggcttgtcttacaaggccctggttgccctgaggcgggtgctgctggctcagttctcggctttccccgtgaatggcgctgatctctacgaggaactgaagacctccactgccatcctgtccactggcattggcagacatggagggcgcactcaagtgggaacctgggaggactgcagctgcctcaggtccccgcagggagatcgtggagtggggtcaggaatgctctgaagaaggcaggacttgggcatggaggaacagatggactttcgctgaatgctttcgatgaacgaggcactgcggtcagcacttcacgtcttgataaactgcttgatgctggtctctatactggagaagtgactgaaattgtaggaggcccaggtagcggcaaaactcaggtatgtctctgtatggcagcaaatgtggcccatggcctgcagcaaaacgtcctatatgtagattccaatggagggctgacagcttcccgcctcctccagctgcttcaggctaaaacccaggatgaggaggaacaggcagaagctctccggaggatccaggtggtgcatgcatttgacatcttccagatgctggatgtgctgcaggagctccgaggcactgtggcccagcaggtgactggttcttcaggaactgtgaaggtggtggttgtggactcggtcactgcggtggtttccccacttctgggaggtcagcagagggaaggcttggccttgatgatgcagctggcccgagagctgaagaccctggcccgggaccttggcatggcagtggtggtgaccaaccacataactcgagacagggacagcgggaggctcaaacctgccctcggacgctcctggagctttgtgcccagcactcggattctcctggacaccatcgagggagcaggagcatcaggcggccggcgcatggcgtgtctggccaaatcttcccgacagccaacaggtttccaggagatggtagacattgggacctgggggacctcagagcagagtgccacattacagggtgatcagacatgacctgtgctgttgtttgggaaacagggaagcattggggacccctcccaacttttcttcccagtaacgcctgctgtttactgccacctggcactggtgactacagacgttctcaggctggccagaagagacatcttgggttccttggcctcactctctgtaagcatataaaccacaggcgaaagaggatgctgcattgcgaggacccagaaattcatactggtgccacgtttccttcccttatttctaacgtgtatgtttctggtggaaaccaagttcaccctggctgggagcatctctgatgaggcatgctggcgactggatggataatcctgtgcatcaccattgtgtcctgtgctccctcctagcgcagtggccaagccgggaaagcctctaacttgcctttgctgctgctgccttttttttcttttgtctctgcctttccatttgttagatgggggcccactcttccttagctctgtctctgagttactgggtggaaataagcttataaatgaaatactcttcttcatctctgttttgctcttaaaaatataaaaaggcaattccccgagccctagagccacctgatttccccttagaaggctgtttttcagtttcccccagtgaggcccaaagaacagtttattcctcctttcctcttgctgatttggtttcagacctgcctgcatcaccatgactaggtgagaacgtgtgggctcgctgcagttccagggatataatttaacagaaagggagggtatgacctgctcctggtgaatccagccactcatttaatatgcatggtgccctgtggggcccctccacagtacagcataaccagaggtgctgaaccatggccttgcccataaacagacagaggagaatttgcacagtaaatagagccagctgggaaaattgatgctgacgtaaataatacatggcaaatctagtcctttatgcagaaattcattgctggtggctccaagatgcaatataattacacctctcttcctgccagctgtaccacagctagtgccctagtgtatgaaataatccctctgtctttcaccagcactgtggccatccgtctgagagccatgaccctggctgggaggggacgaagacaccagggaatggaaaataaaaggaaaagtacagaaatgatca

SEQ ID NO: 313703 - DNA, 1655 bp, Homo sapiens
cggtgtgtgtgttgcggcagaagccagcgcgcctgtgtcctctctaggaaggggtaggggaggggcgtctggagaggaccccccgcgaatgcccacgtgacgtgcagtccccctggggctgttccggcctgcggggaacatgggcgtgctcagggtcggactgtgccctggccttaccgaggagatgatccagcttctcaggagccacaggatcaagacagtggtggacctggtttctgcagacctggaagaggtagctcagaaatgtggcttgtcttacaaggccctggttgccctgaggcgggtgctgctggctcagttctcggctttccccgtgaatggcgctgatctctacgaggaactgaagacctccactgccatcctgtccactggcattggcagtcttgataaactgcttgatgctggtctctatactggagaagtgactgaaattgtaggaggcccaggtagcggcaaaactcaggtatgtctctgtatggcagcaaatgtggcccatggcctgcagcaaaacgtcctatatgtagattccaatggagggctgacagcttcccgcctcctccagctgcttcaggctaaaacccaggatgaggaggaacaggcagaagctctccggaggatccaggtggtgcatgcatttgacatcttccagatgctggatgtgctgcaggagctccgaggcactgtggcccagcaggtgactggttcttcaggaactgtgaaggtggtggttgtggactcggtcactgcggtggtttccccacttctgggaggtcagcagagggaaggcttggccttgatgatgcagctggcccgagagctgaagaccctggcccgggaccttggcatggcagtggtggtgaccaaccacataactcgagacagggacagcgggaggctcaaacctgccctcggacgctcctggagctttgtgcccagcactcggattctcctggacaccatcgagggagcaggagcatcaggcggccggcgcatggcgtgtctggccaaatcttcccgacagccaacaggtttccaggagatggtagacattgggacctgggggacctcagagcagagtgccacattacagggtgatcagacatgacctgtgctgttgtttgggaaacagggaagcattggggacccctcccaacttttcttcccagtaacgcctgctgtttactgccacctggcactggtgactacagacgttctcaggctggccagaagagacatcttgggttccttggcctcactctctgtaagcatataaaccacaggcgaaagaggatgctgcattgcgaggacccagaaattcatactggtgccacgtttccttcccttatttctaacgtgtatgtttctggtggaaaccaagttcaccctggctgggagcatctctgatgaggcatgctggcgactggatggataatcctgtgcatcaccattgtgtcctgtgctccctcctagcgcagtggccaagccgggaaagcctctaacttgcctttgctgctgctgccttttttttcttttgtctctgcctttccatttgttagatgggggcccactcttccttagctctgtctctgagttactgggtggaaataagcttataaatgaaatactcttcttca

SEQ ID NO: 313704 - DNA, 2431 bp, Homo sapiens
cggtgtgtgtgttgcggcagaagccagcgcgcctgtgtcctctctaggaaggggtaggggaggggcgtctggagaggaccccccgcgaatgcccacgtgacgtgcagtccccctggggctgttccggcctgcggggcgaggagatgatccagcttctcaggagccacaggatcaagacagtggtggacctggtttctgcagacctggaagaggtagctcagaaatgtggcttgtcttacaaggccctggttgccctgaggcgggtgctgctggctcagttctcggctttccccgtgaatggcgctgatctctacgaggaactgaagacctccactgccatcctgtccactggcattggcagacatggagggcgcactcaagtgggaacctgggaggactgcagctgcctcaggtccccgcagggagatcgtggagtggggtcaggaatgctctgaagaaggcaggacttgggcatggaggaacagatggactttcgctgaatgctttcgatgaacgaggcactgcggtcagcacttcacgtcttgataaactgcttgatgctggtctctatactggagaagtgactgaaattgtaggaggcccaggtagcggcaaaactcaggtatgtctctgtatggcagcaaatgtggcccatggcctgcagcaaaacgtcctatatgtagattccaatggagggctgacagcttcccgcctcctccagctgcttcaggctaaaacccaggatgaggaggaacaggcagaagctctccggaggatccaggtggtgcatgcatttgacatcttccagatgctggatgtgctgcaggagctccgaggcactgtggcccagcaggtgactggttcttcaggaactgtgaaggtggtggttgtggactcggtcactgcggtggtttccccacttctgggaggtcagcagagggaaggcttggccttgatgatgcagctggcccgagagctgaagaccctggcccgggaccttggcatggcagtggtggtgaccaaccacataactcgagacagggacagcgggaggctcaaacctgccctcggacgctcctggagctttgtgcccagcactcggattctcctggacaccatcgagggagcaggagcatcaggcggccggcgcatggcgtgtctggccaaatcttcccgacagccaacaggtttccaggagatggtagacattgggacctgggggacctcagagcagagtgccacattacagggtgatcagacatgacctgtgctgttgtttgggaaacagggaagcattggggacccctcccaacttttcttcccagtaacgcctgctgtttactgccacctggcactggtgactacagacgttctcaggctggccagaagagacatcttgggttccttggcctcactctctgtaagcatataaaccacaggcgaaagaggatgctgcattgcgaggacccagaaattcatactggtgccacgtttccttcccttatttctaacgtgtatgtttctggtggaaaccaagttcaccctggctgggagcatctctgatgaggcatgctggcgactggatggataatcctgtgcatcaccattgtgtcctgtgctccctcctagcgcagtggccaagccgggaaagcctctaacttgcctttgctgctgctgccttttttttcttttgtctctgcctttccatttgttagatgggggcccactcttccttagctctgtctctgagttactgggtggaaataagcttataaatgaaatactcttcttcatctctgttttgctcttaaaaatataaaaaggcaattccccgagccctagagccacctgatttccccttagaaggctgtttttcagtttcccccagtgaggcccaaagaacagtttattcctcctttcctcttgctgatttggtttcagacctgcctgcatcaccatgactaggtgagaacgtgtgggctcgctgcagttccagggatataatttaacagaaagggagggtatgacctgctcctggtgaatccagccactcatttaatatgcatggtgccctgtggggcccctccacagtacagcataaccagaggtgctgaaccatggccttgcccataaacagacagaggagaatttgcacagtaaatagagccagctgggaaaattgatgctgacgtaaataatacatggcaaatctagtcctttatgcagaaattcattgctggtggctccaagatgcaatataattacacctctcttcctgccagctgtaccacagctagtgccctagtgtatgaaataatccctctgtctttcaccagcactgtggccatccgtctgagagccatgaccctggctgggaggggacgaagacaccagggaatggaaaataaaaggaaaagtacagaaatgatca

SEQ ID NO: 313705 - DNA, 2719 bp, Homo sapiens
ctggaacccggaagcggcagcgcggcgcgacccggcgggcgggctctgggcgcgggaatcccggcggatcccgggcgggcggatgacccccagccctacccttggtgccgcctcctcctctctcctttctcctccggcagccagcgcgcctgtgtcctctctaggaaggggtaggggaggggcgtctggagaggaccccccgcgaatgcccacgtgacgtgcagtccccctggggctgttccggcctgcggggaacatgggcgtgctcagggtcggactgtgccctggccttaccgaggagatgatccagcttctcaggagccacaggatcaagacagtggtggacctggtttctgcagacctggaagaggtagctcagaaatgtggcttgtcttacaaggccctggttgccctgaggcgggtgctgctggctcagttctcggctttccccgtgaatggcgctgatctctacgaggaactgaagacctccactgccatcctgtccactggcattggcagtcttgataaactgcttgatgctggtctctatactggagaagtgactgaaattgtaggaggcccaggtagcggcaaaactcaggcagaagctctccggaggatccaggtggtgcatgcatttgacatcttccagatgctggatgtgctgcaggagctccgaggcactgtggcccagcaggtgagcctgctgttctgcccctccttgcttaattcagctttctaggtgctatctctgtgggcaggtgtcctactacagactgtttggaaatgcagatgtgcaatctggtgactccaactatgcttgctactcccaggatggaattcccgagcacctaaatcacatacctcattgtttacatgttcatcttccctgctgaacagtaaagccccctgagtggaaggatcatgtcatatttatgtctgcattccccactaggtgactggttcttcaggaactgtgaaggtggtggttgtggactcggtcactgcggtggtttccccacttctgggaggtcagcagagggaaggcttggccttgatgatgcagctggcccgagagctgaagaccctggcccgggaccttggcatggcagtggtggtgaccaaccacataactcgagacagggacagcgggaggctcaaacctgccctcggacgctcctggagctttgtgcccagcactcggattctcctggacaccatcgagggagcaggagcatcaggcggccggcgcatggcgtgtctggccaaatcttcccgacagattttatcatgtgggcaacctgctgcaactggttctgcctggatggacagcctgaggaggtcccaccaccccagggagccaggatgcaggcctattccaaccctgggtacagctccttcccttccccaacaggcttggaaccaagctgcaagtcctgtggggctcactttgcaaacacggccaggaagcagacctgcttggactgtaagaaaaatttttgcatgacctgttcgagccaagtagggaatgggccccgcctctgccttctctgccaacggtttcgagctacagcctttcagcgagaggagctcatgaagatgaaggtgaaggacttgagggactatctcagcctccatgacatctctaccgaaatgtgccgggagaaagaagagctggtgctcttggtccttggccagcagcctgtaatctcccaggaggacaggactcgtgcctccaccttgtccccagactttcctgagcagcaggccttcctgacccagcctcactccagcatggttccacctacctcacccaacctcccctcttcatctgcacaagccacctctgttcccccagcccaggttcaggagaatcagcagggccaatggccatgtgtctcaggatcaagaggaacccgtctacctggagagcgtggccagagtacctgctgaggatgagacccagtctattgactcagaggacagctttgtcccaggccgaagggcctctctgtctgacctgactgacctggaggacattgaaggcctgacagtgcggcagctgaaagagatcttggctcgcaactttgtcaactacaagggctgctgtgagaagtgggagctgatggagagagtgacccggctatacaaggatcagaaaggactccagcacctggtcagtggtgccgaagaccaaaacgggggagcagtaccatcaggcttggaggagaacctgtgtaagatctgcatggactcacccattgactgtgttcttctggagtgtggccacatggtaacctgtaccaagtgtggcaagcgcatgaatgaatgtcccatctgccggcagtatgtaatccgagctgtgcatgtcttccggtcctgagagcttgcatcggtttcttcagtgccttacagggaaatagcctggggtgtctgggctcagggttggccagcttgcagaggagcaagctagtagaaatattgcagggttcccaaaaccaggtcaagcaagatgccatgtcacccctgagcatgcctgtcttcccaggggtgtacctcttggctggcaaagcccaaggccagtgggaacttgtataaatcacatgggtatgttcttggttcagtgatcttggagtgatgatggtaactgatgaacagagaactttccagaacttgggtcctgtcttcctccctgaacctagacagtttcacccctcct

SEQ ID NO: 313706 - DNA, 2073 bp, Homo sapiens
ctggaacccggaagcggcagcgcggcgcgacccggcgggcgggctctgggcgcgggaatcccggcggatcccgggcgggcggatgacccccagccctacccttggtgccgcctcctcctctctcctttctcctccggcagccagcgcgcctgtgtcctctctaggaaggggtaggggaggggcgtctggagaggaccccccgcgaatgcccacgtgacgtgcagtccccctggggctgttccggcctgcggggaacatgggcgtgctcagggtcggactgtgccctggccttaccgaggagatgatccagcttctcaggagccacaggatcaagacagtggtggacctggtttctgcagacctggaagaggtagctcagaaatgtggcttgtcttacaaggccctggttgccctgaggcgggtgctgctggctcagttctcggctttccccgtgaatggcgctgatctctacgaggaactgaagacctccactgccatcctgtccactggcattggcagacatggagggcgcactcaagtgggaacctgggaggactgcagctgcctcaggtccccgcagggagatcgtggagtggggtcaggaatgctctgaagaaggcaggacttgggcatggaggaacagatggactttcgctgaatgctttcgatgaacgaggcactgcggtcagcacttcacgtcttgataaactgcttgatgctggtctctatactggagaagtgactgaaattgtaggaggcccaggtagcggcaaaactcaggtatgtctctgtatggcagcaaatgtggcccatggcctgcagcaaaacgtcctatatgtagattccaatggagggctgacagcttcccgcctcctccagctgcttcaggctaaaacccaggatgaggaggaacaggcagaagctctccggaggatccaggtggtgcatgcatttgacatcttccagatgctggatgtgctgcaggagctccgaggcactgtggcccagcaggatggaattcccgagcacctaaatcacatacctcattgtttacatgttcatcttccctgctgaacagtaaagccccctgagtggaaggatcatgtcatatttatgtctgcattccccactaggtgactggttcttcaggaactgtgaaggtggtggttgtggactcggtcactgcggtggtttccccacttctgggaggtcagcagagggaaggcttggccttgatgatgcagctggcccgagagctgaagaccctggcccgggaccttggcatggcagtggtggtgaccaaccacataactcgagacagggacagcgggaggctcaaacctgccctcggacgctcctggagctttgtgcccagcactcggattctcctggacaccatcgagggagcaggagcatcaggcggccggcgcatggcgtgtctggccaaatcttcccgacagccaacaggtttccaggagatggtagacattgggacctgggggacctcagagcagagtgccacattacagggtgatcagacatgacctgtgctgttgtttgggaaacagggaagcattggggacccctcccaacttttcttcccagtaacgcctgctgtttactgccacctggcactggtgactacagacgttctcaggctggccagaagagacatcttgggttccttggcctcactctctgtaagcatataaaccacaggcgaaagaggatgctgcattgcgaggacccagaaattcatactggtgccacgtttccttcccttatttctaacgtgtatgtttctggtggaaaccaagttcaccctggctgggagcatctctgatgaggcatgctggcgactggatggataatcctgtgcatcaccattgtgtcctgtgctccctcctagcgcagtggccaagccgggaaagcctctaacttgcctttgctgctgctgccttttttttcttttgtctctgcctttccatttgttagatgggggcccactcttccttagctctgtctctgagttactgggtggaaataagcttataaatgaaatactcttcttca

SEQ ID NO: 313707 - DNA, 1717 bp, Homo sapiens
cctaggttgcagttgactgcggttggttcaggctgagttgtttgggaagtacaaattttgcccagcgtgagtcagcactgccctgggtaaactccctgctgtgttgcaatcttgcttaccaaagatacatccccaggcggcaccattcacttcacatgaaagccgctgctcttggttcctgagatgatctcatctgaacatggctccagcgacctcagccacaggaactagagacagcttgctttctgtcgtggcaatgttttgaaactggcaaaatcagattttatcatgtgggcaacctgctgcaactggttctgcctggatggacagcctgaggaggtcccaccaccccagggagccaggatgcaggcctattccaaccctgggtacagctccttcccttccccaacaggcttggaaccaagctgcaagtcctgtggggctcactttgcaaacacggccaggaagcagacctgcttggactgtaagaaaaatttttgcatgacctgttcgagccaagtagggaatgggccccgcctctgccttctctgccaacggtttcgagctacagcctttcagcgagaggagctcatgaagatgaaggtgaaggacttgagggactatctcagcctccatgacatctctaccgaaatgtgccgggagaaagaagagctggtgctcttggtccttggccagcagcctgtaatctcccaggaggacaggactcgtgcctccaccttgtccccagactttcctgagcagcaggccttcctgacccagcctcactccagcatggttccacctacctcacccaacctcccctcttcatctgcacaagccacctctgttcccccagcccaggttcaggagaatcagcagggccaatggccatgtgtctcaggatcaagaggaacccgtctacctggagagcgtggccagagtacctgctgaggatgagacccagtctattgactcagaggacagctttgtcccaggccgaagggcctctctgtctgacctgactgacctggaggacattgaaggcctgacagtgcggcagctgaaagagatcttggctcgcaactttgtcaactacaagggctgctgtgagaagtgggagctgatggagagagtgacccggctatacaaggatcagaaaggactccagcacctggtcagtggtgccgaagaccaaaacgggggagcagtaccatcaggcttggaggagaacctgtgtaagatctgcatggactcacccattgactgtgttcttctggagtgtggccacatggtaacctgtaccaagtgtggcaagcgcatgaatgaatgtcccatctgccggcagtatgtaatccgagctgtgcatgtcttccggtcctgagagcttgcatcggtttcttcagtgccttacagggaaatagcctggggtgtctgggctcagggttggccagcttgcagaggagcaagctagtagaaatattgcagggttcccaaaaccaggtcaagcaagatgccatgtcacccctgagcatgcctgtcttcccaggggtgtacctcttggctggcaaagcccaaggccagtgggaacttgtataaatcacatgggtatgttcttggttcagtgatcttggagtgatgatggtaactgatgaacagagaactttccagaacttgggtcctgtcttcctccctgaacctagacagtttcacccctcct

SEQ ID NO: 313708 - DNA, 2328 bp, Homo sapiens
ctggaacccggaagcggcagcgcggcgcgacccggcgggcgggctctgggcgcgggaatcccggcggatcccgggcgggcggatgacccccagccctacccttggtgccgcctcctcctctctcctttctcctccggcagccagcgcgcctgtgtcctctctaggaaggggtaggggaggggcgtctggagaggaccccccgcgaatgcccacgtgacgtgcagtccccctggggctgttccggcctgcggggaacatgggcgtgctcagggtcggactgtgccctggccttaccgaggagatgatccagcttctcaggagccacaggatcaagacagtggtggacctggtttctgcagacctggaagaggtagctcagaaatgtggcttgtcttacaaggccctggttgccctgaggcgggtgctgctggctcagttctcggctttccccgtgaatggcgctgatctctacgaggaactgaagacctccactgccatcctgtccactggcattggcaggtatgtctctgtatggcagcaaatgtggcccatggcctgcagcaaaacgtcctatatgtagattccaatggagggctgacagcttcccgcctcctccagctgcttcaggctaaaacccaggatgaggaggaacaggcagaagctctccggaggatccaggtggtgcatgcatttgacatcttccagatgctggatgtgctgcaggagctccgaggcactgtggcccagcaggtgactggttcttcaggaactgtgaaggtggtggttgtggactcggtcactgcggtggtttccccacttctgggaggtcagcagagggaaggcttggccttgatgatgcagctggcccgagagctgaagaccctggcccgggaccttggcatggcagtggtggtgaccaaccacataactcgagacagggacagcgggaggctcaaacctgccctcggacgctcctggagctttgtgcccagcactcggattctcctggacaccatcgagggagcaggagcatcaggcggccggcgcatggcgtgtctggccaaatcttcccgacagccaacaggtttccaggagatggtagacattgggacctgggggacctcagagcagagtgccacattacagggtgatcagacatgacctgtgctgttgtttgggaaacagggaagcattggggacccctcccaacttttcttcccagtaacgcctgctgtttactgccacctggcactggtgactacagacgttctcaggctggccagaagagacatcttgggttccttggcctcactctctgtaagcatataaaccacaggcgaaagaggatgctgcattgcgaggacccagaaattcatactggtgccacgtttccttcccttatttctaacgtgtatgtttctggtggaaaccaagttcaccctggctgggagcatctctgatgaggcatgctggcgactggatggataatcctgtgcatcaccattgtgtcctgtgctccctcctagcgcagtggccaagccgggaaagcctctaacttgcctttgctgctgctgccttttttttcttttgtctctgcctttccatttgttagatgggggcccactcttccttagctctgtctctgagttactgggtggaaataagcttataaatgaaatactcttcttcatctctgttttgctcttaaaaatataaaaaggcaattccccgagccctagagccacctgatttccccttagaaggctgtttttcagtttcccccagtgaggcccaaagaacagtttattcctcctttcctcttgctgatttggtttcagacctgcctgcatcaccatgactaggtgagaacgtgtgggctcgctgcagttccagggatataatttaacagaaagggagggtatgacctgctcctggtgaatccagccactcatttaatatgcatggtgccctgtggggcccctccacagtacagcataaccagaggtgctgaaccatggccttgcccataaacagacagaggagaatttgcacagtaaatagagccagctgggaaaattgatgctgacgtaaataatacatggcaaatctagtcctttatgcagaaattcattgctggtggctccaagatgcaatataattacacctctcttcctgccagctgtaccacagctagtgccctagtgtatgaaataatccctctgtctttcaccagcactgtggccatccgtctgagagccatgaccctggctgggaggggacgaagacaccagggaatggaaaataaaaggaaaagtacagaaatgatca

SEQ ID NO: 313709 - DNA, 1829 bp, Homo sapiens
ctgcttacttacaaatgcaacagttgtcctattttatgctcattgtgttgtcaccagcattttaaatctttacaagtcagggtgggtacctcaggcaggtttgctggaaaattccagtaaacagtttcaaaggagttcaagttgcttgccagactaacttacttttaaaagtaagcagccttccaagttaagagatgattttaaatttcagggaaagtggaagaggagaccctagcaggcttcaagcaagctctgtaggacagcagttagacactgtttttgaggactaaattgccaagtctgtcttttaagaagagggtgaggggagtttgggaaggaatgttcaagccctgagtgaagatccaataattttctttcaagatcagaaggagattttatcatgtgggcaacctgctgcaactggttctgcctggatggacagcctgaggaggtcccaccaccccagggagccaggatgcaggcctattccaaccctgggtacagctccttcccttccccaacaggcttggaaccaagctgcaagtcctgtggggctcactttgcaaacacggccaggaagcagacctgcttggactgtaagaaaaatttttgcatgacctgttcgagccaagtagggaatgggccccgcctctgccttctctgccaacggtttcgagctacagcctttcagcgagaggagctcatgaagatgaaggtgaaggacttgagggactatctcagcctccatgacatctctaccgaaatgtgccgggagaaagaagagctggtgctcttggtccttggccagcagcctgtaatctcccaggaggacaggactcgtgcctccaccttgtccccagactttcctgagcagcaggccttcctgacccagcctcactccagcatggttccacctacctcacccaacctcccctcttcatctgcacaagccacctctgttcccccagcccaggttcaggagaatcagcagggccaatggccatgtgtctcaggatcaagaggaacccgtctacctggagagcgtggccagagtacctgctgaggatgagacccagtctattgactcagaggacagctttgtcccaggccgaagggcctctctgtctgacctgactgacctggaggacattgaaggcctgacagtgcggcagctgaaagagatcttggctcgcaactttgtcaactacaagggctgctgtgagaagtgggagctgatggagagagtgacccggctatacaaggatcagaaaggactccagcacctggtcagtggtgccgaagaccaaaacgggggagcagtaccatcaggcttggaggagaacctgtgtaagatctgcatggactcacccattgactgtgttcttctggagtgtggccacatggtaacctgtaccaagtgtggcaagcgcatgaatgaatgtcccatctgccggcagtatgtaatccgagctgtgcatgtcttccggtcctgagagcttgcatcggtttcttcagtgccttacagggaaatagcctggggtgtctgggctcagggttggccagcttgcagaggagcaagctagtagaaatattgcagggttcccaaaaccaggtcaagcaagatgccatgtcacccctgagcatgcctgtcttcccaggggtgtacctcttggctggcaaagcccaaggccagtgggaacttgtataaatcacatgggtatgttcttggttcagtgatcttggagtgatgatggtaactgatgaacagagaactttccagaacttgggtcctgtcttcctccctgaacctagacagtttcacccctcct

SEQ ID NO: 313710 - DNA, 1652 bp, Homo sapiens
ggccgggccgggccggctggggatgggtgggagggggggccgacttcctggggccgcccgtgaggatgtcgcgaccgcccccgggtgcccctcagccccagagacgccgccgcggcggagtccgcagcctccctgcctgaggcgtccgcggccgggatccggcccctcccctcgcctcctctcctaggtgccggccgggagggcggccgcagcagattttatcatgtgggcaacctgctgcaactggttctgcctggatggacagcctgaggaggtcccaccaccccagggagccaggatgcaggcctattccaaccctgggtacagctccttcccttccccaacaggcttggaaccaagctgcaagtcctgtggggctcactttgcaaacacggccaggaagcagacctgcttggactgtaagaaaaatttttgcatgacctgttcgagccaagtagggaatgggccccgcctctgccttctctgccaacggtttcgagctacagcctttcagcgagaggagctcatgaagatgaaggtgaaggacttgagggactatctcagcctccatgacatctctaccgaaatgtgccgggagaaagaagagctggtgctcttggtccttggccagcagcctgtaatctcccaggaggacaggactcgtgcctccaccttgtccccagactttcctgagcagcaggccttcctgacccagcctcactccagcatggttccacctacctcacccaacctcccctcttcatctgcacaagccacctctgttcccccagcccaggttcaggagaatcagcagggccaatggccatgtgtctcaggatcaagaggaacccgtctacctggagagcgtggccagagtacctgctgaggatgagacccagtctattgactcagaggacagctttgtcccaggccgaagggcctctctgtctgacctgactgacctggaggacattgaaggcctgacagtgcggcagctgaaagagatcttggctcgcaactttgtcaactacaagggctgctgtgagaagtgggagctgatggagagagtgacccggctatacaaggatcagaaaggactccagcacctggtcagtggtgccgaagaccaaaacgggggagcagtaccatcaggcttggaggagaacctgtgtaagatctgcatggactcacccattgactgtgttcttctggagtgtggccacatggtaacctgtaccaagtgtggcaagcgcatgaatgaatgtcccatctgccggcagtatgtaatccgagctgtgcatgtcttccggtcctgagagcttgcatcggtttcttcagtgccttacagggaaatagcctggggtgtctgggctcagggttggccagcttgcagaggagcaagctagtagaaatattgcagggttcccaaaaccaggtcaagcaagatgccatgtcacccctgagcatgcctgtcttcccaggggtgtacctcttggctggcaaagcccaaggccagtgggaacttgtataaatcacatgggtatgttcttggttcagtgatcttggagtgatgatggtaactgatgaacagagaactttccagaacttgggtcctgtcttcctccctgaacctagacagtttcacccctcct

SEQ ID NO: 313711 - DNA, 2017 bp, Homo sapiens
ggccgggccgggccggctggggatgggtgggagggggggccgacttcctggggccgcccgtgaggatgtcgcgaccgcccccgggtgcccctcagccccagagacgccgccgcggcggagtccgcagcctccctgcctgaggcgtccgcggccgggatccggcccctcccctcgcctcctctcctaggtgccggccgggagggcggccgcagcagaactttgggggaagtgagaactgtgagcacaataatcttcagagaatgcacagtcctttgggtatttgtctactcatcagctgcttagtcagatggagtgttttcctaagtactactgaagtacacagttcagtctttattttgaaatctctccttctgccttctctccctcttccattactttgattaccttgatgggacattcaagctgtgcagtcgtatccttttatttctatagcctgcagaaaccaggttgaagattaactgtaggtgaacaggtaatcttatctacttggctagaaatcacccttcaagatgaaacacgtgttgacaaaggccccctagacttggggacatgaacaaagattttatcatgtgggcaacctgctgcaactggttctgcctggatggacagcctgaggaggtcccaccaccccagggagccaggatgcaggcctattccaaccctgggtacagctccttcccttccccaacaggcttggaaccaagctgcaagtcctgtggggctcactttgcaaacacggccaggaagcagacctgcttggactgtaagaaaaatttttgcatgacctgttcgagccaagtagggaatgggccccgcctctgccttctctgccaacggtttcgagctacagcctttcagcgagaggagctcatgaagatgaaggtgaaggacttgagggactatctcagcctccatgacatctctaccgaaatgtgccgggagaaagaagagctggtgctcttggtccttggccagcagcctgtaatctcccaggaggacaggactcgtgcctccaccttgtccccagactttcctgagcagcaggccttcctgacccagcctcactccagcatggttccacctacctcacccaacctcccctcttcatctgcacaagccacctctgttcccccagcccaggttcaggagaatcagcagggccaatggccatgtgtctcaggatcaagaggaacccgtctacctggagagcgtggccagagtacctgctgaggatgagacccagtctattgactcagaggacagctttgtcccaggccgaagggcctctctgtctgacctgactgacctggaggacattgaaggcctgacagtgcggcagctgaaagagatcttggctcgcaactttgtcaactacaagggctgctgtgagaagtgggagctgatggagagagtgacccggctatacaaggatcagaaaggactccagcacctggtcagtggtgccgaagaccaaaacgggggagcagtaccatcaggcttggaggagaacctgtgtaagatctgcatggactcacccattgactgtgttcttctggagtgtggccacatggtaacctgtaccaagtgtggcaagcgcatgaatgaatgtcccatctgccggcagtatgtaatccgagctgtgcatgtcttccggtcctgagagcttgcatcggtttcttcagtgccttacagggaaatagcctggggtgtctgggctcagggttggccagcttgcagaggagcaagctagtagaaatattgcagggttcccaaaaccaggtcaagcaagatgccatgtcacccctgagcatgcctgtcttcccaggggtgtacctcttggctggcaaagcccaaggccagtgggaacttgtataaatcacatgggtatgttcttggttcagtgatcttggagtgatgatggtaactgatgaacagagaactttccagaacttgggtcctgtcttcctccctgaacctagacagtttcacccctcct

SEQ ID NO: 313712 - DNA, 3077 bp, Homo sapiens
ctggaacccggaagcggcagcgcggcgcgacccggcgggcgggctctgggcgcgggaatcccggcggatcccgggcgggcggatgacccccagccctacccttggtgccgcctcctcctctctcctttctcctccggcagccagcgcgcctgtgtcctctctaggaaggggtaggggaggggcgtctggagaggaccccccgcgaatgcccacgtgacgtgcagtccccctggggctgttccggcctgcggggaacatgggcgtgctcagggtcggactgtgccctggccttaccgaggagatgatccagcttctcaggagccacaggatcaagacagtggtggacctggtttctgcagacctggaagaggtagctcagaaatgtggcttgtcttacaaggccctggttgccctgaggcgggtgctgctggctcagttctcggctttccccgtgaatggcgctgatctctacgaggaactgaagacctccactgccatcctgtccactggcattggcagacatggagggcgcactcaagtgggaacctgggaggactgcagctgcctcaggtccccgcagggagatcgtggagtggggtcaggaatgctctgaagaaggcaggacttgggcatggaggaacagatggactttcgctgaatgctttcgatgaacgaggcactgcggtcagcacttcacgtcttgataaactgcttgatgctggtctctatactggagaagtgactgaaattgtaggaggcccaggtagcggcaaaactcaggtatgtctctgtatggcagcaaatgtggcccatggcctgcagcaaaacgtcctatatgtagattccaatggagggctgacagcttcccgcctcctccagctgcttcaggctaaaacccaggatgaggaggaacaggcagaagctctccggaggatccaggtggtgcatgcatttgacatcttccagatgctggatgtgctgcaggagctccgaggcactgtggcccagcaggtgagcctgctgttctgcccctccttgcttaattcagctttctaggtgctatctctgtgggcaggtgtcctactacagactgtttggaaatgcagatgtgcaatctggtgactccaactatgcttgctactcccaggatggaattcccgagcacctaaatcacatacctcattgtttacatgttcatcttccctgctgaacagtaaagccccctgagtggaaggatcatgtcatatttatgtctgcattccccactaggtgactggttcttcaggaactgtgaaggtggtggttgtggactcggtcactgcggtggtttccccacttctgggaggtcagcagagggaaggcttggccttgatgatgcagctggcccgagagctgaagaccctggcccgggaccttggcatggcagtggtggtgaccaaccacataactcgagacagggacagcgggaggctcaaacctgccctcggacgctcctggagctttgtgcccagcactcggattctcctggacaccatcgagggagcaggagcatcaggcggccggcgcatggcgtgtctggccaaatcttcccgacagattttatcatgtgggcaacctgctgcaactggttctgcctggatggacagcctgaggaggtcccaccaccccagggagccaggatgcaggcctattccaaccctgggtacagctccttcccttccccaacaggcttggaaccaagctgcaagtcctgtggggctcactttgcaaacacggccaggaagcagacctgcttggactgtaagaaaaatttttgcatgacctgttcgagccaagtagggaatgggccccgcctctgccttctctgccaacggtttcgagctacagcctttcagcgagaggagctcatgaagatgaaggtgaaggacttgagggactatctcagcctccatgacatctctaccgaaatgtgccgggagaaagaagagctggtgctcttggtccttggccagcagcctgtaatctcccaggaggacaggactcgtgcctccaccttgtccccagactttcctgagcagcaggccttcctgacccagcctcactccagcatggttccacctacctcacccaacctcccctcttcatctgcacaagccacctctgttcccccagcccaggttcaggagaatcagcagggccaatggccatgtgtctcaggatcaagaggaacccgtctacctggagagcgtggccagagtacctgctgaggatgagacccagtctattgactcagaggacagctttgtcccaggccgaagggcctctctgtctgacctgactgacctggaggacattgaaggcctgacagtgcggcagctgaaagagatcttggctcgcaactttgtcaactacaagggctgctgtgagaagtgggagctgatggagagagtgacccggctatacaaggatcagaaaggactccagcacctggtcagtggtgccgaagaccaaaacgggggagcagtaccatcaggcttggaggagaacctgtgtaagatctgcatggactcacccattgactgtgttcttctggagtgtggccacatggtaacctgtaccaagtgtggcaagcgcatgaatgaatgtcccatctgccggcagtatgtaatccgagctgtgcatgtcttccggtcctgagagcttgcatcggtttcttcagtgccttacagggaaatagcctggggtgtctgggctcagggttggccagcttgcagaggagcaagctagtagaaatattgcagggttcccaaaaccaggtcaagcaagatgccatgtcacccctgagcatgcctgtcttcccaggggtgtacctcttggctggcaaagcccaaggccagtgggaacttgtagtgttcttcaagagtggagacaatgctgtggaacaaagcaggctttcacaaaatgttttcaaacaaaccgtttgtctacagcactggacagcagtgaatgtatacacagggaaaataaaggggatgaggcccttttgtttctgaaacatttccccctccgggtaccga

SEQ ID NO: 313713 - DNA, 3053 bp, Homo sapiens
ctggaacccggaagcggcagcgcggcgcgacccggcgggcgggctctgggcgcgggaatcccggcggatcccgggcgggcggatgacccccagccctacccttggtgccgcctcctcctctctcctttctcctccggcagccagcgcgcctgtgtcctctctaggaaggggtaggggaggggcgtctggagaggaccccccgcgaatgcccacgtgacgtgcagtccccctggggctgttccggcctgcggggaacatgggcgtgctcagggtcggactgtgccctggccttaccgaggagatgatccagcttctcaggagccacaggatcaagacagtggtggacctggtttctgcagacctggaagaggtagctcagaaatgtggcttgtcttacaaggccctggttgccctgaggcgggtgctgctggctcagttctcggctttccccgtgaatggcgctgatctctacgaggaactgaagacctccactgccatcctgtccactggcattggcagacatggagggcgcactcaagtgggaacctgggaggactgcagctgcctcaggtccccgcagggagatcgtggagtggggtcaggaatgctctgaagaaggcaggacttgggcatggaggaacagatggactttcgctgaatgctttcgatgaacgaggcactgcggtcagcacttcacgtcttgataaactgcttgatgctggtctctatactggagaagtgactgaaattgtaggaggcccaggtagcggcaaaactcaggtatgtctctgtatggcagcaaatgtggcccatggcctgcagcaaaacgtcctatatgtagattccaatggagggctgacagcttcccgcctcctccagctgcttcaggctaaaacccaggatgaggaggaacaggcagaagctctccggaggatccaggtggtgcatgcatttgacatcttccagatgctggatgtgctgcaggagctccgaggcactgtggcccagcaggtgagcctgctgttctgcccctccttgcttaattcagctttctaggtgctatctctgtgggcaggtgtcctactacagactgtttggaaatgcagatgtgcaatctggtgactccaactatgcttgctactcccaggatggaattcccgagcacctaaatcacatacctcattgtttacatgttcatcttccctgctgaacagtaaagccccctgagtggaaggatcatgtcatatttatgtctgcattccccactaggtgactggttcttcaggaactgtgaaggtggtggttgtggactcggtcactgcggtggtttccccacttctgggaggtcagcagagggaaggcttggccttgatgatgcagctggcccgagagctgaagaccctggcccgggaccttggcatggcagtggtggtgaccaaccacataactcgagacagggacagcgggaggctcaaacctgccctcggacgctcctggagctttgtgcccagcactcggattctcctggacaccatcgagggagcaggagcatcaggcggccggcgcatggcgtgtctggccaaatcttcccgacagattttatcatgtgggcaacctgctgcaactggttctgcctggatggacagcctgaggaggtcccaccaccccagggagccaggatgcaggcctattccaaccctgggtacagctccttcccttccccaacaggcttggaaccaagctgcaagtcctgtggggctcactttgcaaacacggccaggaagcagacctgcttggactgtaagaaaaatttttgcatgacctgttcgagccaagtagggaatgggccccgcctctgccttctctgccaacggtttcgagctacagcctttcagcgagaggagctcatgaagatgaaggtgaaggacttgagggactatctcagcctccatgacatctctaccgaaatgtgccgggagaaagaagagctggtgctcttggtccttggccagcagcctgtaatctcccaggaggacaggactcgtgcctccaccttgtccccagactttcctgagcagcaggccttcctgacccagcctcactccagcatggttccacctacctcacccaacctcccctcttcatctgcacaagccacctctgttcccccagcccaggttcaggagaatcagcagggccaatggccatgtgtctcaggatcaagaggaacccgtctacctggagagcgtggccagagtacctgctgaggatgagacccagtctattgactcagaggacagctttgtcccaggccgaagggcctctctgtctgacctgactgacctggaggacattgaaggcctgacagtgcggcagctgaaagagatcttggctcgcaactttgtcaactacaagggctgctgtgagaagtgggagctgatggagagagtgacccggctatacaaggatcagaaaggactccagcacctggggggagcagtaccatcaggcttggaggagaacctgtgtaagatctgcatggactcacccattgactgtgttcttctggagtgtggccacatggtaacctgtaccaagtgtggcaagcgcatgaatgaatgtcccatctgccggcagtatgtaatccgagctgtgcatgtcttccggtcctgagagcttgcatcggtttcttcagtgccttacagggaaatagcctggggtgtctgggctcagggttggccagcttgcagaggagcaagctagtagaaatattgcagggttcccaaaaccaggtcaagcaagatgccatgtcacccctgagcatgcctgtcttcccaggggtgtacctcttggctggcaaagcccaaggccagtgggaacttgtagtgttcttcaagagtggagacaatgctgtggaacaaagcaggctttcacaaaatgttttcaaacaaaccgtttgtctacagcactggacagcagtgaatgtatacacagggaaaataaaggggatgaggcccttttgtttctgaaacatttccccctccgggtaccga

SEQ ID NO: 313714 - DNA, 1346 bp, Homo sapiens
ctggaacccggaagcggcagcgcggcgcgacccggcgggcgggctctgggcgcgggaatcccggcggatcccgggcgggcggatgacccccagccctacccttggtgccgcctcctcctctctcctttctcctccggcagccagcgcgcctgtgtcctctctaggaaggggtaggggaggggcgtctggagaggaccccccgcgaatgcccacgtgacgtgcagtccccctggggctgttccggcctgcggggaacatgggcgtgctcagggtcggactgtgccctggccttaccgaggagatgatccagcttctcaggagccacaggatcaagacagtggtggacctggtttctgcagacctggaagaggtagctcagaaatgtggcttgtcttacaaggccctggttgccctgaggcgggtgctgctggctcagttctcggctttccccgtgaatggcgctgatctctacgaggaactgaagacctccactgccatcctgtccactggcattggcaggtatgtctctgtatggcagcaaatgtggcccatggcctgcagcaaaacgtcctatatgtagattccaatggagggctgacagcttcccgcctcctccagctgcttcaggctaaaacccaggatgaggaggaacaggcagaagctctccggaggatccaggtggtgcatgcatttgacatcttccagatgctggatgtgctgcaggagctccgaggcactgtggcccagcaggtgactggttcttcaggaactgtgaaggtggtggttgtggactcggtcactgcggtggtttccccacttctgggaggtcagcagagggaaggcttggccttgatgatgcagctggcccgagagctgaagaccctggcccgggaccttggcatggcagtggtggtgaccaaccacataactcgagacagggacagcgggaggctcaaacctgccctcggacgctcctggagctttgtgcccagcactcggattctcctggacaccatcgagggagcaggagcatcaggcggccggcgcatggcgtgtctggccaaatcttcccgacagccaacaggtttccaggagatggtagacattgggacctgggggacctcagagcagagtgccacattacagggtgatcagacatgacctgtgctgttgtttgggaaacagggaagcattggggacccctcccaacttttcttcccagtaacgcctgctgtttactgccacctggcactggtgactacagacgttctcaggctggccagaagagacatcttgggttccttggcctcactctctgtaagcatataaaccacaggcgaaagagg

SEQ ID NO: 313715 - DNA, 636 bp, Homo sapiens
cttggcctcactctctgtaagcatataaaccacaggcgaaagaggatgctgcattgcgaggacccagaaattcatactggtgccacgtttccttcccttatttctaacgtgtatgtttctggtggaaacagggaagcattggggacccctcccaacttttcttcccagtaacgcctgctgtttactgccacctggcactggtgactacagacgttctcaggctggccagaagagacatcttgggttccttggcctcactctctgtaagcatataaaccacaggcgaaagaggatgctgcattgcgaggacccagaaattcatactggtgccacgtttccttcccttatttctaacgtgtatgtttctggtggaaaccaagttcaccctggctgggagcatctctgatgaggcatgctggcgactggatggataatcctgtgcatcaccattgtgtcctgtgctccctcctagcgcagtggccaagccgggaaagcctctaacttgcctttgctgctgctgccttttttttcttttgtctctgcctttccatttgttagatgggggcccactcttccttagctctgtctctgagttactgggtggaaataagcttataaatgaaatactcttcttca

SEQ ID NO: 313716 - DNA, 674 bp, Homo sapiens
aactaaagaagctacccacttgggttgcttaactccactgactccttacttcttcttccagccaacaggtttccaggagatggtagacattgggacctgggggacctcagagcagagtgccacattacagggtgatcagacatgacctgtgctgttgtttgggaaacagggaagcattggggacccctcccaacttttcttcccagtaacgcctgctgtttactgccacctggcactggtgactacagacgttctcaggctggccagaagagacatcttgggttccttggcctcactctctgtaagcatataaaccacaggcgaaagaggatgctgcattgcgaggacccagaaattcatactggtgccacgtttccttcccttatttctaacgtgtatgtttctggtggaaaccaagttcaccctggctgggagcatctctgatgaggcatgctggcgactggatggataatcctgtgcatcaccattgtgtcctgtgctccctcctagcgcagtggccaagccgggaaagcctctaacttgcctttgctgctgctgccttttttttcttttgtctctgcctttccatttgttagatgggggcccactcttccttagctctgtctctgagttactgggtggaaataagcttataaatgaaatactcttcttca

SEQ ID NO: 313717 - DNA, 743 bp, Homo sapiens
ccccccccccccccccttttggggttgggggggggaaaaaaacaacaaccccccccaatttaccccggcggaaggagcaggagcatcaggcggccggcgcatggcgtgtctggccaaatcttcccgacagccaacaggtttccaggagatggtagacattgggacctgggggacctcagagcagagtgccacattacagggtgatcagacatgacctgtgctgttgtttgggaaacagggaagcattggggacccctcccaacttttcttcccagtaacgcctgctgtttactgccacctggcactggtgactacagacgttctcaggctggccagaagagacatcttgggttccttggcctcactctctgtaagcatataaaccacaggcgaaagaggatgctgcattgcgaggacccagaaattcatactggtgccacgtttccttcccttatttctaacgtgtatgtttctggtggaaaccaagttcaccctggctgggagcatctctgatgaggcatgctggcgactggatggataatcctgtgcatcaccattgtgtcctgtgctccctcctagcgcagtggccaagccgggaaagcctctaacttgcctttgctgctgctgccttttttttcttttgtctctgcctttccatttgttagatgggggcccactcttccttagctctgtctctgagttactgggtggaaataagcttataaatgaaatactcttcttca

SEQ ID NO: 313718 - DNA, 738 bp, Homo sapiens
aaaaaaaaaaaccccccccaaaaaaaccccccccccctaaattttccccggggaaggggggggggaaaagagcaggagcatcaggcggccggcgcatggcgtgtctggccaaatcttcccgacagccaacaggtttccaggagatggtagacattgggacctgggggacctcagagcagagtgccacattacagggtgatcagacatgacctgtgctgttgtttgggaaacagggaagcattggggacccctcccaacttttcttcccagtaacgcctgctgtttactgccacctggcactggtgactacagacgttctcaggctggccagaagagacatcttgggttccttggcctcactctctgtaagcatataaaccacaggcgaaagaggatgctgcattgcgaggacccagaaattcatactggtgccacgtttccttcccttatttctaacgtgtatgtttctggtggaaaccaagttcaccctggctgggagcatctctgatgaggcatgctggcgactggatggataatcctgtgcatcaccattgtgtcctgtgctccctcctagcgcagtggccaagccgggaaagcctctaacttgcctttgctgctgctgccttttttttcttttgtctctgcctttccatttgttagatgggggcccactcttccttagctctgtctctgagttactgggtggaaataagcttataaatgaaatactcttcttca

SEQ ID NO: 313719 - DNA, 2622 bp, Homo sapiens
ctggaacccggaagcggcagcgcggcgcgacccggcgggcgggctctgggcgcgggaatcccggcggatcccgggcgggcggatgacccccagccctacccttggtgccgcctcctcctctctcctttctcctccggcagccagcgcgcctgtgtcctctctaggaaggggtaggggaggggcgtctggagaggaccccccgcgaatgcccacgtgacgtgcagtccccctggggctgttccggcctgcggggaacatgggcgtgctcagggtcggactgtgccctggccttaccgaggagatgatccagcttctcaggagccacaggatcaagacagtggtggacctggtttctgcagacctggaagaggtagctcagaaatgtggcttgtcttacaaggccctggttgccctgaggcgggtgctgctggctcagttctcggctttccccgtgaatggcgctgatctctacgaggaactgaagacctccactgccatcctgtccactggcattggcagacatggagggcgcactcaagtgggaacctgggaggactgcagctgcctcaggtccccgcagggagatcgtggagtggggtcaggaatgctctgaagaaggcaggacttgggcatggaggaacagatggactttcgctgaatgctttcgatgaacgaggcactgcggtcagcacttcacgtcttgataaactgcttgatgctggtctctatactggagaagtgactgaaattgtaggaggcccaggtagcggcaaaactcaggtatgtctctgtatggcagcaaatgtggcccatggcctgcagcaaaacgtcctatatgtagattccaatggagggctgacagcttcccgcctcctccagctgcttcaggctaaaacccaggatgaggaggaacaggcagaagctctccggaggatccaggtggtgcatgcatttgacatcttccagatgctggatgtgctgcaggagctccgaggcactgtggcccagcaggtgagcctgctgttctgcccctccttgcttaattcagctttctaggtgctatctctgtgggcaggtgtcctactacagactgtttggaaatgcagatgtgcaatctggtgactccaactatgcttgctactcccaggatggaattcccgagcacctaaatcacatacctcattgtttacatgttcatcttccctgctgaacagtaaagccccctgagtggaaggatcatgtcatatttatgtctgcattccccactaggtgactggttcttcaggaactgtgaaggtggtggttgtggactcggtcactgcggtggtttccccacttctgggaggtcagcagagggaaggcttggccttgatgatgcagctggcccgagagctgaagaccctggcccgggaccttggcatggcagtggtggtgaccaaccacataactcgagacagggacagcgggaggctcaaacctgccctcggacgctcctggagctttgtgcccagcactcggattctcctggacaccatcgagggagcaggagcatcaggcggccggcgcatggcgtgtctggccaaatcttcccgacagattttatcatgtgggcaacctgctgcaactggttctgcctggatggacagcctgaggaggtcccaccaccccagggagccaggatgcaggcctattccaaccctgggtacagctccttcccttccccaacaggcttggaaccaagctgcaagtcctgtggggctcactttgcaaacacggccaggaagggccaatggccatgtgtctcaggatcaagaggaacccgtctacctggagagcgtggccagagtacctgctgaggatgagacccagtctattgactcagaggacagctttgtcccaggccgaagggcctctctgtctgacctgactgacctggaggacattgaaggcctgacagtgcggcagctgaaagagatcttggctcgcaactttgtcaactacaagggctgctgtgagaagtgggagctgatggagagagtgacccggctatacaaggatcagaaaggactccagcacctggtcagtggtgccgaagaccaaaacgggggagcagtaccatcaggcttggaggagaacctgtgtaagatctgcatggactcacccattgactgtgttcttctggagtgtggccacatggtaacctgtaccaagtgtggcaagcgcatgaatgaatgtcccatctgccggcagtatgtaatccgagctgtgcatgtcttccggtcctgagagcttgcatcggtttcttcagtgccttacagggaaatagcctggggtgtctgggctcagggttggccagcttgcagaggagcaagctagtagaaatattgcagggttcccaaaaccaggtcaagcaagatgccatgtcacccctgagcatgcctgtcttcccaggggtgtacctcttggctggcaaagcccaaggccagtgggaacttgtataaatcacatgggtatgttcttggttcagtgatcttggagtgatgatggtaactgatgaacagagaactttccagaacttgggtcctgtcttcctccctgaacctagacagtttcacccctcct

SEQ ID NO: 313720 - DNA, 764 bp, Homo sapiens
ctggaacccggaagcggcagcgcggcgcgacccggcgggcgggctctgggcgcgggaatcccggcggatcccgggcgggcggatgacccccagccctacccttggtgccgcctcctcctctctcctttctcctccggcagccagcgcgcctgtgtcctctctaggaaggggtaggggaggggcgtctggagaggaccccccgcgaatgcccacgtgacgtgcagtccccctggggctgttccggcctgcggggaacatgggcgtgctcagggtcggactgtgccctggccttaccgaggagatgatccagcttctcaggagccacaggatcaagacagtggtggacctggtttctgcagacctggaagaggtagctcagaaatgtggcttgtcttacaaggccctggttgccctgaggcgggtgctgctggctcagttctcggctttccccgtgaatggcgctgatctctacgaggaactgaagacctccactgccatcctgtccactggcattggcaggtttgtgtgtgtacttggggaagaaggagagaggcaggaggatggggcctcctctcagctctgcttttgatgcttgagtctagacgggaggggtttttttttaaccaataatggatgggaaggaaaggggtcaggacatctgaattcttatcctataacagggttatggggtatctcagccttggcactattgatatttagggacaggtaattatttgttggggggtgtaggctatcagcgcttt

SEQ ID NO: 313721 - DNA, 129 bp, Homo sapiens
tgggtttcagttgaaataaggttttagctttatttgtgagtaaatcagtagaatactggatgttaggatgcatctctccactttattataaataatgcaaggctgattttatgatgtgatctcttgcag

SEQ ID NO: 313722 - DNA, 848 bp, Homo sapiens
ctggaacccggaagcggcagcgcggcgcgacccggcgggcgggctctgggcgcgggaatcccggcggatcccgggcgggcggatgacccccagccctacccttggtgccgcctcctcctctctcctttctcctccggcagccagcgcgcctgtgtcctctctaggaagggtggtggacctggtttctgcagacctggaagaggtagctcagaaatgtggcttgtcttacaaggccctggttgccctgaggcgggtgctgctggctcagttctcggctttccccgtgaatggcgctgatctctacgaggaactgaagacctccactgccatcctgtccactggcattggcagtcttgataaactgcttgatgctggtctctatactggagaagtgactgaaattgtaggaggcccaggtagcggcaaaactcaggtatgtctctgtatggcagcaaatgtggcccatggcctgcagcaaaacgtcctatatgtagattccaatggagggctgacagcttcccgcctcctccagctgcttcaggctaaaacccaggatgaggaggaacaggcagaagctctccggaggatccaggtggtgcatgcatttgacatcttccagatgctggatgtgctgcaggagctccgaggcactgtggcccagcaggtgactggttcttcaggaactgtgaaggtggtggttgtggactcggtcactgcggtggtttccccacttctgggaggtcagcagagggaaggcttggccttgatgatgcagctggcccgagagctgaagaccctggcccgggaccttggcatggcagtggtggtgaggaagcaggcttggccaa

SEQ ID NO: 313723 - DNA, 1696 bp, Homo sapiens
cggtgtgtgtgttgcggcagaagccagcgcgcctgtgtcctctctaggaaggggtaggggaggggcgtctggagaggaccccccgcgaatgcccacgtgacgtgcagtccccctggggctgttccggcctgcggggaacatgggcgtgctcagggtcggactgtgccctggccttaccgaggagatgatccagcttctcaggagccacaggatcaagacagtggtggacctggtttctgcagacctggaagaggtagctcagaaatgtggcttgtcttacaaggccctggttgccctgaggcgggtgctgctggctcagttctcggctttccccgtgaatggcgctgatctctacgaggaactgaagacctccactgccatcctgtccactggcattggcagtcttgataaactgcttgatgctggtctctatactggagaagtgactgaaattgtaggaggcccaggtagcggcaaaactcaggtatgtctctgtatggcagcaaatgtggcccatggcctgcagcaaaacgtcctatatgtagattccaatggagggctgacagcttcccgcctcctccagctgcttcaggctaaaacccaggatgaggaggaacaggcagaagctctccggaggatccaggtggtgcatgcatttgacatcttccagatgctggatgtgctgcaggagctccgaggcactgtggcccagcaggtgactggttcttcaggaactgtgaaggtggtggttgtggactcggtcactgcggtggtttccccacttctgggaggtcagcagagggaaggcttggccttgatgatgcagctggcccgagagctgaagaccctggcccgggaccttggcatggcagtggtggtgaccaaccacataactcgagacagggacagcgggaggctcaaacctgccctcggacgctcctggagctttgtgcccagcactcggattctcctggacaccatcgagggagcaggagcatcaggcggccggcgcatggcgtgtctggccaaatcttcccgacagccaacaggtttccaggagatggtagacattgggacctgggggacctcagagcagagtgccacattacagggtgatcagacatgacctgtgctgttgtttgggaaacagggaagcattggggacccctcccaacttttcttcccagtaacgcctgctgtttactgccacctggcactggtgactacagacgttctcaggctggccagaagagacatcttgggttccttggcctcactctctgtaagcatataaaccacaggcgaaagaggatgctgcattgcgaggacccagaaattcatactggtgccacgtttccttcccttatttctaacgtgtatgtttctggtggaaaccaagttcaccctggctgggagcatctctgatgaggcatgctggcgactggatggataatcctgtgcatcaccattgtgtcctgtgctccctcctagcgcagtggccaagccgggaaagcctctaacttgcctttgctgctgctgccttttttttcttttgtctctgcctttccatttgttagatgggggcccactcttccttagctctgtctctgagttactgggtggaaataagcttataaatgaaatactcttcttcatctctgttttgctcttaaaaatataaaaaggcaattccccg

SEQ ID NO: 313724 - DNA, 1813 bp, Homo sapiens
ctggaacccggaagcggcagcgcggcgcgacccggcgggcgggctctgggcgcgggaatcccggcggatcccgggcgggcggatgacccccagccctacccttggtgccgcctcctcctctctcctttctcctccggcagccagcgcgcctgtgtcctctctaggaaggggtaggggaggggcgtctggagaggaccccccgcgaatgcccacgtgacgtgcagtccccctggggctgttccggcctgcggggaacatgggcgtgctcagggtcggactgtgccctggccttaccgaggagatgatccagcttctcaggagccacaggatcaagacagtggtggacctggtttctgcagacctggaagaggtagctcagaaatgtggcttgtcttacaaggccctggttgccctgaggcgggtgctgctggctcagttctcggctttccccgtgaatggcgctgatctctacgaggaactgaagacctccactgccatcctgtccactggcattggcagtcttgataaactgcttgatgctggtctctatactggagaagtgactgaaattgtaggaggcccaggtagcggcaaaactcaggtatgtctctgtatggcagcaaatgtggcccatggcctgcagcaaaacgtcctatatgtagattccaatggagggctgacagcttcccgcctcctccagctgcttcaggctaaaacccaggatgaggaggaacaggcagaagctctccggaggatccaggtggtgcatgcatttgacatcttccagatgctggatgtgctgcaggagctccgaggcactgtggcccagcaggtgactggttcttcaggaactgtgaaggtggtggttgtggactcggtcactgcggtggtttccccacttctgggaggtcagcagagggaaggcttggccttgatgatgcagctggcccgagagctgaagaccctggcccgggaccttggcatggcagtggtggtgaccaaccacataactcgagacagggacagcgggaggctcaaacctgccctcggacgctcctggagctttgtgcccagcactcggattctcctggacaccatcgagggagcaggagcatcaggcggccggcgcatggcgtgtctggccaaatcttcccgacagccaacaggtttccaggagatggtagacattgggacctgggggacctcagagcagagtgccacattacagggtgatcagacatgacctgtgctgttgtttgggaaacagggaagcattggggacccctcccaacttttcttcccagtaacgcctgctgtttactgccacctggcactggtgactacagacgttctcaggctggccagaagagacatcttgggttccttggcctcactctctgtaagcatataaaccacaggcgaaagaggatgctgcattgcgaggacccagaaattcatactggtgccacgtttccttcccttatttctaacgtgtatgtttctggtggaaaccaagttcaccctggctgggagcatctctgatgaggcatgctggcgactggatggataatcctgtgcatcaccattgtgtcctgtgctccctcctagcgcagtggccaagccgggaaagcctctaacttgcctttgctgctgctgccttttttttcttttgtctctgcctttccatttgttagatgggggcccactcttccttagctctgtctctgagttactgggtggaaataagcttataaatgaaatactcttcttcatctctgttttgctcttaaaaatataaaaaggcaattccccg

SEQ ID NO: 313725 - DNA, 3033 bp, Homo sapiens
ctggaacccggaagcggcagcgcggcgcgacccggcgggcgggctctgggcgcgggaatcccggcggatcccgggcgggcggatgacccccagccctacccttggtgccgcctcctcctctctcctttctcctccggcagccagcgcgcctgtgtcctctctaggaaggggtaggggaggggcgtctggagaggaccccccgcgaatgcccacgtgacgtgcagtccccctggggctgttccggcctgcggggaacatgggcgtgctcagggtcggactgtgccctggccttaccgaggagatgatccagcttctcaggagccacaggatcaagacagtggtggacctggtttctgcagacctggaagaggtagctcagaaatgtggcttgtcttacaaggccctggttgccctgaggcgggtgctgctggctcagttctcggctttccccgtgaatggcgctgatctctacgaggaactgaagacctccactgccatcctgtccactggcattggcagacatggagggcgcactcaagtgggaacctgggaggactgcagctgcctcaggtccccgcagggagatcgtggagtggggtcaggaatgctctgaagaaggcaggacttgggcatggaggaacagatggactttcgctgaatgctttcgatgaacgaggcactgcggtcagcacttcacgtcttgataaactgcttgatgctggtctctatactggagaagtgactgaaattgtaggaggcccaggtagcggcaaaactcaggtatgtctctgtatggcagcaaatgtggcccatggcctgcagcaaaacgtcctatatgtagattccaatggagggctgacagcttcccgcctcctccagctgcttcaggctaaaacccaggatgaggaggaacaggcagaagctctccggaggatccaggtggtgcatgcatttgacatcttccagatgctggatgtgctgcaggagctccgaggcactgtggcccagcaggtgagcctgctgttctgcccctccttgcttaattcagctttctaggtgctatctctgtgggcaggtgtcctactacagactgtttggaaatgcagatgtgcaatctggtgactccaactatgcttgctactcccaggatggaattcccgagcacctaaatcacatacctcattgtttacatgttcatcttccctgctgaacagtaaagccccctgagtggaaggatcatgtcatatttatgtctgcattccccactaggtgactggttcttcaggaactgtgaaggtggtggttgtggactcggtcactgcggtggtttccccacttctgggaggtcagcagagggaaggcttggccttgatgatgcagctggcccgagagctgaagaccctggcccgggaccttggcatggcagtggtggtgaccaaccacataactcgagacagggacagcgggaggctcaaacctgccctcggacgctcctggagctttgtgcccagcactcggattctcctggacaccatcgagggagcaggagcatcaggcggccggcgcatggcgtgtctggccaaatcttcccgacagattttatcatgtgggcaacctgctgcaactggttctgcctggatggacagcctgaggaggtcccaccaccccagggagccaggatgcaggcctattccaaccctgggtacagctccttcccttccccaacaggcttggaaccaagctgcaagtcctgtggggctcactttgcaaacacggccaggaagcagacctgcttggactgtaagaaaaatttttgcatgacctgttcgagccaagtagggaatgggccccgcctctgccttctctgccaacggtttcgagctacagcctttcagcgagaggagctcatgaagatgaaggtgaaggacttgagggactatctcagcctccatgacatctctaccgaaatgtgccgggagaaagaagagctggtgctcttggtccttggccagcagcctgtaatctcccaggaggacaggactcgtgcctccaccttgtccccagactttcctgagcagcaggccttcctgacccagcctcactccagcatggttccacctacctcacccaacctcccctcttcatctgcacaagccacctctgttcccccagcccaggttcaggagaatcagcagggccaatggccatgtgtctcaggatcaagaggaacccgtctacctggagagcgtggccagagtacctgctgaggatgagacccagtctattgactcagaggacagctttgtcccaggccgaagggcctctctgtctgacctgactgacctggaggacattgaaggcctgacagtgcggcagctgaaagagatcttggctcgcaactttgtcaactacaagggctgctgtgagaagtgggagctgatggagagagtgacccggctatacaaggatcagaaaggactccagcacctggtcagtggtgccgaagaccaaaacgggggagcagtaccatcaggcttggaggagaacctgtgtaagatctgcatggactcacccattgactgtgttcttctggagtgtggccacatggtaacctgtaccaagtgtggcaagcgcatgaatgaatgtcccatctgccggcagtatgtaatccgagctgtgcatgtcttccggtcctgagagcttgcatcggtttcttcagtgccttacagggaaatagcctggggtgtctgggctcagggttggccagcttgcagaggagcaagctagtagaaatattgcagggttcccaaaaccaggtcaagcaagatgccatgtcacccctgagcatgcctgtcttcccaggggtgtacctcttggctggcaaagcccaaggccagtgggaacttgtataaatcacatgggtatgttcttggttcagtgatcttggagtgatgatggtaactgatgaacagagaactttccagaacttgggtcctgtcttcctccctgaacctagacagtttcacccctcct

SEQ ID NO: 313726 - DNA, 2816 bp, Homo sapiens
ctggaacccggaagcggcagcgcggcgcgacccggcgggcgggctctgggcgcgggaatcccggcggatcccgggcgggcggatgacccccagccctacccttggtgccgcctcctcctctctcctttctcctccggcagccagcgcgcctgtgtcctctctaggaaggggtaggggaggggcgtctggagaggaccccccgcgaatgcccacgtgacgtgcagtccccctggggctgttccggcctgcggggaacatgggcgtgctcagggtcggactgtgccctggccttaccgaggagatgatccagcttctcaggagccacaggatcaagacagtggtggacctggtttctgcagacctggaagaggtagctcagaaatgtggcttgtcttacaaggccctggttgccctgaggcgggtgctgctggctcagttctcggctttccccgtgaatggcgctgatctctacgaggaactgaagacctccactgccatcctgtccactggcattggcagacatggagggcgcactcaagtgggaacctgggaggactgcagctgcctcaggtccccgcagggagatcgtggagtggggtcaggaatgctctgaagaaggcaggacttgggcatggaggaacagatggactttcgctgaatgctttcgatgaacgaggcactgcggtcagcacttcacggcagaagctctccggaggatccaggtggtgcatgcatttgacatcttccagatgctggatgtgctgcaggagctccgaggcactgtggcccagcaggtgagcctgctgttctgcccctccttgcttaattcagctttctaggtgctatctctgtgggcaggtgtcctactacagactgtttggaaatgcagatgtgcaatctggtgactccaactatgcttgctactcccaggatggaattcccgagcacctaaatcacatacctcattgtttacatgttcatcttccctgctgaacagtaaagccccctgagtggaaggatcatgtcatatttatgtctgcattccccactaggtgactggttcttcaggaactgtgaaggtggtggttgtggactcggtcactgcggtggtttccccacttctgggaggtcagcagagggaaggcttggccttgatgatgcagctggcccgagagctgaagaccctggcccgggaccttggcatggcagtggtggtgaccaaccacataactcgagacagggacagcgggaggctcaaacctgccctcggacgctcctggagctttgtgcccagcactcggattctcctggacaccatcgagggagcaggagcatcaggcggccggcgcatggcgtgtctggccaaatcttcccgacagattttatcatgtgggcaacctgctgcaactggttctgcctggatggacagcctgaggaggtcccaccaccccagggagccaggatgcaggcctattccaaccctgggtacagctccttcccttccccaacaggcttggaaccaagctgcaagtcctgtggggctcactttgcaaacacggccaggaagcagacctgcttggactgtaagaaaaatttttgcatgacctgttcgagccaagtagggaatgggccccgcctctgccttctctgccaacggtttcgagctacagcctttcagcgagaggagctcatgaagatgaaggtgaaggacttgagggactatctcagcctccatgacatctctaccgaaatgtgccgggagaaagaagagctggtgctcttggtccttggccagcagcctgtaatctcccaggaggacaggactcgtgcctccaccttgtccccagactttcctgagcagcaggccttcctgacccagcctcactccagcatggttccacctacctcacccaacctcccctcttcatctgcacaagccacctctgttcccccagcccaggttcaggagaatcagcagggccaatggccatgtgtctcaggatcaagaggaacccgtctacctggagagcgtggccagagtacctgctgaggatgagacccagtctattgactcagaggacagctttgtcccaggccgaagggcctctctgtctgacctgactgacctggaggacattgaaggcctgacagtgcggcagctgaaagagatcttggctcgcaactttgtcaactacaagggctgctgtgagaagtgggagctgatggagagagtgacccggctatacaaggatcagaaaggactccagcacctggtcagtggtgccgaagaccaaaacgggggagcagtaccatcaggcttggaggagaacctgtgtaagatctgcatggactcacccattgactgtgttcttctggagtgtggccacatggtaacctgtaccaagtgtggcaagcgcatgaatgaatgtcccatctgccggcagtatgtaatccgagctgtgcatgtcttccggtcctgagagcttgcatcggtttcttcagtgccttacagggaaatagcctggggtgtctgggctcagggttggccagcttgcagaggagcaagctagtagaaatattgcagggttcccaaaaccaggtcaagcaagatgccatgtcacccctgagcatgcctgtcttcccaggggtgtacctcttggctggcaaagcccaaggccagtgggaacttgtataaatcacatgggtatgttcttggttcagtgatcttggagtgatgatggtaactgatgaacagagaactttccagaacttgggtcctgtcttcctccctgaacctagacagtttcacccctcct

SEQ ID NO: 313727 - DNA, 2477 bp, Homo sapiens
ctggaacccggaagcggcagcgcggcgcgacccggcgggcgggctctgggcgcgggaatcccggcggatcccgggcgggcggatgacccccagccctacccttggtgccgcctcctcctctctcctttctcctccggcagccagcgcgcctgtgtcctctctaggaaggggtaggggaggggcgtctggagaggaccccccgcgaatgcccacgtgacgtgcagtccccctggggctgttccggcctgcggggaacatgggcgtgctcagggtcggactgtgccctggccttaccgaggagatgatccagcttctcaggagccacaggatcaagacagtggtggacctggtttctgcagacctggaagaggtagctcagaaatgtggcttgtcttacaagtcttgataaactgcttgatgctggtctctatactggagaagtgactgaaattgtaggaggcccaggtagcggcaaaactcaggtatgtctctgtatggcagcaaatgtggcccatggcctgcagcaaaacgtcctatatgtagattccaatggagggctgacagcttcccgcctcctccagctgcttcaggctaaaacccaggatgaggaggaacaggcagaagctctccggaggatccaggtggtgcatgcatttgacatcttccagatgctggatgtgctgcaggagctccgaggcactgtggcccagcaggtgactggttcttcaggaactgtgaaggtggtggttgtggactcggtcactgcggtggtttccccacttctgggaggtcagcagagggaaggcttggccttgatgatgcagctggcccgagagctgaagaccctggcccgggaccttggcatggcagtggtggtgaccaaccacataactcgagacagggacagcgggaggctcaaacctgccctcggacgctcctggagctttgtgcccagcactcggattctcctggacaccatcgagggagcaggagcatcaggcggccggcgcatggcgtgtctggccaaatcttcccgacagattttatcatgtgggcaacctgctgcaactggttctgcctggatggacagcctgaggaggtcccaccaccccagggagccaggatgcaggcctattccaaccctgggtacagctccttcccttccccaacaggcttggaaccaagctgcaagtcctgtggggctcactttgcaaacacggccaggaagcagacctgcttggactgtaagaaaaatttttgcatgacctgttcgagccaagtagggaatgggccccgcctctgccttctctgccaacggtttcgagctacagcctttcagcgagaggagctcatgaagatgaaggtgaaggacttgagggactatctcagcctccatgacatctctaccgaaatgtgccgggagaaagaagagctggtgctcttggtccttggccagcagcctgtaatctcccaggaggacaggactcgtgcctccaccttgtccccagactttcctgagcagcaggccttcctgacccagcctcactccagcatggttccacctacctcacccaacctcccctcttcatctgcacaagccacctctgttcccccagcccaggttcaggagaatcagcagggccaatggccatgtgtctcaggatcaagaggaacccgtctacctggagagcgtggccagagtacctgctgaggatgagacccagtctattgactcagaggacagctttgtcccaggccgaagggcctctctgtctgacctgactgacctggaggacattgaaggcctgacagtgcggcagctgaaagagatcttggctcgcaactttgtcaactacaagggctgctgtgagaagtgggagctgatggagagagtgacccggctatacaaggatcagaaaggactccagcacctggtcagtggtgccgaagaccaaaacgggggagcagtaccatcaggcttggaggagaacctgtgtaagatctgcatggactcacccattgactgtgttcttctggagtgtggccacatggtaacctgtaccaagtgtggcaagcgcatgaatgaatgtcccatctgccggcagtatgtaatccgagctgtgcatgtcttccggtcctgagagcttgcatcggtttcttcagtgccttacagggaaatagcctggggtgtctgggctcagggttggccagcttgcagaggagcaagctagtagaaatattgcagggttcccaaaaccaggtcaagcaagatgccatgtcacccctgagcatgcctgtcttcccaggggtgtacctcttggctggcaaagcccaaggccagtgggaacttgtataaatcacatgggtatgttcttggttcagtgatcttggagtgatgatggtaactgatgaacagagaactttccagaacttgggtcctgtcttcctccctgaacctagacagtttcacccctcct

SEQ ID NO: 313728 - DNA, 2637 bp, Homo sapiens
ctggaacccggaagcggcagcgcggcgcgacccggcgggcgggctctgggcgcgggaatcccggcggatcccgggcgggcggatgacccccagccctacccttggtgccgcctcctcctctctcctttctcctccggcagccagcgcgcctgtgtcctctctaggaaggggtaggggaggggcgtctggagaggaccccccgcgaatgcccacgtgacgtgcagtccccctggggctgttccggcctgcggggaacatgggcgtgctcagggtcggactgtgccctggccttaccgaggagatgatccagcttctcaggagccacaggatcaagacagtggtggacctggtttctgcagacctggaagaggtagctcagaaatgtggcttgtcttacaaggccctggttgccctgaggcgggtgctgctggctcagttctcggctttccccgtgaatggcgctgatctctacgaggaactgaagacctccactgccatcctgtccactggcattggcaggcagaagctctccggaggatccaggtggtgcatgcatttgacatcttccagatgctggatgtgctgcaggagctccgaggcactgtggcccagcaggtgagcctgctgttctgcccctccttgcttaattcagctttctaggtgctatctctgtgggcaggtgtcctactacagactgtttggaaatgcagatgtgcaatctggtgactccaactatgcttgctactcccaggatggaattcccgagcacctaaatcacatacctcattgtttacatgttcatcttccctgctgaacagtaaagccccctgagtggaaggatcatgtcatatttatgtctgcattccccactaggtgactggttcttcaggaactgtgaaggtggtggttgtggactcggtcactgcggtggtttccccacttctgggaggtcagcagagggaaggcttggccttgatgatgcagctggcccgagagctgaagaccctggcccgggaccttggcatggcagtggtggtgaccaaccacataactcgagacagggacagcgggaggctcaaacctgccctcggacgctcctggagctttgtgcccagcactcggattctcctggacaccatcgagggagcaggagcatcaggcggccggcgcatggcgtgtctggccaaatcttcccgacagattttatcatgtgggcaacctgctgcaactggttctgcctggatggacagcctgaggaggtcccaccaccccagggagccaggatgcaggcctattccaaccctgggtacagctccttcccttccccaacaggcttggaaccaagctgcaagtcctgtggggctcactttgcaaacacggccaggaagcagacctgcttggactgtaagaaaaatttttgcatgacctgttcgagccaagtagggaatgggccccgcctctgccttctctgccaacggtttcgagctacagcctttcagcgagaggagctcatgaagatgaaggtgaaggacttgagggactatctcagcctccatgacatctctaccgaaatgtgccgggagaaagaagagctggtgctcttggtccttggccagcagcctgtaatctcccaggaggacaggactcgtgcctccaccttgtccccagactttcctgagcagcaggccttcctgacccagcctcactccagcatggttccacctacctcacccaacctcccctcttcatctgcacaagccacctctgttcccccagcccaggttcaggagaatcagcagggccaatggccatgtgtctcaggatcaagaggaacccgtctacctggagagcgtggccagagtacctgctgaggatgagacccagtctattgactcagaggacagctttgtcccaggccgaagggcctctctgtctgacctgactgacctggaggacattgaaggcctgacagtgcggcagctgaaagagatcttggctcgcaactttgtcaactacaagggctgctgtgagaagtgggagctgatggagagagtgacccggctatacaaggatcagaaaggactccagcacctggtcagtggtgccgaagaccaaaacgggggagcagtaccatcaggcttggaggagaacctgtgtaagatctgcatggactcacccattgactgtgttcttctggagtgtggccacatggtaacctgtaccaagtgtggcaagcgcatgaatgaatgtcccatctgccggcagtatgtaatccgagctgtgcatgtcttccggtcctgagagcttgcatcggtttcttcagtgccttacagggaaatagcctggggtgtctgggctcagggttggccagcttgcagaggagcaagctagtagaaatattgcagggttcccaaaaccaggtcaagcaagatgccatgtcacccctgagcatgcctgtcttcccaggggtgtacctcttggctggcaaagcccaaggccagtgggaacttgtataaatcacatgggtatgttcttggttcagtgatcttggagtgatgatggtaactgatgaacagagaactttccagaacttgggtcctgtcttcctccctgaacctagacagtttcacccctcct

SEQ ID NO: 313729 - DNA, 2184 bp, Homo sapiens
gaaaatcaagtgaatacaagagagctgtaagcaccgagggaggcaacggtaaggagggagtggtgaacaggaagccgattggccttgggcttagggagtttataaatccaacagacatggagggcgcactcaagtgggaacctgggaggactgcagctgcctcaggtccccgcagggagatcgtggagtggggtcaggaatgctctgaagaaggcaggacttgggcatggaggaacagatggactttcgctgaatgctttcgatgaacgaggcactgcggtcagcacttcacgtcttgataaactgcttgatgctggtctctatactggagaagtgactgaaattgtaggaggcccaggtagcggcaaaactcaggtatgtctctgtatggcagcaaatgtggcccatggcctgcagcaaaacgtcctatatgtagattccaatggagggctgacagcttcccgcctcctccagctgcttcaggctaaaacccaggatgaggaggaacaggcagaagctctccggaggatccaggtggtgcatgcatttgacatcttccagatgctggatgtgctgcaggagctccgaggcactgtggcccagcaggtgactggttcttcaggaactgtgaaggtggtggttgtggactcggtcactgcggtggtttccccacttctgggaggtcagcagagggaaggcttggccttgatgatgcagctggcccgagagctgaagaccctggcccgggaccttggcatggcagtggtggtgaccaaccacataactcgagacagggacagcgggaggctcaaacctgccctcggacgctcctggagctttgtgcccagcactcggattctcctggacaccatcgagggagcaggagcatcaggcggccggcgcatggcgtgtctggccaaatcttcccgacagccaacaggtttccaggagatggtagacattgggacctgggggacctcagagcagagtgccacattacagggtgatcagacatgacctgtgctgttgtttgggaaacagggaagcattggggacccctcccaacttttcttcccagtaacgcctgctgtttactgccacctggcactggtgactacagacgttctcaggctggccagaagagacatcttgggttccttggcctcactctctgtaagcatataaaccacaggcgaaagaggatgctgcattgcgaggacccagaaattcatactggtgccacgtttccttcccttatttctaacgtgtatgtttctggtggaaaccaagttcaccctggctgggagcatctctgatgaggcatgctggcgactggatggataatcctgtgcatcaccattgtgtcctgtgctccctcctagcgcagtggccaagccgggaaagcctctaacttgcctttgctgctgctgccttttttttcttttgtctctgcctttccatttgttagatgggggcccactcttccttagctctgtctctgagttactgggtggaaataagcttataaatgaaatactcttcttcatctctgttttgctcttaaaaatataaaaaggcaattccccgagccctagagccacctgatttccccttagaaggctgtttttcagtttcccccagtgaggcccaaagaacagtttattcctcctttcctcttgctgatttggtttcagacctgcctgcatcaccatgactaggtgagaacgtgtgggctcgctgcagttccagggatataatttaacagaaagggagggtatgacctgctcctggtgaatccagccactcatttaatatgcatggtgccctgtggggcccctccacagtacagcataaccagaggtgctgaaccatggccttgcccataaacagacagaggagaatttgcacagtaaatagagccagctgggaaaattgatgctgacgtaaataatacatggcaaatctagtcctttatgcagaaattcattgctggtggctccaagatgcaatataattacacctctcttcctgccagctgtaccacagctagtgccctagtgtatgaaataatccctctgtctttcaccagcactgtggccatccgtctgagagccatgaccctggctgggaggggacgaagacaccagggaatggaaaataaaaggaaaagtacagaaatgatca

SEQ ID NO: 313730 - DNA, 2260 bp, Homo sapiens
ctggaacccggaagcggcagcgcggcgcgacccggcgggcgggctctgggcgcgggaatcccggcggatcccgggcgggcggatgacccccagccctacccttggtgccgcctcctcctctctcctttctcctccggcagccagcgcgcctgtgtcctctctaggaaggggtaggggaggggcgtctggagaggaccccccgcgaatgcccacgtgacgtgcagtccccctggggctgttccggcctgcggggaacatgggcgtgctcagggtcggactgtgccctggccttaccgaggagatgatccagcttctcaggagccacaggatcaagacagtggtggacctggtttctgcagacctggaagaggtagctcagaaatgtggcttgtcttacaaggcagaagctctccggaggatccaggtggtgcatgcatttgacatcttccagatgctggatgtgctgcaggagctccgaggcactgtggcccagcaggtgactggttcttcaggaactgtgaaggtggtggttgtggactcggtcactgcggtggtttccccacttctgggaggtcagcagagggaaggcttggccttgatgatgcagctggcccgagagctgaagaccctggcccgggaccttggcatggcagtggtggtgaccaaccacataactcgagacagggacagcgggaggctcaaacctgccctcggacgctcctggagctttgtgcccagcactcggattctcctggacaccatcgagggagcaggagcatcaggcggccggcgcatggcgtgtctggccaaatcttcccgacagattttatcatgtgggcaacctgctgcaactggttctgcctggatggacagcctgaggaggtcccaccaccccagggagccaggatgcaggcctattccaaccctgggtacagctccttcccttccccaacaggcttggaaccaagctgcaagtcctgtggggctcactttgcaaacacggccaggaagcagacctgcttggactgtaagaaaaatttttgcatgacctgttcgagccaagtagggaatgggccccgcctctgccttctctgccaacggtttcgagctacagcctttcagcgagaggagctcatgaagatgaaggtgaaggacttgagggactatctcagcctccatgacatctctaccgaaatgtgccgggagaaagaagagctggtgctcttggtccttggccagcagcctgtaatctcccaggaggacaggactcgtgcctccaccttgtccccagactttcctgagcagcaggccttcctgacccagcctcactccagcatggttccacctacctcacccaacctcccctcttcatctgcacaagccacctctgttcccccagcccaggttcaggagaatcagcagggccaatggccatgtgtctcaggatcaagaggaacccgtctacctggagagcgtggccagagtacctgctgaggatgagacccagtctattgactcagaggacagctttgtcccaggccgaagggcctctctgtctgacctgactgacctggaggacattgaaggcctgacagtgcggcagctgaaagagatcttggctcgcaactttgtcaactacaagggctgctgtgagaagtgggagctgatggagagagtgacccggctatacaaggatcagaaaggactccagcacctggtcagtggtgccgaagaccaaaacgggggagcagtaccatcaggcttggaggagaacctgtgtaagatctgcatggactcacccattgactgtgttcttctggagtgtggccacatggtaacctgtaccaagtgtggcaagcgcatgaatgaatgtcccatctgccggcagtatgtaatccgagctgtgcatgtcttccggtcctgagagcttgcatcggtttcttcagtgccttacagggaaatagcctggggtgtctgggctcagggttggccagcttgcagaggagcaagctagtagaaatattgcagggttcccaaaaccaggtcaagcaagatgccatgtcacccctgagcatgcctgtcttcccaggggtgtacctcttggctggcaaagcccaaggccagtgggaacttgtataaatcacatgggtatgttcttggttcagtgatcttggagtgatgatggtaactgatgaacagagaactttccagaacttgggtcctgtcttcctccctgaacctagacagtttcacccctcct

SEQ ID NO: 313731 - DNA, 1648 bp, Homo sapiens
ctgcttacttacaaatgcaacagttgtcctattttatgctcattgtgttgtcaccagcattttaaatctttacaagtcagggtgggtacctcaggcaggtttgctggaaaattccagtaaacagtttcaaaggagttcaagttgcttgccagactaacttacttttaaaagtaagcagccttccaagttaagagatgattttaaatttcagattttatcatgtgggcaacctgctgcaactggttctgcctggatggacagcctgaggaggtcccaccaccccagggagccaggatgcaggcctattccaaccctgggtacagctccttcccttccccaacaggcttggaaccaagctgcaagtcctgtggggctcactttgcaaacacggccaggaagcagacctgcttggactgtaagaaaaatttttgcatgacctgttcgagccaagtagggaatgggccccgcctctgccttctctgccaacggtttcgagctacagcctttcagcgagaggagctcatgaagatgaaggtgaaggacttgagggactatctcagcctccatgacatctctaccgaaatgtgccgggagaaagaagagctggtgctcttggtccttggccagcagcctgtaatctcccaggaggacaggactcgtgcctccaccttgtccccagactttcctgagcagcaggccttcctgacccagcctcactccagcatggttccacctacctcacccaacctcccctcttcatctgcacaagccacctctgttcccccagcccaggttcaggagaatcagcagggccaatggccatgtgtctcaggatcaagaggaacccgtctacctggagagcgtggccagagtacctgctgaggatgagacccagtctattgactcagaggacagctttgtcccaggccgaagggcctctctgtctgacctgactgacctggaggacattgaaggcctgacagtgcggcagctgaaagagatcttggctcgcaactttgtcaactacaagggctgctgtgagaagtgggagctgatggagagagtgacccggctatacaaggatcagaaaggactccagcacctggtcagtggtgccgaagaccaaaacgggggagcagtaccatcaggcttggaggagaacctgtgtaagatctgcatggactcacccattgactgtgttcttctggagtgtggccacatggtaacctgtaccaagtgtggcaagcgcatgaatgaatgtcccatctgccggcagtatgtaatccgagctgtgcatgtcttccggtcctgagagcttgcatcggtttcttcagtgccttacagggaaatagcctggggtgtctgggctcagggttggccagcttgcagaggagcaagctagtagaaatattgcagggttcccaaaaccaggtcaagcaagatgccatgtcacccctgagcatgcctgtcttcccaggggtgtacctcttggctggcaaagcccaaggccagtgggaacttgtataaatcacatgggtatgttcttggttcagtgatcttggagtgatgatggtaactgatgaacagagaactttccagaacttgggtcctgtcttcctccctgaacctagacagtttcacccctcct

SEQ ID NO: 313732 - DNA, 1477 bp, Homo sapiens
ctggaacccggaagcggcagcgcggcgcgacccggcgggcgggctctgggcgcgggaatcccggcggatcccgggcgggcggatgacccccagccctacccttggtgccgcctcctcctctctcctttctcctccggcagccagcgcgcctgtgtcctctctaggaaggggtaggggaggggcgtctggagaggaccccccgcgaatgcccacgtgacgtgcagtccccctggggctgttccggcctgcggggaacatgggcgtgctcagggtcggactgtgccctggccttaccgaggagatgatccagcttctcaggagccacaggatcaagacagtggtggacctggtttctgcagacctggaagaggtagctcagaaatgtggcttgtcttacaaggcagaagctctccggaggatccaggtggtgcatgcatttgacatcttccagatgctggatgtgctgcaggagctccgaggcactgtggcccagcaggtgactggttcttcaggaactgtgaaggtggtggttgtggactcggtcactgcggtggtttccccacttctgggaggtcagcagagggaaggcttggccttgatgatgcagctggcccgagagctgaagaccctggcccgggaccttggcatggcagtggtggtgaccaaccacataactcgagacagggacagcgggaggctcaaacctgccctcggacgctcctggagctttgtgcccagcactcggattctcctggacaccatcgagggagcaggagcatcaggcggccggcgcatggcgtgtctggccaaatcttcccgacagccaacaggtttccaggagatggtagacattgggacctgggggacctcagagcagagtgccacattacagggtgatcagacatgacctgtgctgttgtttgggaaacagggaagcattggggacccctcccaacttttcttcccagtaacgcctgctgtttactgccacctggcactggtgactacagacgttctcaggctggccagaagagacatcttgggttccttggcctcactctctgtaagcatataaaccacaggcgaaagaggatgctgcattgcgaggacccagaaattcatactggtgccacgtttccttcccttatttctaacgtgtatgtttctggtggaaaccaagttcaccctggctgggagcatctctgatgaggcatgctggcgactggatggataatcctgtgcatcaccattgtgtcctgtgctccctcctagcgcagtggccaagccgggaaagcctctaacttgcctttgctgctgctgccttttttttcttttgtctctgcctttccatttgttagatgggggcccactcttccttagctctgtctctgagttactgggtggaaataagcttataaatgaaatactcttcttcatctctgttttgctcttaaaaatataaaaaggcaattccccg

SEQ ID NO: 313733 - DNA, 1559 bp, Homo sapiens
ctggaacccggaagcggcagcgcggcgcgacccggcgggcgggctctgggcgcgggaatcccggcggatcccgggcgggcggatgacccccagccctacccttggtgccgcctcctcctctctcctttctcctccggcagccagcgcgcctgtgtcctctctaggaaggggtaggggaggggcgtctggagaggaccccccgcgaatgcccacgtgacgtgcagtccccctggggctgttccggcctgcggggaacatgggcgtgctcagggtcggactgtgccctggccttaccgaggagatgatccagcttctcaggagccacaggatcaagacagtggtggacctggtttctgcagacctggaagaggtagctcagaaatgtggcttgtcttacaagtcttgataaactgcttgatgctggtctctatactggagaagtgactgaaattgtaggaggcccaggtagcggcaaaactcaggcagaagctctccggaggatccaggtggtgcatgcatttgacatcttccagatgctggatgtgctgcaggagctccgaggcactgtggcccagcaggtgactggttcttcaggaactgtgaaggtggtggttgtggactcggtcactgcggtggtttccccacttctgggaggtcagcagagggaaggcttggccttgatgatgcagctggcccgagagctgaagaccctggcccgggaccttggcatggcagtggtggtgaccaaccacataactcgagacagggacagcgggaggctcaaacctgccctcggacgctcctggagctttgtgcccagcactcggattctcctggacaccatcgagggagcaggagcatcaggcggccggcgcatggcgtgtctggccaaatcttcccgacagccaacaggtttccaggagatggtagacattgggacctgggggacctcagagcagagtgccacattacagggtgatcagacatgacctgtgctgttgtttgggaaacagggaagcattggggacccctcccaacttttcttcccagtaacgcctgctgtttactgccacctggcactggtgactacagacgttctcaggctggccagaagagacatcttgggttccttggcctcactctctgtaagcatataaaccacaggcgaaagaggatgctgcattgcgaggacccagaaattcatactggtgccacgtttccttcccttatttctaacgtgtatgtttctggtggaaaccaagttcaccctggctgggagcatctctgatgaggcatgctggcgactggatggataatcctgtgcatcaccattgtgtcctgtgctccctcctagcgcagtggccaagccgggaaagcctctaacttgcctttgctgctgctgccttttttttcttttgtctctgcctttccatttgttagatgggggcccactcttccttagctctgtctctgagttactgggtggaaataagcttataaatgaaatactcttcttcatctctgttttgctcttaaaaatataaaaaggcaattccccg

SEQ ID NO: 313734 - DNA, 2658 bp, Homo sapiens
ctggaacccggaagcggcagcgcggcgcgacccggcgggcgggctctgggcgcgggaatcccggcggatcccgggcgggcggatgacccccagccctacccttggtgccgcctcctcctctctcctttctcctccggcagccagcgcgcctgtgtcctctctaggaaggggtaggggaggggcgtctggagaggaccccccgcgaatgcccacgtgacgtgcagtccccctggggctgttccggcctgcggggaacatgggcgtgctcagggtcggactgtgccctggccttaccgaggagatgatccagcttctcaggagccacaggatcaagacagtggtggacctggtttctgcagacctggaagaggtagctcagaaatgtggcttgtcttacaaggccctggttgccctgaggcgggtgctgctggctcagttctcggctttccccgtgaatggcgctgatctctacgaggaactgaagacctccactgccatcctgtccactggcattggcagacatggagggcgcactcaagtgggaacctgggaggactgcagctgcctcaggtccccgcagggagatcgtggagtggggtcaggaatgctctgaagaaggcaggacttgggcatggaggaacagatggactttcgctgaatgctttcgatgaacgaggcactgcggtcagcacttcacgtcttgataaactgcttgatgctggtctctatactggagaagtgactgaaattgtaggaggcccaggtagcggcaaaactcaggtatgtctctgtatggcagcaaatgtggcccatggcctgcagcaaaacgtcctatatgtagattccaatggagggctgacagcttcccgcctcctccagctgcttcaggctaaaacccaggatgaggaggaacaggcagaagctctccggaggatccaggtggtgcatgcatttgacatcttccagatgctggatgtgctgcaggagctccgaggcactgtggcccagcaggtgagcctgctgttctgcccctccttgcttaattcagctttctaggtgctatctctgtgggcaggtgtcctactacagactgtttggaaatgcagatgtgcaatctggtgactccaactatgcttgctactcccaggatggaattcccgagcacctaaatcacatacctcattgtttacatgttcatcttccctgctgaacagtaaagccccctgagtggaaggatcatgtcatatttatgtctgcattccccactaggtgactggttcttcaggaactgtgaaggtggtggttgtggactcggtcactgcggtggtttccccacttctgggaggtcagcagagggaaggcttggccttgatgatgcagctggcccgagagctgaagaccctggcccgggaccttggcatggcagtggtggtgaccaaccacataactcgagacagggacagcgggaggctcaaacctgccctcggacgctcctggagctttgtgcccagcactcggattctcctggacaccatcgagggagcaggagcatcaggcggccggcgcatggcgtgtctggccaaatcttcccgacagattttatcatgtgggcaacctgctgcaactggttctgcctggatggacagcctgaggaggtcccaccaccccagggagccaggatgcaggcctattccaaccctgggtacagctccttccgttccacctacctcacccaacctcccctcttcatctgcacaagccacctctgttcccccagcccaggttcaggagaatcagcagggccaatggccatgtgtctcaggatcaagaggaacccgtctacctggagagcgtggccagagtacctgctgaggatgagacccagtctattgactcagaggacagctttgtcccaggccgaagggcctctctgtctgacctgactgacctggaggacattgaaggcctgacagtgcggcagctgaaagagatcttggctcgcaactttgtcaactacaagggctgctgtgagaagtgggagctgatggagagagtgacccggctatacaaggatcagaaaggactccagcacctggggggagcagtaccatcaggcttggaggagaacctgtgtaagatctgcatggactcacccattgactgtgttcttctggagtgtggccacatggtaacctgtaccaagtgtggcaagcgcatgaatgaatgtcccatctgccggcagtatgtaatccgagctgtgcatgtcttccggtcctgagagcttgcatcggtttcttcagtgccttacagggaaatagcctggggtgtctgggctcagggttggccagcttgcagaggagcaagctagtagaaatattgcagggttcccaaaaccaggtcaagcaagatgccatgtcacccctgagcatgcctgtcttcccaggggtgtacctcttggctggcaaagcccaaggccagtgggaacttgtagtgttcttcaagagtggagacaatgctgtggaacaaagcaggctttcacaaaatgttttcaaacaaaccgtttgtctacagcactggacagcagtgaatgtatacacagggaaaataaaggggatgaggcccttttgtttctgaaacatttccccctccgggtaccga

SEQ ID NO: 313735 - DNA, 1607 bp, Homo sapiens
ctggaacccggaagcggcagcgcggcgcgacccggcgggcgggctctgggcgcgggaatcccggcggatcccgggcgggcggatgacccccagccctacccttggtgccgcctcctcctctctcctttctcctccggcagccagcgcgcctgtgtcctctctaggaaggggtaggggaggggcgtctggagaggaccccccgcgaatgcccacgtgacgtgcagtccccctggggctgttccggcctgcggggaacatgggcgtgctcagggtcggactgtgccctggccttaccgaggagatgatccagcttctcaggagccacaggatcaagacagtggtggacctggtttctgcagacctggaagaggtagctcagaaatgtggcttgtcttacaaggccctggttgccctgaggcgggtgctgctggctcagttctcggctttccccgtgaatggcgctgatctctacgaggaactgaagacctccactgccatcctgtccactggcattggcagacatggagggcgcactcaagtgggaacctgggaggactgcagctgcctcaggtccccgcagggagatcgtggagtggggtcaggaatgctctgaagaaggcaggacttgggcatggaggaacagatggactttcgctgaatgctttcgatgaacgaggcactgcggtcagcacttcacgtcttgataaactgcttgatgctggtctctatactggagaagtgactgaaattgtaggaggcccaggtagcggcaaaactcaggtatgtctctgtatggcagcaaatgtggcccatggcctgcagcaaaacgtcctatatgtagattccaatggagggctgacagcttcccgcctcctccagctgcttcaggctaaaacccaggatgaggaggaacaggcagaagctctccggaggatccaggtggtgcatgcatttgacatcttccagatgctggatgtgctgcaggagctccgaggcactgtggcccagcaggtgactggttcttcaggaactgtgaaggtggtggttgtggactcggtcactgcggtggtttccccacttctgggaggtcagcagagggaaggcttggccttgatgatgcagctggcccgagagctgaagaccctggcccgggaccttggcatggcagtggtggtgaccaaccacataactcgagacagggacagcgggaggctcaaacctgccctcggacgctcctggagctttgtgcccagcactcggattctcctggacaccatcgagggagcaggagcatcaggcggccggcgcatggcgtgtctggccaaatcttcccgacagccaacaggtttccaggagatggtagacattgggacctgggggacctcagagcagagtgccacattacagggtgatcagacatgacctgtgctgttgtttgggaaacagggaagcattggggacccctcccaacttttcttcccagtaacgcctgctgtttactgccacctggcactggtgactacagacgttctcaggctggccagaagagacatcttgggttccttggcctcactctctgtaagcatataaaccacaggcgaaagagg

SEQ ID NO: 313736 - DNA, 496 bp, Homo sapiens
atgtgggcaacctgctgcaactggttctgcctggatggacagcctgaggaggtcccaccaccccagggagccaggatgcaggcctattccaaccctgggtacagctccttcccttccccaacaggcttggaaccaagctgcaagtcctgtggggctcactttgcaaacacggccaggaaggtgagtgctgacttcttggcctgctctgccactgcagcctatggaccatgggcaagcgccactgacccctctgaatgcctgcaacctttcctttccctgtgtgatgctggtgacccagagctgtccctttcacaaaaatgttcaagaagaactaactgagtaaaagcaaaagcaaagcatgtcagcatagatttggagtcagtagacctaaattcagttatcagcgttgctacctactagctatatgatctaacctctcttgagattcagtttccctgttataaaatggggatgattgtagtcctcatctttcagg

SEQ ID NO: 313737 - DNA, 1101 bp, Homo sapiens
  misc_feature (881)..(881): n is a, c, g, or t
acaccaccacacaccacacgactatcaccaccgcaactaacggtaggtagcgaggctgggtggtggcaaagtgagcagtagccaacatgtcagggtgggagtcatattacaaaaccgagggcgatgaagaagcagaggaagaacaagaagagaaccttgaagcaagtggagactataaatattcaggaagagatagtttgatttttttggttgatgcctccaaggctatgtttgaatctcagagtgaagatgagttgacaccttttgacatgagcatccagtgtatccaaagtgtgtacatcagtaagatcataagcagtgatcgagatctcttggctgtggtgttctatggtaccgagaaagacaaaaattcagtgaattttaaaaatatttacgtcttacaggagctggataatccaggtgcaaaacgaattctagagcttgaccagtttaaggggcagcagggacaaaaacgtttccaagacatgatgggccacggatctgactactcactcagtgaagtgctgtgggtctgtgccaacctctttagtgatgtccaattcaagatgagtcataagaggatcatgctgttcaccaatgaagacaacccccatggcaatgacagtgccaaagccagccgggccaggaccaaagccggtgatctccgagatacaggcatcttccttgacttgatgcacctgaagaaacctgggggctttgacatatccttgttctacagagatatcatcagcatagcagaggatgaggacctcagggttcactttgaggaatccagcaagctagaagacctgttgcggaaggttcgcgccaaggagaccaggaagcgagcactcagcagtaagctgaagcaacaagaattnggggctctggcgggcttatcacgcctgggccccaaagggtcctcaggacctcctccaaataagcgctcatcgcgaaccaatgagcccgggagaacagaaccgggcacttaaacacgaacaggcggaggagactgccacacaaacccacagggcgaacatcagggagcgcagcaaatcgcggagcactgcacaagaacacagggcgttcatcgccggacag

SEQ ID NO: 313738 - DNA, 911 bp, Homo sapiens
  misc_feature (797)..(797): n is a, c, g, or t
  misc_feature (811)..(811): n is a, c, g, or t
gacaccacacatcgaggcacaagtttgtactagtacgaggcgggtgtgtaatcggacgagggcgcttccctgcgcaaagtgagcagtagccaacatgtcagggtgggagtcatattacaaaaccgagggcgatgaagaagcagaggaagaacaagaagagaaccttgaagcaagtggagactataaatattcaggaagagatagtttgatttttttggttgatgcctccaaggctatgtttgaatctcagagtgaagatgagttgacaccttttgacatgagcatccagtgtatccaaagtgtgtacatcagtaagatcataagcagtgatcgagatctcttggctgtggtgttctatggtaccgagaaagacaaaaattcagtgaattttaaaaatatttacgtcttacaggagctggataatccaggtgcaaaacgaattctagagcttgaccagtttaaggggcagcagggacaaaaacgtttccaagacatgatgggccacggatctgactactcactcagtgaagtgctgtgggtctgtgccaacctctttagtgatgtccaattcaagatgagtcataagaggatcatgctgttcaccaatgaagacaacccccatggcaatgacagtgccaaagccagccgggccaggaccaaagccggtgatctccgagatacaggcatcttccttgacttgatgcacctgaagaaacctgggggctttgacatatccttgttctacagagatatcatcagcatagcagaggatgaggacctcagggtccttgggatcnaagtaaactgtggnaggtccccgagaccagaagacctgagtagggagcaagaatgactgggtaacgcaaagcacccaaattggaataggaaccgtaagagttccaaagaaggat

SEQ ID NO: 313739 - DNA, 1442 bp, Homo sapiens
gccctcccaaagtgctggggatgacagatgtgagccactgtgcctggccagttgtcttgactttaatattaccacgaatggtgattatttgaaaagttgtctgaagtcattatagcagttggtttccttagtcactttttctaagtcctgaaaatgttaatagtctagttttcagggagcttttaaaagcatgtttcagttttaactgaaagaacttctcacttgctgaaaattgttttttcctccctcacttttgtttacccttgcaacagcatcttccttgacttgatgcacctgaagaaacctgggggctttgacatatccttgttctacagagatatcatcagcatagcagaggatgaggacctcagggttcactttgaggaatccagcaagctagaagacctgttgcggaaggttcgcgccaaggagaccaggaagcgagcactcagcagggtgtgcactcagcccgggtcagctgcctacactgcccttaaatcagaagcaggctgggcgcggtggctcacacctgtaatcccaacagtttgggaggccaaggcaggcggattgcttgagcctaggagttgagaccagcttgggcaacatggcaagaccctctctctacctaaaaaaaaaaaaaaaaaaatcagaagcaatgcactgctacacattgcttaacaaaccagaagcaatacattgctctgacctgactggctacttaactcgactatgccactgcctcactgtcttcctctaaaatagtttatttcaggatagcagaagctatttgctgctttatctctggcaagagctggcatgatatttctctaaagtaacacagccctccatttcgtgggggtagacagttatggtctaagagtatccttagctgtactcactagtacagtcatgtgttaattaatgatagggataccttcttagaattgcgtcattaggcgattttgtcattgtgcaaacatagagggtacttcacacacccagagagtacagcttgactacacacctgggctgtgtggttagcctgttgctcttaggctacaaacctgtatagcatattaccatactgtttactgtaggcaatggtaagtatttgtgtatctaaatgtatctaaaggtatagaaaaggtacaataaaaatatgatataggccagacacggtggctcacgccttgtaatcccaccactttgggatgccgaggcgggtggatcacaagttcaagagattgagaccatcctggcctacatggtgaaaccttgttctctactaaagatacaaaaattagctggacgtgatggcgcgcgcctgtagtcccagctactcaggaggctgagaatcgcttgaacccaggagtcagaggtggcagtgagccaagatcatgccactgcactccagcctggtgacaaagtgagactccgcctca

SEQ ID NO: 313740 - DNA, 332 bp, Homo sapiens
tgtcggcctatctgtgggtcggctatctgtgtcggcctatctgtaggaaacagaagagctaaaacggtttgatgatccaggtttgatgctcatgggtttcaagccgttggtactgctgaagaaacaccattacctgaggccctccctgttcgtgtacccagaggagtcgctggtgattgggagctcaaccctgttcagtgctctgctcatcaagtgtctggagaaggaggttgcagcattgtgcagatacacaccccgtggagtacaacctgccggtggagtacaacctgccggtggagtacaacctgccggtggagtacaacctgccggtg

SEQ ID NO: 313741 - DNA, 758 bp, Homo sapiens
gagtaaagggcatcttccttttatcatcagcaaagggtaaaaatttactgaaaaaatcatggcaactccagagcaggtgggcaagatgaaggctatcgttgagaagcttcgcttcacatacagaagtgacagctttgagaaccccgtgctgcagcagcacttcaggaacctggaggccttggccttggatttgatggagccggaacaagcagtggacctgacattgcccaaggttgaagcaatgaataaaagactgggctccttggtggatgagtttaaggagcttgtttacccaccagattacaatcctgaagggaaagttaccaagagaaaacacgataatgaaggttctggaagcaaaaggcccaaggtggagtattcagaagaggagctgaagacccacatcagcaagggtacgctgggcaagttcactgtgcccatgctgaaagaggcctgccgggcttacgggctgaagagtgggctgaagaagcaggagctgctggaagccctcaccaagcacttccaggactgaccagaggccgcgcgtccagctgcccttccgcagtgtggccaggctgcctggccttgtcctcagccagttaaaatgtgtttctcctgagctaggaagagtctacccgacataagtcgagggactttatgtttttgaggctttctgttgccatggtgatggtgtagccctcccactttgctgttccttactttactgcctgaataaagagccctaagtttgtactata

SEQ ID NO: 313742 - DNA, 899 bp, Homo sapiens
ggaggattgcctgagctcagaagttttagatcagcctgggcagtgtagcacaataccatctctacagtaaacttaaaaaattagctggtcatggtggcacacacctgtagtcccagttgctcaggaggctgagtcaggatgatggcttgagcccaggagttcgaggttgcagtgagctatcatcgcgtcactgcactccagcctgggtgatgggagtgtgaccctatctcagaaaaaaaagtcaggatattgacttttttggggaggtgggtgttgtaattgggagggaatgtaagagggatttctggggtgtctggcaagactcaatttcctgacataggtggagattttatggttgttcaccttataataatttattaggttatactttcctttatggcctttatttatcttatatggtaaacaaatacgaaaacaaggacaaacattttcttccatttttttccccataggagactataaatattcaggaagagatagtttgatttttttggttgatgcctccaaggctatgtttgaatctcagagtgaagatgagttgacaccttttgacatgagcatccagtgtatccaaagtgtgtacatcagtaagatcataagcagtgatcgagatctcttggctgtggtgttctatggtaccgagaaagacaaaaattcagtgaattttaaaaatatttacgtcttacaggagctggataatccagcttgtcctcagccagttaaaatgtgtttctcctgagctaggaagagtctacccgacataagtcgagggactttatgtttttgaggctttctgttgccatggtgatggtgtagccctcccactttgctgttccttactttactgcctgaataaagagccctaagtttgtactata

SEQ ID NO: 313743 - DNA, 2743 bp, Homo sapiens
aattaggctaggtacgaggctgggtgtggtaagcgggccgttatccatttgtgttgttcgccagctaggcctggcctcgtcccgcttcgctcggtcggtctcgcgcgcccccatagccttgctagagggttagcgttagccttaagtgtgcgaatccgaggagcagcgacagactcgagaccacgctccttcctcgggaaggaggcggcacctcgcgtttgaggcccgcctgcgtttgaggcccgcctgcgcttgcggcccgcctgcgcttgaggcctgtctgcgtttgagatctcattgggcgtgattgaggaatttggggaggtttttgggcggtattgaggacgagggggtccgttagtcagcatagaatcctggagcgggaatccctcaccgtctaaatggcgtcgggggcgggacctccgggatctggcttccgcgggccgccgccggccctgaaacgtgagggatagctgagatgaggcagctactgggatggcccccatgcgcatttacatgcagtccgactgccgagctttcgaggcagcaggatttaccgtccacattcctcactactaaccaagcttttagaacagatctcacaagaacctagaggtcggtattttttcgatttaaatttgcctgttactgacgttaacgtctttcgcctagtgagcagtagccaacatgtcagggtgggagtcatattacaaaaccgagggcgatgaagaagcagaggaagaacaagaagagaaccttgaagcaagtggagactataaatattcaggaagagatagtttgatttttttggttgatgcctccaaggctatgtttgaatctcagagtgaagatgagttgacaccttttgacatgagcatccagtgtatccaaagtgtgtacatcagtaagatcataagcagtgatcgagatctcttggctgtggtgttctatggtaccgagaaagacaaaaattcagtgaattttaaaaatatttacgtcttacaggagctggataatccaggtgcaaaacgaattctagagcttgaccagtttaaggggcagcagggacaaaaacgtttccaagacatgatgggccacggatctgactactcactcagtgaagtgctgtgggtctgtgccaacctctttagtgatgtccaattcaagatgagtcataagaggatcatgctgttcaccaatgaagacaacccccatggcaatgacagtgccaaagccagccgggccaggaccaaagccggtgatctccgagatacaggcatcttccttgacttgatgcacctgaagaaacctgggggctttgacatatccttgttctacagagatatcatcagcatagcagaggatgaggacctcagggttcactttgaggaatccagcaagctagaagacctgttgcggaaggttcgcgccaaggagaccaggaagcgagcactcagcaggttaaagctgaagctcaacaaagatatagtgatctctgtgggcatttataatctggtccagaaggctctcaagcctcctccaataaagctctatcgggaaacaaatgaaccagtgaaaaccaagacccggacctttaatacaagtacaggcggtttgcttctgcctagcgataccaagaggtctcagatctatgggagtcgtcagattatactggagaaagaggaaacagaagagctaaaacggtttgatgatccaggtttgatgctcatgggtttcaagccgttggtactgctgaagaaacaccattacctgaggccctccctgttcgtgtacccagaggagtcgctggtgattgggagctcaaccctgttcagtgctctgctcatcaagtgtctggagaaggaggttgcagcattgtgcagatacacaccccgcaggaacatccctccttattttgtggctttggtgccacaggaagaagagttggatgaccagaaaattcaggtgactcctccaggcttccagctggtctttttaccctttgctgatgataaaaggaagatgccctttactgaaaaaatcatggcaactccagagcaggtgggcaagatgaaggctatcgttgagaagcttcgcttcacatacagaagtgacagctttgagaaccccgtgctgcagcagcacttcaggaacctggaggccttggccttggatttgatggagccggaacaagcagtggacctgacattgcccaaggttgaagcaatgaataaaagactgggctccttggtggatgagtttaaggagcttgtttacccaccagattacaatcctgaagggaaagttaccaagagaaaacacgataatgaaggttctggaagcaaaaggcccaaggtggagtattcagaagaggagctgaagacccacatcagcaagggtacgctgggcaagttcactgtgcccatgctgaaagaggcctgccgggcttacgggctgaagagtgggctgaagaagcaggagctgctggaagccctcaccaagcacttccaggactgaccagaggccgcgcgtccagctgcccttccgcagtgtggccaggctgcctggccttgtcctcagccagttaaaatgtgtttctcctgagctaggaagagtctacccgacataagtcgagggactttatgtttttgaggctttctgttgccatggtgatggtgtagccctcccactttgctgttccttactttactgcctgaataaagagccctaagtttgtactata

SEQ ID NO: 313744 - DNA, 2123 bp, Homo sapiens
aattaggctaggtacgaggctgggtgtggttggtcgcttccctgcgccaaagtgagcagtagccaacatgtcagggtgggagtcatattacaaaaccgagggcgatgaagaagcagaggaagaacaagaagagaaccttgaagcaagtggagactataaatattcaggaagagatagtttgatttttttggttgatgcctccaaggctatgtttgaatctcagagtgaagatgagttgacaccttttgacatgagcatccagtgtatccaaagtgtgtacatcagtaagatcataagcagtgatcgagatctcttggctgtggtgttctatggtaccgagaaagacaaaaattcagtgaattttaaaaatatttacgtcttacaggagctggataatccaggtgcaaaacgaattctagagcttgaccagtttaaggggcagcagggacaaaaacgtttccaagacatgatgggccacggatctgactactcactcagtgaagtgctgtgggtctgtgccaacctctttagtgatgtccaattcaagatgagtcataagaggatcatgctgttcaccaatgaagacaacccccatggcaatgacagtgccaaagccagccgggccaggaccaaagccggtgatctccgagatacaggcatcttccttgacttgatgcacctgaagaaacctgggggctttgacatatccttgttctacagagatatcatcagcatagcagaggatgaggacctcagggttcactttgaggaatccagcaagctagaagacctgttgcggaaggttcgcgccaaggagaccaggaagcgagcactcagcaggttaaagctgaagctcaacaaagatatagtgatctctgtgggcatttataatctggtccagaaggctctcaagcctcctccaataaagctctatcgggaaacaaatgaaccagtgaaaaccaagacccggacctttaatacaagtacaggcggtttgcttctgcctagcgataccaagaggtctcagatctatgggagtcgtcagattatactggagaaagaggaaacagaagagctaaaacggtttgatgatccaggtttgatgctcatgggtttcaagccgttggtactgctgaagaaacaccattacctgaggccctccctgttcgtgtacccagaggagtcgctggtgattgggagctcaaccctgttcagtgctctgctcatcaagtgtctggagaaggaggttgcagcattgtgcagatacacaccccgcaggaacatccctccttattttgtggctttggtgccacaggaagaagagttggatgaccagaaaattcaggtgactcctccaggcttccagctggtctttttaccctttgctgatgataaaaggaagatgccctttactgaaaaaatcatggcaactccagagcaggtgggcaagatgaaggctatcgttgagaagcttcgcttcacatacagaagtgacagctttgagaaccccgtgctgcagcagcacttcaggaacctggaggccttggccttggatttgatggagccggaacaagcagtggacctgacattgcccaaggttgaagcaatgaataaaagactgggctccttggtggatgagtttaaggagcttgtttacccaccagattacaatcctgaagggaaagttaccaagagaaaacacgataatgaaggttctggaagcaaaaggcccaaggtggagtattcagaagaggagctgaagacccacatcagcaagggtacgctgggcaagttcactgtgcccatgctgaaagaggcctgccgggcttacgggctgaagagtgggctgaagaagcaggagctgctggaagccctcaccaagcacttccaggactgaccagaggccgcgcgtccagctgcccttccgcagtgtggccaggctgcctggccttgtcctcagccagttaaaatgtgtttctcctgagctaggaagagtctacccgacataagtcgagggactttatgtttttgaggctttctgttgccatggtgatggtgtagccctcccactttgctgttccttactttactgcctgaataaagagccctaagtttgtactata

SEQ ID NO: 313745 - DNA, 2265 bp, Homo sapiens
gggaaggagatggcttcgtgaacagcagcacaggcggtggagacttcactgcttgaaacttcagcctctctcccctgtgtccaagtgacattgagatttcaagaggacaaactccaaaagctgtggatgtccttgccaaggagatttcatctgcaagcaatccaatccaagttggtcgcttccctgcgccaaagtgagcagtagccaacatgtcagggtgggagtcatattacaaaaccgagggcgatgaagaagcagaggaagaacaagaagagaaccttgaagcaagtggagactataaatattcaggaagagatagtttgatttttttggttgatgcctccaaggctatgtttgaatctcagagtgaagatgagttgacaccttttgacatgagcatccagtgtatccaaagtgtgtacatcagtaagatcataagcagtgatcgagatctcttggctgtggtgttctatggtaccgagaaagacaaaaattcagtgaattttaaaaatatttacgtcttacaggagctggataatccaggtgcaaaacgaattctagagcttgaccagtttaaggggcagcagggacaaaaacgtttccaagacatgatgggccacggatctgactactcactcagtgaagtgctgtgggtctgtgccaacctctttagtgatgtccaattcaagatgagtcataagaggatcatgctgttcaccaatgaagacaacccccatggcaatgacagtgccaaagccagccgggccaggaccaaagccggtgatctccgagatacaggcatcttccttgacttgatgcacctgaagaaacctgggggctttgacatatccttgttctacagagatatcatcagcatagcagaggatgaggacctcagggttcactttgaggaatccagcaagctagaagacctgttgcggaaggttcgcgccaaggagaccaggaagcgagcactcagcaggttaaagctgaagctcaacaaagatatagtgatctctgtgggcatttataatctggtccagaaggctctcaagcctcctccaataaagctctatcgggaaacaaatgaaccagtgaaaaccaagacccggacctttaatacaagtacaggcggtttgcttctgcctagcgataccaagaggtctcagatctatgggagtcgtcagattatactggagaaagaggaaacagaagagctaaaacggtttgatgatccaggtttgatgctcatgggtttcaagccgttggtactgctgaagaaacaccattacctgaggccctccctgttcgtgtacccagaggagtcgctggtgattgggagctcaaccctgttcagtgctctgctcatcaagtgtctggagaaggaggttgcagcattgtgcagatacacaccccgcaggaacatccctccttattttgtggctttggtgccacaggaagaagagttggatgaccagaaaattcaggtgactcctccaggcttccagctggtctttttaccctttgctgatgataaaaggaagatgccctttactgaaaaaatcatggcaactccagagcaggtgggcaagatgaaggctatcgttgagaagcttcgcttcacatacagaagtgacagctttgagaaccccgtgctgcagcagcacttcaggaacctggaggccttggccttggatttgatggagccggaacaagcagtggacctgacattgcccaaggttgaagcaatgaataaaagactgggctccttggtggatgagtttaaggagcttgtttacccaccagattacaatcctgaagggaaagttaccaagagaaaacacgataatgaaggttctggaagcaaaaggcccaaggtggagtattcagaagaggagctgaagacccacatcagcaagggtacgctgggcaagttcactgtgcccatgctgaaagaggcctgccgggcttacgggctgaagagtgggctgaagaagcaggagctgctggaagccctcaccaagcacttccaggactgaccagaggccgcgcgtccagctgcccttccgcagtgtggccaggctgcctggccttgtcctcagccagttaaaatgtgtttctcctgagctaggaagagtctacccgacataagtcgagggactttatgtttttgaggctttctgttgccatggtgatggtgtagccctcccactttgctgttccttactttactgcctgaataaagagccctaagtttgtactata

SEQ ID NO: 313746 - DNA, 2164 bp, Homo sapiens
aattaggctaggtacgaggctgggtgtggtaagcgggccgttatccatttgtgttgttcgccagctaggcctggcctcgtcccgcttcgctcgtgagcagtagccaacatgtcagggtgggagtcatattacaaaaccgagggcgatgaagaagcagaggaagaacaagaagagaaccttgaagcaagtggagactataaatattcaggaagagatagtttgatttttttggttgatgcctccaaggctatgtttgaatctcagagtgaagatgagttgacaccttttgacatgagcatccagtgtatccaaagtgtgtacatcagtaagatcataagcagtgatcgagatctcttggctgtggtgttctatggtaccgagaaagacaaaaattcagtgaattttaaaaatatttacgtcttacaggagctggataatccaggtgcaaaacgaattctagagcttgaccagtttaaggggcagcagggacaaaaacgtttccaagacatgatgggccacggatctgactactcactcagtgaagtgctgtgggtctgtgccaacctctttagtgatgtccaattcaagatgagtcataagaggatcatgctgttcaccaatgaagacaacccccatggcaatgacagtgccaaagccagccgggccaggaccaaagccggtgatctccgagatacaggcatcttccttgacttgatgcacctgaagaaacctgggggctttgacatatccttgttctacagagatatcatcagcatagcagaggatgaggacctcagggttcactttgaggaatccagcaagctagaagacctgttgcggaaggttcgcgccaaggagaccaggaagcgagcactcagcaggttaaagctgaagctcaacaaagatatagtgatctctgtgggcatttataatctggtccagaaggctctcaagcctcctccaataaagctctatcgggaaacaaatgaaccagtgaaaaccaagacccggacctttaatacaagtacaggcggtttgcttctgcctagcgataccaagaggtctcagatctatgggagtcgtcagattatactggagaaagaggaaacagaagagctaaaacggtttgatgatccaggtttgatgctcatgggtttcaagccgttggtactgctgaagaaacaccattacctgaggccctccctgttcgtgtacccagaggagtcgctggtgattgggagctcaaccctgttcagtgctctgctcatcaagtgtctggagaaggaggttgcagcattgtgcagatacacaccccgcaggaacatccctccttattttgtggctttggtgccacaggaagaagagttggatgaccagaaaattcaggtgactcctccaggcttccagctggtctttttaccctttgctgatgataaaaggaagatgccctttactgaaaaaatcatggcaactccagagcaggtgggcaagatgaaggctatcgttgagaagcttcgcttcacatacagaagtgacagctttgagaaccccgtgctgcagcagcacttcaggaacctggaggccttggccttggatttgatggagccggaacaagcagtggacctgacattgcccaaggttgaagcaatgaataaaagactgggctccttggtggatgagtttaaggagcttgtttacccaccagattacaatcctgaagggaaagttaccaagagaaaacacgataatgaaggttctggaagcaaaaggcccaaggtggagtattcagaagaggagctgaagacccacatcagcaagggtacgctgggcaagttcactgtgcccatgctgaaagaggcctgccgggcttacgggctgaagagtgggctgaagaagcaggagctgctggaagccctcaccaagcacttccaggactgaccagaggccgcgcgtccagctgcccttccgcagtgtggccaggctgcctggccttgtcctcagccagttaaaatgtgtttctcctgagctaggaagagtctacccgacataagtcgagggactttatgtttttgaggctttctgttgccatggtgatggtgtagccctcccactttgctgttccttactttactgcctgaataaagagccctaagtttgtactata

SEQ ID NO: 313747 - DNA, 2345 bp, Homo sapiens
aattaggctaggtacgaggctgggtgtggtaagcgggccgttatccatttgtgttgttcgccagctaggcctggcctcgtcccgcttcgctcggtcggtctcgcgcgcccccatagccttgctagagggttagcgttagccttaagtgtgcgaatccgaggagcagcgacagactcgagaccacgctccttcctcgggaaggaggcggcacctcgcgtttgaggcccgcctgcgtttgaggcccgcctgcgcttgcggcccgcctgcgcttgagtgagcagtagccaacatgtcagggtgggagtcatattacaaaaccgagggcgatgaagaagcagaggaagaacaagaagagaaccttgaagcaagtggagactataaatattcaggaagagatagtttgatttttttggttgatgcctccaaggctatgtttgaatctcagagtgaagatgagttgacaccttttgacatgagcatccagtgtatccaaagtgtgtacatcagtaagatcataagcagtgatcgagatctcttggctgtggtgttctatggtaccgagaaagacaaaaattcagtgaattttaaaaatatttacgtcttacaggagctggataatccaggtgcaaaacgaattctagagcttgaccagtttaaggggcagcagggacaaaaacgtttccaagacatgatgggccacggatctgactactcactcagtgaagtgctgtgggtctgtgccaacctctttagtgatgtccaattcaagatgagtcataagaggatcatgctgttcaccaatgaagacaacccccatggcaatgacagtgccaaagccagccgggccaggaccaaagccggtgatctccgagatacaggcatcttccttgacttgatgcacctgaagaaacctgggggctttgacatatccttgttctacagagatatcatcagcatagcagaggatgaggacctcagggttcactttgaggaatccagcaagctagaagacctgttgcggaaggttcgcgccaaggagaccaggaagcgagcactcagcaggttaaagctgaagctcaacaaagatatagtgatctctgtgggcatttataatctggtccagaaggctctcaagcctcctccaataaagctctatcgggaaacaaatgaaccagtgaaaaccaagacccggacctttaatacaagtacaggcggtttgcttctgcctagcgataccaagaggtctcagatctatgggagtcgtcagattatactggagaaagaggaaacagaagagctaaaacggtttgatgatccaggtttgatgctcatgggtttcaagccgttggtactgctgaagaaacaccattacctgaggccctccctgttcgtgtacccagaggagtcgctggtgattgggagctcaaccctgttcagtgctctgctcatcaagtgtctggagaaggaggttgcagcattgtgcagatacacaccccgcaggaacatccctccttattttgtggctttggtgccacaggaagaagagttggatgaccagaaaattcaggtgactcctccaggcttccagctggtctttttaccctttgctgatgataaaaggaagatgccctttactgaaaaaatcatggcaactccagagcaggtgggcaagatgaaggctatcgttgagaagcttcgcttcacatacagaagtgacagctttgagaaccccgtgctgcagcagcacttcaggaacctggaggccttggccttggatttgatggagccggaacaagcagtggacctgacattgcccaaggttgaagcaatgaataaaagactgggctccttggtggatgagtttaaggagcttgtttacccaccagattacaatcctgaagggaaagttaccaagagaaaacacgataatgaaggttctggaagcaaaaggcccaaggtggagtattcagaagaggagctgaagacccacatcagcaagggtacgctgggcaagttcactgtgcccatgctgaaagaggcctgccgggcttacgggctgaagagtgggctgaagaagcaggagctgctggaagccctcaccaagcacttccaggactgaccagaggccgcgcgtccagctgcccttccgcagtgtggccaggctgcctggccttgtcctcagccagttaaaatgtgtttctcctgagctaggaagagtctacccgacataagtcgagggactttatgtttttgaggctttctgttgccatggtgatggtgtagccctcccactttgctgttccttactttactgcctgaataaagagccctaagtttgtactata

SEQ ID NO: 313748 - DNA, 2142 bp, Homo sapiens
acaccaccacacaccacacgactatcaccaccgcaactaacggtaggtagcgaggctgggtggtggcaaagtgagcagtagccaacatgtcagggtgggagtcatattacaaaaccgagggcgatgaagaagcagaggaagaacaagaagagaaccttgaagcaagtggagactataaatattcaggaagagatagtttgatttttttggttgatgcctccaaggctatgtttgaatctcagagtgaagatgagttgacaccttttgacatgagcatccagtgtatccaaagtgtgtacatcagtaagatcataagcagtgatcgagatctcttggctgtggtgttctatggtaccgagaaagacaaaaattcagtgaattttaaaaatatttacgtcttacaggagctggataatccaggtgcaaaacgaattctagagcttgaccagtttaaggggcagcagggacaaaaacgtttccaagacatgatgggccacggatctgactactcactcagtgaagtgctgtgggtctgtgccaacctctttagtgatgtccaattcaagatgagtcataagaggatcatgctgttcaccaatgaagacaacccccatggcaatgacagtgccaaagccagccgggccaggaccaaagccggtgatctccgagatacaggcatcttccttgacttgatgcacctgaagaaacctgggggctttgacatatccttgttctacagagatatcatcagcatagcagaggatgaggacctcagggttcactttgaggaatccagcaagctagaagacctgttgcggaaggttcgcgccaaggagaccaggaagcgagcactcagcaggttaaagctgaagctcaacaaagatatagtgatctctgtgggcatttataatctggtccagaaggctctcaagcctcctccaataaagctctatcgggaaacaaatgaaccagtgaaaaccaagacccggacctttaatacaagtacaggcggtttgcttctgcctagcgataccaagaggtctcagatctatgggagtcgtcagattatactggagaaagaggaaacagaagagctaaaacggtttgatgatccaggtttgatgctcatgggtttcaagccgttggtactgctgaagaaacaccattacctgaggccctccctgttcgtgtacccagaggagtcgctggtgattgggagctcaaccctgttcagtgctctgctcatcaagtgtctggagaaggaggttgcagcattgtgcagatacacaccccgcaggaacatccctccttattttgtggctttggtgccacaggaagaagagttggatgaccagaaaattcaggtgactcctccaggcttccagctggtctttttaccctttgctgatgataaaaggaagatgccctttactgaaaaaatcatggcaactccagagcaggtgggcaagatgaaggctatcgttgagaagcttcgcttcacatacagaagtgacagctttgagaaccccgtgctgcagcagcacttcaggaacctggaggccttggccttggatttgatggagccggaacaagcagtggacctgacattgcccaaggttgaagcaatgaataaaagactgggctccttggtggatgagtttaaggagcttgtttacccaccagattacaatcctgaagggaaagttaccaagagaaaacacgataatgaaggttctggaagcaaaaggcccaaggtggagtattcagaagaggagctgaagacccacatcagcaagggtacgctgggcaagttcactgtgcccatgctgaaagaggcctgccgggcttacgggctgaagagtgggctgaagaagcaggagctgctggaagccctcaccaagcacttccaggactgaccagaggccgcgcgtccagctgcccttccgcagtgtggccaggctgcctggccttgtcctcagccagttaaaatgtgtttctcctgagctaggaagagtctacccgacataagtcgagggactttatgtttttgaggctttctgttgccatggtgatggtgtagccctcccactttgctgttccttactttactgcctgaataaagagccctaagtttgtactata

SEQ ID NO: 313749 - DNA, 2107 bp, Homo sapiens
  misc_feature (27)..(27): n is a, c, g, or t
ttggctggtacgaggctgggttgaatnggccgaggatgagcagtagccaacatgtcagggtgggagtcatattacaaaaccgagggcgatgaagaagcagaggaagaacaagaagagaaccttgaagcaagtggagactataaatattcaggaagagatagtttgatttttttggttgatgcctccaaggctatgtttgaatctcagagtgaagatgagttgacaccttttgacatgagcatccagtgtatccaaagtgtgtacatcagtaagatcataagcagtgatcgagatctcttggctgtggtgttctatggtaccgagaaagacaaaaattcagtgaattttaaaaatatttacgtcttacaggagctggataatccaggtgcaaaacgaattctagagcttgaccagtttaaggggcagcagggacaaaaacgtttccaagacatgatgggccacggatctgactactcactcagtgaagtgctgtgggtctgtgccaacctctttagtgatgtccaattcaagatgagtcataagaggatcatgctgttcaccaatgaagacaacccccatggcaatgacagtgccaaagccagccgggccaggaccaaagccggtgatctccgagatacaggcatcttccttgacttgatgcacctgaagaaacctgggggctttgacatatccttgttctacagagatatcatcagcatagcagaggatgaggacctcagggttcactttgaggaatccagcaagctagaagacctgttgcggaaggttcgcgccaaggagaccaggaagcgagcactcagcaggttaaagctgaagctcaacaaagatatagtgatctctgtgggcatttataatctggtccagaaggctctcaagcctcctccaataaagctctatcgggaaacaaatgaaccagtgaaaaccaagacccggacctttaatacaagtacaggcggtttgcttctgcctagcgataccaagaggtctcagatctatgggagtcgtcagattatactggagaaagaggaaacagaagagctaaaacggtttgatgatccaggtttgatgctcatgggtttcaagccgttggtactgctgaagaaacaccattacctgaggccctccctgttcgtgtacccagaggagtcgctggtgattgggagctcaaccctgttcagtgctctgctcatcaagtgtctggagaaggaggttgcagcattgtgcagatacacaccccgcaggaacatccctccttattttgtggctttggtgccacaggaagaagagttggatgaccagaaaattcaggtgactcctccaggcttccagctggtctttttaccctttgctgatgataaaaggaagatgccctttactgaaaaaatcatggcaactccagagcaggtgggcaagatgaaggctatcgttgagaagcttcgcttcacatacagaagtgacagctttgagaaccccgtgctgcagcagcacttcaggaacctggaggccttggccttggatttgatggagccggaacaagcagtggacctgacattgcccaaggttgaagcaatgaataaaagactgggctccttggtggatgagtttaaggagcttgtttacccaccagattacaatcctgaagggaaagttaccaagagaaaacacgataatgaaggttctggaagcaaaaggcccaaggtggagtattcagaagaggagctgaagacccacatcagcaagggtacgctgggcaagttcactgtgcccatgctgaaagaggcctgccgggcttacgggctgaagagtgggctgaagaagcaggagctgctggaagccctcaccaagcacttccaggactgaccagaggccgcgcgtccagctgcccttccgcagtgtggccaggctgcctggccttgtcctcagccagttaaaatgtgtttctcctgagctaggaagagtctacccgacataagtcgagggactttatgtttttgaggctttctgttgccatggtgatggtgtagccctcccactttgctgttccttactttactgcctgaataaagagccctaagtttgtactata

SEQ ID NO: 313750 - DNA, 3104 bp, Homo sapiens
aattaggctaggtacgaggctgggtgtggtaagcgggccgttatccatttgtgttgttcgccagctaggcctggcctcgtcccgcttcgctcggtcggtctcgcgcgcccccatagccttgctagagggttagcgttagccttaagtgtgcgaatccgaggagcagcgacagactcgagaccacgctccttcctcgggaaggaggcggcacctcgcgtttgaggcccgcctgcgtttgaggcccgcctgcgcttgcggcccgcctgcgcttgaggcctgtctgcgtttgagatctcattgggcgtgattgaggaatttggggaggtttttgggcggtattgaggacgagggggtccgttagtcagcatagaatcctggagcgggaatccctcaccgtctaaatggcgtcgggggcgggacctccgggatctggcttccgcgggccgccgccggccctgaaacgtgagggatagctgagatgaggcagctactgggatggcccccatgcgcatttacatgcagtccgactgccgagctttcgaggcagcaggatttaccgtccacattcctcactactaaccaagcttttagaacagatctcacaagaacctagaggtcggtattttttcgatttaaatttgcctgttactgacgttaacgtctttcgcctagtgagcagtagccaacatgtcagggtgggagtcatattacaaaaccgagggcgatgaagaagcagaggaagaacaagaagagaaccttgaagcaagtggagactataaatattcaggaagagatagtttgatttttttggttgatgcctccaaggctatgtttgaatctcagagtgaagatgagttgacaccttttgacatgagcatccagtgtatccaaagtgtgtacatcagtaagatcataagcagtgatcgagatctcttggctgtggtgttctatggtaccgagaaagacaaaaattcagtgaattttaaaaatatttacgtcttacaggagctggataatccaggtgcaaaacgaattctagagcttgaccagtttaaggggcagcagggacaaaaacgtttccaagacatgatgggccacggatctgactactcactcagtgaagtgctgtgggtctgtgccaacctctttagtgatgtccaattcaagatgagtcataagaggatcatgctgttcaccaatgaagacaacccccatggcaatgacagtgccaaagccagccgggccaggaccaaagccggtgatctccgagatacaggcatcttccttgacttgatgcacctgaagaaacctgggggctttgacatatccttgttctacagagatatcatcagcatagcagaggatgaggacctcagggttcactttgaggaatccagcaagctagaagacctgttgcggaaggttcgcgccaaggagaccaggaagcgagcactcagcaggttaaagctgaagctcaacaaagatatagtgatctctgtgggcatttataatctggtccagaaggctctcaagcctcctccaataaagctctatcgggaaacaaatgaaccagtgaaaaccaagacccggacctttaatacaagtacaggcggtttgcttctgcctagcgataccaagaggtctcagatctatgggagtcgtcagattatactggagaaagaggaaacagaagagctaaaacggtttgatgatccaggtttgatgctcatgggtttcaagccgttggtactgctgaagaaacaccattacctgaggccctccctgttcgtgtacccagaggagtcgctggtgattgggagctcaaccctgttcagtgctctgctcatcaagtgtctggagaaggaggttgcagcattgtgcagatacacaccccgcaggaacatccctccttattttgtggctttggtgccacaggaagaagagttggatgaccagaaaattcaggtgactcctccaggcttccagctggtctttttaccctttgctgatgataaaaggaagatgccctttactgaaaaaatcatggcaactccagagcaggtgggcaagatgaaggctatcgttgagaagcttcgcttcacatacagaagtgacagctttgagaaccccgtgctgcagcagcacttcaggaacctggaggccttggccttggatttgatggagccggaacaagcagtggacctgacattgcccaaggttgaagcaatgaataaaagactgggctccttggtggatgagtttaaggagcttgtttacccaccagattacaatcctgaagggaaagttaccaagagaaaacacgataatgaaggttctggaagcaaaaggcccaaggtggagtattcagaagaggagctgaagacccacatcagcaagggtacgctgggcaagttcactgtgcccatgctgaaagaggcctgccgggcttacgggctgaagagtgggctgaagaagcaggagctgctggaagccctcaccaagcacttccaggactgaccagaggccgcgcgtccagctgcccttccgcagtgtggccaggctgcctggccttgtcctcagccagttaaaatgtgtttctcctgagctaggaagagtctacccgacataagtcgagggactttatgtttttgaggctttctgttgccatggtgatggtgtagccctcccactttgctgttccttactttactgcctgaataaagagccctaagtttgtactataaaaaaaaaaaaacaaacaacaaaagaaaaaaaaaaaaaaaaagaaaaaaaaaaaaaaaaacacaaacacgcaacaccaacaatgaaacagaaaacaaaaggggggggcgcacacgaaaagaacccctggggggggccaaagtactacgcgcgaccggctgttcttggaagagggggcccaataaggagggataataagaagggcaaggcggcgctgtcacacgcaccggcgggacaagcggcgcgggactttgagagagaccaaccggtgggggacatacggcaaccacccacagaattgaacgcccgcaactaactcgggatcgggtacgccgattagcgggaaactgcggtgtagatag

SEQ ID NO: 313751 - DNA, 2689 bp, Homo sapiens
aattaggctaggtacgaggctgggtgtggtaagcgggccgttatccatttgtgttgttcgccagctaggcctggcctcgtcccgcttcgctcggtcggtctcgcgcgcccccatagccttgctagagggttagcgttagccttaagtgtgcgaatccgaggagcagcgacagactcgagaccacgctccttcctcgggaaggaggcggcacctcgcgtttgaggcccgcctgcgtttgaggcccgcctgcgcttgcggcccgcctgcgcttgaggcctgtctgcgtttgagatctcattgggcgtgattgaggaatttggggaggtttttgggcggtattgaggacgagggggtccgttagtcagcatagaatcctggagcgggaatccctcaccgtctaaatggcgtcgggggcgggacctccgggatctggcttccgcgggccgccgccggccctgaaacgtgagggatagctgagatgaggcagctactgggatggcccccatgcgcatttacatgcagtccgactgccgagctttcgaggcagcaggatttaccgtccacattcctcactactaaccaagcttttagaacagatctcacaagaacctagaggtcggtattttttcgatttaaatttgcctgttactgacgttaacgtctttcgcctagtgagcagtagccaacatgtcagggtgggagtcatattacaaaagagactataaatattcaggaagagatagtttgatttttttggttgatgcctccaaggctatgtttgaatctcagagtgaagatgagttgacaccttttgacatgagcatccagtgtatccaaagtgtgtacatcagtaagatcataagcagtgatcgagatctcttggctgtggtgttctatggtaccgagaaagacaaaaattcagtgaattttaaaaatatttacgtcttacaggagctggataatccaggtgcaaaacgaattctagagcttgaccagtttaaggggcagcagggacaaaaacgtttccaagacatgatgggccacggatctgactactcactcagtgaagtgctgtgggtctgtgccaacctctttagtgatgtccaattcaagatgagtcataagaggatcatgctgttcaccaatgaagacaacccccatggcaatgacagtgccaaagccagccgggccaggaccaaagccggtgatctccgagatacaggcatcttccttgacttgatgcacctgaagaaacctgggggctttgacatatccttgttctacagagatatcatcagcatagcagaggatgaggacctcagggttcactttgaggaatccagcaagctagaagacctgttgcggaaggttcgcgccaaggagaccaggaagcgagcactcagcaggttaaagctgaagctcaacaaagatatagtgatctctgtgggcatttataatctggtccagaaggctctcaagcctcctccaataaagctctatcgggaaacaaatgaaccagtgaaaaccaagacccggacctttaatacaagtacaggcggtttgcttctgcctagcgataccaagaggtctcagatctatgggagtcgtcagattatactggagaaagaggaaacagaagagctaaaacggtttgatgatccaggtttgatgctcatgggtttcaagccgttggtactgctgaagaaacaccattacctgaggccctccctgttcgtgtacccagaggagtcgctggtgattgggagctcaaccctgttcagtgctctgctcatcaagtgtctggagaaggaggttgcagcattgtgcagatacacaccccgcaggaacatccctccttattttgtggctttggtgccacaggaagaagagttggatgaccagaaaattcaggtgactcctccaggcttccagctggtctttttaccctttgctgatgataaaaggaagatgccctttactgaaaaaatcatggcaactccagagcaggtgggcaagatgaaggctatcgttgagaagcttcgcttcacatacagaagtgacagctttgagaaccccgtgctgcagcagcacttcaggaacctggaggccttggccttggatttgatggagccggaacaagcagtggacctgacattgcccaaggttgaagcaatgaataaaagactgggctccttggtggatgagtttaaggagcttgtttacccaccagattacaatcctgaagggaaagttaccaagagaaaacacgataatgaaggttctggaagcaaaaggcccaaggtggagtattcagaagaggagctgaagacccacatcagcaagggtacgctgggcaagttcactgtgcccatgctgaaagaggcctgccgggcttacgggctgaagagtgggctgaagaagcaggagctgctggaagccctcaccaagcacttccaggactgaccagaggccgcgcgtccagctgcccttccgcagtgtggccaggctgcctggccttgtcctcagccagttaaaatgtgtttctcctgagctaggaagagtctacccgacataagtcgagggactttatgtttttgaggctttctgttgccatggtgatggtgtagccctcccactttgctgttccttactttactgcctgaataaagagccctaagtttgtactata

SEQ ID NO: 313752 - DNA, 2100 bp, Homo sapiens
ggtcaatcagtgacgcagtacctcaacgatgtcacggttggtgaggtcagtgatcacatatacatcggtagggcgatgaagaagctacgaggaacgaagcagtgaacgagaaccttgaagcaagtggagactataaatattcaggaagagatagtttgatttttttggttgatgcctccaaggctatgtttgaatctcagagtgaagatgagttgacaccttttgacatgagcatccagtgtatccaaagtgtgtacatcagtaagatcataagcagtgatcgagatctcttggctgtggtgttctatggtaccgagaaagacaaaaattcagtgaattttaaaaatatttacgtcttacaggagctggataatccaggtgcaaaacgaattctagagcttgaccagtttaaggggcagcagggacaaaaacgtttccaagacatgatgggccacggatctgactactcactcagtgaagtgctgtgggtctgtgccaacctctttagtgatgtccaattcaagatgagtcataagaggatcatgctgttcaccaatgaagacaacccccatggcaatgacagtgccaaagccagccgggccaggaccaaagccggtgatctccgagatacaggcatcttccttgacttgatgcacctgaagaaacctgggggctttgacatatccttgttctacagagatatcatcagcatagcagaggatgaggacctcagggttcactttgaggaatccagcaagctagaagacctgttgcggaaggttcgcgccaaggagaccaggaagcgagcactcagcaggttaaagctgaagctcaacaaagatatagtgatctctgtgggcatttataatctggtccagaaggctctcaagcctcctccaataaagctctatcgggaaacaaatgaaccagtgaaaaccaagacccggacctttaatacaagtacaggcggtttgcttctgcctagcgataccaagaggtctcagatctatgggagtcgtcagattatactggagaaagaggaaacagaagagctaaaacggtttgatgatccaggtttgatgctcatgggtttcaagccgttggtactgctgaagaaacaccattacctgaggccctccctgttcgtgtacccagaggagtcgctggtgattgggagctcaaccctgttcagtgctctgctcatcaagtgtctggagaaggaggttgcagcattgtgcagatacacaccccgcaggaacatccctccttattttgtggctttggtgccacaggaagaagagttggatgaccagaaaattcaggtgactcctccaggcttccagctggtctttttaccctttgctgatgataaaaggaagatgccctttactgaaaaaatcatggcaactccagagcaggtgggcaagatgaaggctatcgttgagaagcttcgcttcacatacagaagtgacagctttgagaaccccgtgctgcagcagcacttcaggaacctggaggccttggccttggatttgatggagccggaacaagcagtggacctgacattgcccaaggttgaagcaatgaataaaagactgggctccttggtggatgagtttaaggagcttgtttacccaccagattacaatcctgaagggaaagttaccaagagaaaacacgataatgaaggttctggaagcaaaaggcccaaggtggagtattcagaagaggagctgaagacccacatcagcaagggtacgctgggcaagttcactgtgcccatgctgaaagaggcctgccgggcttacgggctgaagagtgggctgaagaagcaggagctgctggaagccctcaccaagcacttccaggactgaccagaggccgcgcgtccagctgcccttccgcagtgtggccaggctgcctggccttgtcctcagccagttaaaatgtgtttctcctgagctaggaagagtctacccgacataagtcgagggactttatgtttttgaggctttctgttgccatggtgatggtgtagccctcccactttgctgttccttactttactgcctgaataaagagccctaagtttgtactata

SEQ ID NO: 313753 - DNA, 3060 bp, Homo sapiens
aattaggctaggtacgaggctgggtgtggtaagcgggccgttatccatttgtgttgttcgccagctaggcctggcctcgtcccgcttcgctcggtcggtctcgcgcgcccccatagccttgctagagggttagcgttagccttaagtgtgcgaatccgaggagcagcgacagactcgagaccacgctccttcctcgggaaggaggcggcacctcgcgtttgaggcccgcctgcgtttgaggcccgcctgcgcttgcggcccgcctgcgcttgaggcctgtctgcgtttgagatctcattgggcgtgattgaggaatttggggaggtttttgggcggtattgaggacgagggggtccgttagtcagcatagaatcctggagcgggaatccctcaccgtctaaatggcgtcgggggcgggacctccgggatctggcttccgcgggccgccgccggccctgaaacgtgagggatagctgagatgaggcagctactgggatggcccccatgcgcatttacatgcagtccgactgccgagctttcgaggcagcaggatttaccgtccacattcctcactactaaccaagcttttagaacagatctcacaagaacctagaggtcggtattttttcgatttaaatttgcctgttactgacgttaacgtctttcgcctagtgagcagtagccaacatgtcagggtgggagtcatattacaaaaccgagggcgatgaagaagcagaggaagaacaagaagagaaccttgaagcaagtggagactataaatattcaggaagagatagtttgatttttttggttgatgcctccaaggctatgtttgaatctcagagtgaagatgagttgacaccttttgacatgagcatccagtgtatccaaagtgtgtacatcagtaagatcataagcagtgatcgagatctcttggctgtggtgttctatggtaccgagaaagacaaaaattcagtgaattttaaaaatatttacgtcttacaggagctggataatccaggtgcaaaacgaattctagagcttgaccagtttaaggggcagcagggacaaaaacgtttccaagacatgatgggccacggatctgactactcactcagtgaagtgctgtgggtctgtgccaacctctttagtgatgtccaattcaagatgagtcataagaggatcatgctgttcaccaatgaagacaacccccatggcaatgacagtgccaaagccagccgggccaggaccaaagccggtgatctccgagatacaggcatcttccttgacttgatgcacctgaagaaacctgggggctttgacatatccttgttctacagagatatcatcagcatagcagaggatgaggacctcagggttcactttgaggaatccagcaagctagaagacctgttgcggaaggttcgcgccaaggagaccaggaagcgagcactcagcaggttaaagctgaagctcaacaaagatatagtgatctctgtgggcatttataatctggtccagaaggctctcaagcctcctccaataaagctctatcgggaaacaaatgaaccagtgaaaaccaagacccggacctttaatacaagtacaggcggtttgcttctgcctagcgataccaagaggtctcagatctatgggagtcgtcagattatactggagaaagaggaaacagaagagctaaaacggtttgatgatccaggtttgatgctcatgggtttcaagccgttggtactgctgaagaaacaccattacctgaggccctccctgttcgtgtacccagaggagtcgctggtgattgggagctcaaccctgttcagtgctctgctcatcaagtgtctggagaaggaggttgcagcattgtgcagatacacaccccgcaggaacatccctccttattttgtggctttggtgccacaggaagaagagttggatgaccagaaaattcaggtgactcctccaggcttccagctggtctttttaccctttgctgatgataaaaggaagatgccctttactgaaaaaatcatggcaactccagagcaggtgggcaagatgaaggctatcgttgagaagcttcgcttcacatacagaagtgacagctttgagaaccccgtgctgcagcagcacttcaggaacctggaggccttggccttggatttgatggagccggaacaagcagtggacctgacattgcccaaggttgaagcaatgaataaaagactgggctccttggtggatgagtttaaggagcttgtttacccaccagattacaatcctgaagggaaagttaccaagagaaaacacgataatgaaggttctggaagcaaaaggcccaaggtggagtattcagaagaggagctgaagacccacatcagcaagggtacgctgggcaagttcactgtgcccatgctgaaagaggcctgccgggcttacgggctgaagagtgggctgaagaagcaggagctgctggaagccctcaccaagcacttccaggactgaccagaggccgcgcgtccagctgcccttccgcagtgtggccaggctgcctggccttgtcctcagccagttaaaatgtgtttctcctgagctaggaagagtctacccgacataagtcgagggactttatgtttttgaggctttctgttgccatggtgatggtgtagccctcccactttgctgttccttactttactgcctgaataaagagccctaagtttgtactataaaaaaaaaaaaaaaaacacaaacacgcaacaccaacaatgaaacagaaaacaaaaggggggggcgcacacgaaaagaacccctggggggggccaaagtactacgcgcgaccggctgttcttggaagagggggcccaataaggagggataataagaagggcaaggcggcgctgtcacacgcaccggcgggacaagcggcgcgggactttgagagagaccaaccggtgggggacatacggcaaccacccacagaattgaacgcccgcaactaactcgggatcgggtacgccgattagcgggaaactgcggtgtagatag

SEQ ID NO: 313754 - DNA, 2693 bp, Homo sapiens
aattaggctaggtacgaggctgggtgtggtaagcgggccgttatccatttgtgttgttcgccagctaggcctggcctcgtcccgcttcgctcggtcggtctcgcgcgcccccatagccttgctagagggttagcgttagccttaagtgtgcgaatccgaggagcagcgacagactcgagaccacgctccttcctcgggaaggaggcggcacctcgcgtttgaggcccgcctgcgtttgaggcccgcctgcgcttgcggcccgcctgcgcttgaggcctgtctgcgtttgagatctcattgggcgtgattgaggaatttggggaggtttttgggcggtattgaggacgagggggtccgttagtcagcatagaatcctggagcgggaatccctcaccgtctaaatggcgtcgggggcgggacctccgggatctggcttccgcgggccgccgccggccctgaaacgtgagggatagctgagatgaggcagctactgggatggcccccatgcgcatttacatgcagtccgactgccgagctttcgaggcagcaggatttaccgtccacattcctcactactaaccaagcttttagaacagatctcacaagaacctagaggtcggtattttttcgatttaaatttgcctgttactgacgttaacgtctttcgcctagtgagcagtagccaacatgtcagggtgggagtcatattacaaaaccgagggcgatgaagaagcagaggaagaacaagaagagaaccttgaagcaagtggagactataaatattcaggaagagatagtttgatttttttggttgatgcctccaaggctatgtttgaatctcagagtgaagatgagttgacaccttttgacatgagcatccagtgtatccaaagtgtgtacatcagtaagatcataagcagtgatcgagatctcttggctgtggtgttctatggtaccgagaaagacaaaaattcagtgaattttaaaaatatttacgtcttacaggagctggataatccaggtgcaaaacgaattctagagcttgaccagtttaaggggcagcagggacaaaaacgtttccaagacatgatgggccacggatctgactactcactcagtgaagtgctgtgggtctgtgccaacctctttagtgatgtccaattcaagatgagtcataagaggatcatgctgttcaccaatgaagacaacccccatggcaatgacagtgccaaagccagccgggccaggaccaaagccggtgatctccgagatacaggcatcttccttgacttgatgcacctgaagaaacctgggggctttgacatatccttgttctacagagatatcatcagcatagcagaggatgaggacctcagggttcactttgaggaatccagcaagctagaagacctgttgcggaaggttcgcgccaaggagaccaggaagcgagcactcagcaggttaaagctgaagctcaacaaagatatagtgatctctgtgggcatttataatctggtccagaaggctctcaagcctcctccaataaagctctatcgggaaacaaatgaaccagtgaaaaccaagacccggacctttaatacaagtacaggcggtttgcttctgcctagcgataccaagaggtctcagatctatgggagtcgtcagattatactggagaaagaggaaacagaagagctaaaacggtttgatgatccaggtttgatgctcatgggtttcaagccgttggtactgctgaagaaacaccattacctgaggccctccctgttcgtgtacccagaggagtcgctggtgattgggagctcaaccctgttcagtgctctgctcatcaagtgtctggagaaggaggttgcagcattgtgcagatacacaccccgcaggaacatccctccttattttgtggctttggtgccacaggaagaagagttggatgaccagaaaattcaggtgactcctccagtttactgaaaaaatcatggcaactccagagcaggtgggcaagatgaaggctatcgttgagaagcttcgcttcacatacagaagtgacagctttgagaaccccgtgctgcagcagcacttcaggaacctggaggccttggccttggatttgatggagccggaacaagcagtggacctgacattgcccaaggttgaagcaatgaataaaagactgggctccttggtggatgagtttaaggagcttgtttacccaccagattacaatcctgaagggaaagttaccaagagaaaacacgataatgaaggttctggaagcaaaaggcccaaggtggagtattcagaagaggagctgaagacccacatcagcaagggtacgctgggcaagttcactgtgcccatgctgaaagaggcctgccgggcttacgggctgaagagtgggctgaagaagcaggagctgctggaagccctcaccaagcacttccaggactgaccagaggccgcgcgtccagctgcccttccgcagtgtggccaggctgcctggccttgtcctcagccagttaaaatgtgtttctcctgagctaggaagagtctacccgacataagtcgagggactttatgtttttgaggctttctgttgccatggtgatggtgtagccctcccactttgctgttccttactttactgcctgaataaagagccctaagtttgtactata

SEQ ID NO: 313755 - DNA, 2630 bp, Homo sapiens
aattaggctaggtacgaggctgggtgtggtaagcgggccgttatccatttgtgttgttcgccagctaggcctggcctcgtcccgcttcgctcggtcggtctcgcgcgcccccatagccttgctagagggttagcgttagccttaagtgtgcgaatccgaggagcagcgacagactcgagaccacgctccttcctcgggaaggaggcggcacctcgcgtttgaggcccgcctgcgtttgaggcccgcctgcgcttgcggcccgcctgcgcttgaggcctgtctgcgtttgagatctcattgggcgtgattgaggaatttggggaggtttttgggcggtattgaggacgagggggtccgttagtcagcatagaatcctggagcgggaatccctcaccgtctaaatggcgtcgggggcgggacctccgggatctggcttccgcgggccgccgccggccctgaaacgtgagggatagctgagatgaggcagctactgggatggcccccatgcgcatttacatgcagtccgactgccgagctttcgaggcagcaggatttaccgtccacattcctcactactaaccaagcttttagaacagatctcacaagaacctagaggtcggtattttttcgatttaaatttgcctgttactgacgttaacgtctttcgcctagtgagcagtagccaacatgtcagggtgggagtcatattacaaaaccgagggcgatgaagaagcagaggaagaacaagaagagaaccttgaagcaagtgtgtatccaaagtgtgtacatcagtaagatcataagcagtgatcgagatctcttggctgtggtgttctatggtaccgagaaagacaaaaattcagtgaattttaaaaatatttacgtcttacaggagctggataatccaggtgcaaaacgaattctagagcttgaccagtttaaggggcagcagggacaaaaacgtttccaagacatgatgggccacggatctgactactcactcagtgaagtgctgtgggtctgtgccaacctctttagtgatgtccaattcaagatgagtcataagaggatcatgctgttcaccaatgaagacaacccccatggcaatgacagtgccaaagccagccgggccaggaccaaagccggtgatctccgagatacaggcatcttccttgacttgatgcacctgaagaaacctgggggctttgacatatccttgttctacagagatatcatcagcatagcagaggatgaggacctcagggttcactttgaggaatccagcaagctagaagacctgttgcggaaggttcgcgccaaggagaccaggaagcgagcactcagcaggttaaagctgaagctcaacaaagatatagtgatctctgtgggcatttataatctggtccagaaggctctcaagcctcctccaataaagctctatcgggaaacaaatgaaccagtgaaaaccaagacccggacctttaatacaagtacaggcggtttgcttctgcctagcgataccaagaggtctcagatctatgggagtcgtcagattatactggagaaagaggaaacagaagagctaaaacggtttgatgatccaggtttgatgctcatgggtttcaagccgttggtactgctgaagaaacaccattacctgaggccctccctgttcgtgtacccagaggagtcgctggtgattgggagctcaaccctgttcagtgctctgctcatcaagtgtctggagaaggaggttgcagcattgtgcagatacacaccccgcaggaacatccctccttattttgtggctttggtgccacaggaagaagagttggatgaccagaaaattcaggtgactcctccaggcttccagctggtctttttaccctttgctgatgataaaaggaagatgccctttactgaaaaaatcatggcaactccagagcaggtgggcaagatgaaggctatcgttgagaagcttcgcttcacatacagaagtgacagctttgagaaccccgtgctgcagcagcacttcaggaacctggaggccttggccttggatttgatggagccggaacaagcagtggacctgacattgcccaaggttgaagcaatgaataaaagactgggctccttggtggatgagtttaaggagcttgtttacccaccagattacaatcctgaagggaaagttaccaagagaaaacacgataatgaaggttctggaagcaaaaggcccaaggtggagtattcagaagaggagctgaagacccacatcagcaagggtacgctgggcaagttcactgtgcccatgctgaaagaggcctgccgggcttacgggctgaagagtgggctgaagaagcaggagctgctggaagccctcaccaagcacttccaggactgaccagaggccgcgcgtccagctgcccttccgcagtgtggccaggctgcctggccttgtcctcagccagttaaaatgtgtttctcctgagctaggaagagtctacccgacataagtcgagggactttatgtttttgaggctttctgttgccatggtgatggtgtagccctcccactttgctgttccttactttactgcctgaataaagagccctaagtttgtactata

SEQ ID NO: 313756 - DNA, 2688 bp, Homo sapiens
aattaggctaggtacgaggctgggtgtggtaagcgggccgttatccatttgtgttgttcgccagctaggcctggcctcgtcccgcttcgctcggtcggtctcgcgcgcccccatagccttgctagagggttagcgttagccttaagtgtgcgaatccgaggagcagcgacagactcgagaccacgctccttcctcgggaaggaggcggcacctcgcgtttgaggcccgcctgcgtttgaggcccgcctgcgcttgcggcccgcctgcgcttgaggcctgtctgcgtttgagatctcattgggcgtgattgaggaatttggggaggtttttgggcggtattgaggacgagggggtccgttagtcagcatagaatcctggagcgggaatccctcaccgtctaaatggcgtcgggggcgggacctccgggatctggcttccgcgggccgccgccggccctgaaacgtgagggatagctgagatgaggcagctactgggatggcccccatgcgcatttacatgcagtccgactgccgagctttcgaggcagcaggatttaccgtccacattcctcactactaaccaagcttttagaacagatctcacaagaacctagaggtcggtattttttcgatttaaatttgcctgttactgacgttaacgtctttcgcctagtgagcagtagccaacatgtcagggtgggagtcatattacaaaaccgagggcgatgaagaagcagaggaagaacaagaagagaaccttgaagcaagtggagactataaatattcaggaagagatagtttgatttttttggttgatgcctccaaggctatgtttgaatctcagagtgaagatgagttgacaccttttgacatgagcatccagtgtatccaaagtgtgtacatcagtaagatcataagcagtgatcgagatctcttggctgtggtgttctatggtaccgagaaagacaaaaattcagtgaattttaaaaatatttacgtcttacaggagctggataatccaggtgcaaaacgaattctagagcttgaccagtttaaggggcagcagggacaaaaacgtttccaagacatgatgggccacggatctgactactcactcagtgaagtgctgtgggtctgtgccaacctctttagtgatgtccaattcaagatgagtcataagaggatcatgctgttcaccaatgaagacaacccccatggcaatgacagtgccaaagccagccgggccaggaccaaagccggtgatctccgagatacaggcatcttccttgacttgatgcacctgaagaaacctgggggctttgacatatccttgttctacagagatatcatcagcatagcagaggatgaggacctcagggttcactttgaggaatccagcaagctagaagacctgttgcggaaggttcgcgccaaggagaccaggaagcgagcactcagcaggttaaagctgaagctcaacaaagatatagtgatctctgtgggcatttataatctggtccagaaggctctcaagcctcctccaataaagctctatcgggaaacaaatgaaccagtgaaaaccaagacccggacctttaatacaagtacaggcggtttgcttctgcctagcgataccaagaggtctcagatctatgggagtcgtcagattatactggagaaagaggaaacagaagagtgctgaagaaacaccattacctgaggccctccctgttcgtgtacccagaggagtcgctggtgattgggagctcaaccctgttcagtgctctgctcatcaagtgtctggagaaggaggttgcagcattgtgcagatacacaccccgcaggaacatccctccttattttgtggctttggtgccacaggaagaagagttggatgaccagaaaattcaggtgactcctccaggcttccagctggtctttttaccctttgctgatgataaaaggaagatgccctttactgaaaaaatcatggcaactccagagcaggtgggcaagatgaaggctatcgttgagaagcttcgcttcacatacagaagtgacagctttgagaaccccgtgctgcagcagcacttcaggaacctggaggccttggccttggatttgatggagccggaacaagcagtggacctgacattgcccaaggttgaagcaatgaataaaagactgggctccttggtggatgagtttaaggagcttgtttacccaccagattacaatcctgaagggaaagttaccaagagaaaacacgataatgaaggttctggaagcaaaaggcccaaggtggagtattcagaagaggagctgaagacccacatcagcaagggtacgctgggcaagttcactgtgcccatgctgaaagaggcctgccgggcttacgggctgaagagtgggctgaagaagcaggagctgctggaagccctcaccaagcacttccaggactgaccagaggccgcgcgtccagctgcccttccgcagtgtggccaggctgcctggccttgtcctcagccagttaaaatgtgtttctcctgagctaggaagagtctacccgacataagtcgagggactttatgtttttgaggctttctgttgccatggtgatggtgtagccctcccactttgctgttccttactttactgcctgaataaagagccctaagtttgtactata

SEQ ID NO: 313757 - DNA, 2688 bp, Homo sapiens
aattaggctaggtacgaggctgggtgtggtaagcgggccgttatccatttgtgttgttcgccagctaggcctggcctcgtcccgcttcgctcggtcggtctcgcgcgcccccatagccttgctagagggttagcgttagccttaagtgtgcgaatccgaggagcagcgacagactcgagaccacgctccttcctcgggaaggaggcggcacctcgcgtttgaggcccgcctgcgtttgaggcccgcctgcgcttgcggcccgcctgcgcttgaggcctgtctgcgtttgagatctcattgggcgtgattgaggaatttggggaggtttttgggcggtattgaggacgagggggtccgttagtcagcatagaatcctggagcgggaatccctcaccgtctaaatggcgtcgggggcgggacctccgggatctggcttccgcgggccgccgccggccctgaaacgtgagggatagctgagatgaggcagctactgggatggcccccatgcgcatttacatgcagtccgactgccgagctttcgaggcagcaggatttaccgtccacattcctcactactaaccaagcttttagaacagatctcacaagaacctagaggtcggtattttttcgatttaaatttgcctgttactgacgttaacgtctttcgcctagtgagcagtagccaacatgtcagggtgggagtcatattacaaaaccgagggcgatgaagaagcagaggaagaacaagaagagaaccttgaagcaagtggagactataaatattcaggaagagatagtttgatttttttggttgatgcctccaaggctatgtttgaatctcagagtgaagatgagttgacaccttttgacatgagcatccagtgtatccaaagtgtgtacatcagtaagatcataagcagtgatcgagatctcttggctgtggtgttctatggtaccgagaaagacaaaaattcagtgaattttaaaaatatttacgtcttacaggagctggataatccaggtgcaaaacgaattctagagcttgaccagtttaaggggcagcagggacaaaaacgtttccaagacatgatgggccacggatctgactactcactcagtgaagtgctgtgggtctgtgccaacctctttagtgatgtccaattcaagatgagtcataagaggatcatgctgttcaccaatgaagacaacccccatggcaatgacagtgccaaagccagccgggccaggaccaaagccggtgatctccgagatacaggcatcttccttgacttgatgcacctgaagaaacctgggggctttgacatatccttgttctacagagatatcatcagcatagcagaggatgaggacctcagggttcactttgaggaatccagcaagctagaagacctgttgcggaaggttcgcgccaaggagaccaggaagcgagcactcagcaggttaaagctgaagctcaacaaagatatagtgatctctgtgggcatttataatctggtccagaaggctctcaagcctcctccaataaagctctatcgggaaacaaatgaaccagtgaaaaccaagacccggacatctatgggagtcgtcagattatactggagaaagaggaaacagaagagctaaaacggtttgatgatccaggtttgatgctcatgggtttcaagccgttggtactgctgaagaaacaccattacctgaggccctccctgttcgtgtacccagaggagtcgctggtgattgggagctcaaccctgttcagtgctctgctcatcaagtgtctggagaaggaggttgcagcattgtgcagatacacaccccgcaggaacatccctccttattttgtggctttggtgccacaggaagaagagttggatgaccagaaaattcaggtgactcctccaggcttccagctggtctttttaccctttgctgatgataaaaggaagatgccctttactgaaaaaatcatggcaactccagagcaggtgggcaagatgaaggctatcgttgagaagcttcgcttcacatacagaagtgacagctttgagaaccccgtgctgcagcagcacttcaggaacctggaggccttggccttggatttgatggagccggaacaagcagtggacctgacattgcccaaggttgaagcaatgaataaaagactgggctccttggtggatgagtttaaggagcttgtttacccaccagattacaatcctgaagggaaagttaccaagagaaaacacgataatgaaggttctggaagcaaaaggcccaaggtggagtattcagaagaggagctgaagacccacatcagcaagggtacgctgggcaagttcactgtgcccatgctgaaagaggcctgccgggcttacgggctgaagagtgggctgaagaagcaggagctgctggaagccctcaccaagcacttccaggactgaccagaggccgcgcgtccagctgcccttccgcagtgtggccaggctgcctggccttgtcctcagccagttaaaatgtgtttctcctgagctaggaagagtctacccgacataagtcgagggactttatgtttttgaggctttctgttgccatggtgatggtgtagccctcccactttgctgttccttactttactgcctgaataaagagccctaagtttgtactata

SEQ ID NO: 313758 - DNA, 1530 bp, Homo sapiens
tggcaggtgggaggcgggtgaatcggacgagggcaggaccaaagccggtgatctccgagatacgcatcttccttgacttgatgcacctgaagaaacctgggggctttgacatatccttgttctacagagatatcatcagcatagcagaggatgaggacctcagggttcactttgaggaatccagcaagctagaagacctgttgcggaaggttcgcgccaaggagaccaggaagcgagcactcagcaggttaaagctgaagctcaacaaagatatagtgatctctgtgggcatttataatctggtccagaaggctctcaagcctcctccaataaagctctatcgggaaacaaatgaaccagtgaaaaccaagacccggacctttaatacaagtacaggcggtttgcttctgcctagcgataccaagaggtctcagatctatgggagtcgtcagattatactggagaaagaggaaacagaagagctaaaacggtttgatgatccaggtttgatgctcatgggtttcaagccgttggtactgctgaagaaacaccattacctgaggccctccctgttcgtgtacccagaggagtcgctggtgattgggagctcaaccctgttcagtgctctgctcatcaagtgtctggagaaggaggttgcagcattgtgcagatacacaccccgcaggaacatccctccttattttgtggctttggtgccacaggaagaagagttggatgaccagaaaattcaggtgactcctccaggcttccagctggtctttttaccctttgctgatgataaaaggaagatgccctttactgaaaaaatcatggcaactccagagcaggtgggcaagatgaaggctatcgttgagaagcttcgcttcacatacagaagtgacagctttgagaaccccgtgctgcagcagcacttcaggaacctggaggccttggccttggatttgatggagccggaacaagcagtggacctgacattgcccaaggttgaagcaatgaataaaagactgggctccttggtggatgagtttaaggagcttgtttacccaccagattacaatcctgaagggaaagttaccaagagaaaacacgataatgaaggttctggaagcaaaaggcccaaggtggagtattcagaagaggagctgaagacccacatcagcaagggtacgctgggcaagttcactgtgcccatgctgaaagaggcctgccgggcttacgggctgaagagtgggctgaagaagcaggagctgctggaagccctcaccaagcacttccaggactgaccagaggccgcgcgtccagctgcccttccgcagtgtggccaggctgcctggccttgtcctcagccagttaaaatgtgtttctcctgagctaggaagagtctacccgacataagtcgagggactttatgtttttgaggctttctgttgccatggtgatggtgtagccctcccactttgctgttccttactttactgcctgaataaagagccctaagtttgtactata

SEQ ID NO: 313759 - DNA, 2150 bp, Homo sapiens
aattaggctaggtacgaggctgggtgtggtaagcgggccgttatccatttgtgttgttcgccagctaggcctggcctcgtcccgcttcgctcggtcggtctcgcgcgcccccatagccttgctagagggttagcgttagccttaagtgtgcgaatccgaggagcagcgacagactcgagaccacgctccttcctcgggaaggaggcggcacctcgcgtttgaggcccgcctgcgtttgaggcccgcctgcgcttgcggcccgcctgcgcttgaggcctgtctgcgtttgagatctcattgggcgtgattgaggaatttggggaggtttttgggcggtattgaggacgagggggtccgttagtcagcatagaatcctggagcgggaatccctcaccgtctaaatggcgtcgggggcgggacctccgggatctggcttccgcgggccgccgccggccctgaaacgtgagggatagctgagatgaggcagctactgggatggcccccatgcgcatttacatgcagtccgactgccgagctttcgaggcagcaggatttaccgtccacattcctcactactaaccaagcttttagaacagatctcacaagaacctagaggtcggtattttttcgatttaaatttgcctgttactgacgttaacgtctttcgcctagtgagcagtagccaacatgtcagggtgggagtcatattacaaaaccgagggcgatgaagaagcagaggaagaacaagaagagaaccttgaagcaagtggagactataaatattcaggaagagatagtttgatttttttggttgatgcctccaaggctatgtttgaatctcagagtgaagatgagttgacaccttttgacatgagcatccagtgtatccaaagtgtgtacatcagtaagatcataagcagtgatcgagatctcttggctgtggtgttctatggtaccgagaaagacaaaaattcagtgaattttaaaaatatttacgtcttacaggagctggataatccaggtgcaaaacgaattctagagcttgaccagtttaaggggcagcagggacaaaaacgtttccaagacatgatgggccacggatctgactactcactcagtgaagtgctgtgggtctgtgccaacctctttagtgatgtccaattcaagatgagtcataagaggatcatgctgttcaccaatgaagacaacccccatggcaatgacagtgccaaagccagccgggccaggaccaaagccggtgatctccgagatacaggcatcttccttgacttgatgcacctgaagaaacctgggggctttgacatatccttgttctacagagatatcatcagcatagcagaggatgaggacctcagggttcactttgaggaatccagcaagctagaagacctgttgcggaaggttcgcgccaaggagaccaggaagcgagcactcagcaggttaaagctgaagctcaacaaagatatagtgatctctgtgggcatttataatctggtccagaaggctctcaagcctcctccaataaagctctatcgggaaacaaatgaaccagtgaaaaccaagacccggacctttaatacaagtacaggcggtttgcttctgcctagcgataccaagaggtctcagatctatgggagtcgtcagattatactggagaaagaggaaacagaagagctaaaacggtttgatgatccaggtttgatgctcatgggtttcaagccgttggtactgctgaagaaacaccattacctgaggccctccctgttcgtgtacccagaggagtcgctggtgattgggagctcaaccctgttcagtgctctgctcatcaagtgtctggagaaggaggttgcagcattgtgcagatacacaccccgcaggaacatccctccttattttgtggctttggtgccacaggaagaagagttggatgaccagaaaattcaggtgactcctccaggcttccagctggtctttttaccctttgctgatgataaaaggaagatgccctaacttccttcacatacagaatttaccacttttataacgccgtacttcaacagcaccttaagaaccctgaggcccttgcccttgtattgattgaaccctaacaaaccattaccctaccattc

SEQ ID NO: 313760 - DNA, 1273 bp, Homo sapiens
cgcgctgcaggaattcggcacgagcaggaagcgagcactcagcaggttaaagctgaagctcaacaaagatatagtgatctctgtgggcatttataatctggtccagaaggctctcaagcctcctccaataaagctctatcgggaaacaaatgaaccagtgaaaaccaagacccggacatctatgggagtcgtcagattatactggagaaagaggaaacagaagagctaaaacggtttgatgatccaggtttgatgctcatgggtttcaagccgttggtactgctgaagaaacaccattacctgaggccctccctgttcgtgtacccagaggagtcgctggtgattgggagctcaaccctgttcagtgctctgctcatcaagtgtctggagaaggaggttgcagcattgtgcagatacacaccccgcaggaacatccctccttattttgtggctttggtgccacaggaagaagagttggatgaccagaaaattcaggtgactcctccaggcttccagctggtctttttaccctttgctgatgataaaaggaagatgccctttactgaaaaaatcatggcaactccagagcaggtgggcaagatgaaggctatcgttgagaagcttcgcttcacatacagaagtgacagctttgagaaccccgtgctgcagcagcacttcaggaacctggaggccttggccttggatttgatggagccggaacaagcagtggacctgacattgcccaaggttgaagcaatgaataaaagactgggctccttggtggatgagtttaaggagcttgtttacccaccagattacaatcctgaagggaaagttaccaagagaaaacacgataatgaaggttctggaagcaaaaggcccaaggtggagtattcagaagaggagctgaagacccacatcagcaagggtacgctgggcaagttcactgtgcccatgctgaaagaggcctgccgggcttacgggctgaagagtgggctgaagaagcaggagctgctggaagccctcaccaagcacttccaggactgaccagaggccgcgcgtccagctgcccttccgcagtgtggccaggctgcctggccttgtcctcagccagttaaaatgtgtttctcctgagctaggaagagtctacccgacataagtcgagggactttatgtttttgaggctttctgttgccatggtgatggtgtagccctcccactttgctgttccttactttactgcctgaataaagagccctaagtttgtactata

SEQ ID NO: 313761 - DNA, 1794 bp, Homo sapiens
  misc_feature (1648)..(1649): n is a, c, g, or t
  misc_feature (1651)..(1651): n is a, c, g, or t
  misc_feature (1653)..(1653): n is a, c, g, or t
  misc_feature (1655)..(1655): n is a, c, g, or t
aattaggctaggtacgaggctgggtgtggtaagcgggccgttatccatttgtgttgttcgccagctaggcctggcctcgtcccgcttcgctcggtcggtctcgcgcgcccccatagccttgctagagggttagcgttagccttaagtgtgcgaatccgaggagcagcgacagactcgagaccacgctccttcctcgggaaggaggcggcacctcgcgtttgaggcccgcctgcgtttgaggcccgcctgcgcttgcggcccgcctgcgcttgaggcctgtctgcgtttgagatctcattgggcgtgattgaggaatttggggaggtttttgggcggtattgaggacgagggggtccgttagtcagcatagaatcctggagcgggaatccctcaccgtctaaatggcgtcgggggcgggacctccgggatctggcttccgcgggccgccgccggccctgaaacgtgagggatagctgagatgaggcagctactgggatggcccccatgcgcatttacatgcagtccgactgccgagctttcgaggcagcaggatttaccgtccacattcctcactactaaccaagcttttagaacagatctcacaagaacctagaggtcggtattttttcgatttaaatttgcctgttactgacgttaacgtctttcgcctagtgagcagtagccaacatgtcagggtgggagtcatattacaaaaccgagggcgatgaagaagcagaggaagaacaagaagagaaccttgaagcaagtggagactataaatattcaggaagagatagtttgatttttttggttgatgcctccaaggctatgtttgaatctcagagtgaagatgagttgacaccttttgacatgagcatccagtgtatccaaagtgtgtacatcagtaagatcataagcagtgatcgagatctcttggctgtggtgttctatggtaccgagaaagacaaaaattcagtgaattttaaaaatatttacgtcttacaggagctggataatccaggtgcaaaacgaattctagagcttgaccagtttaaggggcagcagggacaaaaacgtttccaagacatgatgggccacggatctgactactcactcagtgaagtgctgtgggtctgtgccaacctctttagtgatgtccaattcaagatgagtcataagaggatcatgctgttcaccaatgaagacaacccccatggcaatgacagtgccaaagccagccgggccaggaccaaagccggtgatctccgagatacaggcatcttccttgacttgatgcacctgaagaaacctgggggctttgacatatccttgttctacagagatatcatcagcatagcagaggatgaggacctcagggttcactttgaggaatccagcaagctagaagacctgttgcggaaggttcgcgccaaggagaccaggaagcgagcactcagcaggttaaagctgaagctcaacaaagatatagtgatctctgtgggcatttataatctggtccagaaggctctcaagcctcctccaataaagctctatcgggaaacaaatgaaccagtgaaaaccaagacccggacctttaatacaagtacaggcggtttgcttctgcctagcgataccaagaggtctcagnnantntnggagcgcagatatacgcgaagagaaccgaggacgcaaggtgcgaccgggtgacgcgcagggtcacgccgggtcgggaaaaccgcgaggcccggggtccagggcggaggcccccccgcgcccaagtgaaggggtggaacg

SEQ ID NO: 313762 - DNA, 1635 bp, Homo sapiens
  misc_feature (1464)..(1464): n is a, c, g, or t
  misc_feature (1471)..(1472): n is a, c, g, or t
aattaggctaggtacgaggctgggtgtggtaagcgggccgttatccatttgtgttgttcgccagctaggcctggcctcgtcccgcttcgctcggtcggtctcgcgcgcccccatagccttgctagagggttagcgttagccttaagtgtgcgaatccgaggagcagcgacagactcgagaccacgctccttcctcgggaaggaggcggcacctcgcgtttgaggcccgcctgcgtttgaggcccgcctgcgcttgcggcccgcctgcgcttgaggcctgtctgcgtttgagatctcattgggcgtgattgaggaatttggggaggtttttgggcggtattgaggacgagggggtccgttagtcagcatagaatcctggagcgggaatccctcaccgtctaaatggcgtcgggggcgggacctccgggatctggcttccgcgggccgccgccggccctgaaacgtgagggatagctgagatgaggcagctactgggatggcccccatgcgcatttacatgcagtccgactgccgagctttcgaggcagcaggatttaccgtccacattcctcactactaaccaagcttttagaacagatctcacaagaacctagaggtcggtattttttcgatttaaatttgcctgttactgacgttaacgtctttcgcctagtgagcagtagccaacatgtcagggtgggagtcatattacaaaaccgagggcgatgaagaagcagaggaagaacaagaagagaaccttgaagcaagtggagactataaatattcaggaagagatagtttgatttttttggttgatgcctccaaggctatgtttgaatctcagagtgaagatgagttgacaccttttgacatgagcatccagtgtatccaaagtgtgtacatcagtaagatcataagcagtgatcgagatctcttggctgtggtgttctatggtaccgagaaagacaaaaattcagtgaattttaaaaatatttacgtcttacaggagctggataatccaggtgcaaaacgaattctagagcttgaccagtttaaggggcagcagggacaaaaacgtttccaagacatgatgggccacggatctgactactcactcagtgaagtgctgtgggtctgtgccaacctctttagtgatgtccaattcaagatgagtcataagaggatcatgctgttcaccaatgaagacaacccccatggcaatgacagtgccaaagccagccgggccaggaccaaagccggtgatctccgagatacaggcatcttccttgacttgatgcacctgaagaaacctgggggctttgacatatccttgttctacagagatatcatcagcatagcagaggatgaggacctcagggttcactttgaggaatccagcaagctagaagacctgttgcggaaggttcgcgccaaggagaccaggaagcgagcactcagcagtaangtgaggnnacaagattgtggtccggggggtaaaacggcaaggggctaagcccaaaaggtgtgggaactggcctggaacgcggctataacacggggggtcggcagacaaggcatagggagcgaatgagaaaaagacaaggtcacaagtggcggggaaaaccgccagaagatc

SEQ ID NO: 313763 - DNA, 2447 bp, Homo sapiens
aattaggctaggtacgaggctgggtgtggtaagcgggccgttatccatttgtgttgttcgccagctaggcctggcctcgtcccgcttcgctcggtcggtctcgcgcgcccccatagccttgctagagggttagcgttagccttaagtgtgcgaatccgaggagcagcgacagactcgagaccacgctccttcctcgggaaggaggcggcacctcgcgtttgaggcccgcctgcgtttgaggcccgcctgcgcttgcggcccgcctgcgcttgaggcctgtctgcgtttgagatctcattgggcgtgattgaggaatttggggaggtttttgggcggtattgaggacgagggggtccgttagtcagcatagaatcctggagcgggaatccctcaccgtctaaatggcgtcgggggcgggacctccgggatctggcttccgcgggccgccgccggccctgaaacgtgagggatagctgagatgaggcagctactgggatggcccccatgcgcatttacatgcagtccgactgccgagctttcgaggcagcaggatttaccgtccacattcctcactactaaccaagcttttagaacagatctcacaagaacctagaggtcggtattttttcgatttaaatttgcctgttactgacgttaacgtctttcgcctagtgagcagtagccaacatgtcagggtgggagtcatattacaaaaccgagggcgatgaagaagcagaggaagaacaagaagagaaccttgaagcaagtggagactataaatattcaggaagagatagtttgatttttttggttgatgcctccaaggctatgtttgaatctcagagtgaagatgagttgacaccttttgacatgagcatccagtgtatccaaagtgtgtacatcagtaagatcataagcagtgatcgagatctcttggctgtggtgttctatggtaccgagaaagacaaaaattcagtgaattttaaaaatatttacgtcttacaggagctggataatccaggtgcaaaacgaattctagagcttgaccagtttaaggggcagcagggacaaaaacgtttccaagacatgatgggccacggatctgactactcactcagtgaagtgctgtgggtctgtgccaacctctttagtgatgtccaattcaagatgagtcataagaggatcatgctgttcaccaatgaagacaacccccatggcaatgacagtgccaaagccagccgggccaggaccaaagccggtgatctccgagatacaggcatcttccttgacttgatgcacctgaagaaacctgggggctttgacatatccttgttctacagagatatcatcagcatagcagaggatgaggacctcagggttcactttgaggaatccagcaagctagaagacctgttgcggaaggttcgcgccaaggagaccaggaagcgagcactcagcagggtgtgcactcagcccgggtcagctgcctacactgcccttaaatcagaagcaggctgggcgcggtggctcacacctgtaatcccaacagtttgggaggccaaggcaggcggattgcttgagcctaggagttgagaccagcttgggcaacatggcaagaccctctctctacctaaaaaaaaaaaaaaaaaaatcagaagcaatgcactgctacacattgcttaacaaaccagaagcaatacattgctctgacctgactggctacttaactcgactatgccactgcctcactgtcttcctctaaaatagtttatttcaggatagcagaagctatttgctgctttatctctggcaagagctggcatgatatttctctaaagtaacacagccctccatttcgtgggggtagacagttatggtctaagagtatccttagctgtactcactagtacagtcatgtgttaattaatgatagggataccttcttagaattgcgtcattaggcgattttgtcattgtgcaaacatagagggtacttcacacacccagagagtacagcttgactacacacctgggctgtgtggttagcctgttgctcttaggctacaaacctgtatagcatattaccatactgtttactgtaggcaatggtaagtatttgtgtatctaaatgtatctaaaggtatagaaaaggtacaataaaaatatgatataggccagacacggtggctcacgccttgtaatcccaccactttgggatgccgaggcgggtggatcacaagttcaagagattgagaccatcctggcctacatggtgaaaccttgttctctactaaagatacaaaaattagctggacgtgatggcgcgcgcctgtagtcccagctactcaggaggctgagaatcgcttgaacccaggagtcagaggtggcagtgagccaagatcatgccactgcactccagcctggtgacaaagtgagactccgcctca

SEQ ID NO: 313764 - DNA, 1056 bp, Homo sapiens
  misc_feature (885)..(885): n is a, c, g, or t
  misc_feature (892)..(893): n is a, c, g, or t
aattaggctaggtacgaggctgggtgtggtaagcgggccgttatccatttgtgttgttcgccagctaggcctggcctcgtcccgcttcgctcgtgagcagtagccaacatgtcagggtgggagtcatattacaaaaccgagggcgatgaagaagcagaggaagaacaagaagagaaccttgaagcaagtggagactataaatattcaggaagagatagtttgatttttttggttgatgcctccaaggctatgtttgaatctcagagtgaagatgagttgacaccttttgacatgagcatccagtgtatccaaagtgtgtacatcagtaagatcataagcagtgatcgagatctcttggctgtggtgttctatggtaccgagaaagacaaaaattcagtgaattttaaaaatatttacgtcttacaggagctggataatccaggtgcaaaacgaattctagagcttgaccagtttaaggggcagcagggacaaaaacgtttccaagacatgatgggccacggatctgactactcactcagtgaagtgctgtgggtctgtgccaacctctttagtgatgtccaattcaagatgagtcataagaggatcatgctgttcaccaatgaagacaacccccatggcaatgacagtgccaaagccagccgggccaggaccaaagccggtgatctccgagatacaggcatcttccttgacttgatgcacctgaagaaacctgggggctttgacatatccttgttctacagagatatcatcagcatagcagaggatgaggacctcagggttcactttgaggaatccagcaagctagaagacctgttgcggaaggttcgcgccaaggagaccaggaagcgagcactcagcagtaangtgaggnnacaagattgtggtccggggggtaaaacggcaaggggctaagcccaaaaggtgtgggaactggcctggaacgcggctataacacggggggtcggcagacaaggcatagggagcgaatgagaaaaagacaaggtcacaagtggcggggaaaaccgccagaagatc

SEQ ID NO: 313765 - DNA, 1504 bp, Homo sapiens
  misc_feature (1390)..(1390): n is a, c, g, or t
  misc_feature (1404)..(1404): n is a, c, g, or t
aattaggctaggtacgaggctgggtgtggtaagcgggccgttatccatttgtgttgttcgccagctaggcctggcctcgtcccgcttcgctcggtcggtctcgcgcgcccccatagccttgctagagggttagcgttagccttaagtgtgcgaatccgaggagcagcgacagactcgagaccacgctccttcctcgggaaggaggcggcacctcgcgtttgaggcccgcctgcgtttgaggcccgcctgcgcttgcggcccgcctgcgcttgaggcctgtctgcgtttgagatctcattgggcgtgattgaggaatttggggaggtttttgggcggtattgaggacgagggggtccgttagtcagcatagaatcctggagcgggaatccctcaccgtctaaatggcgtcgggggcgggacctccgggatctggcttccgcgggccgccgccggccctgaaacgtgagggatagctgagatgaggcagctactgggatggcccccatgcgcatttacatgcagtccgactgccgagctttcgaggcagcaggatttaccgtccacattcctcactactaaccaagcttttagaacagatctcacaagaacctagaggtcggtattttttcgatttaaatttgcctgttactgacgttaacgtctttcgcctagtgagcagtagccaacatgtcagggtgggagtcatattacaaaaccgagggcgatgaagaagcagaggaagaacaagaagagaaccttgaagcaagtggagactataaatattcaggaagagatagtttgatttttttggttgatgcctccaaggctatgtttgaatctcagagtgaagatgagttgacaccttttgacatgagcatccagtgtatccaaagtgtgtacatcagtaagatcataagcagtgatcgagatctcttggctgtggtgttctatggtaccgagaaagacaaaaattcagtgaattttaaaaatatttacgtcttacaggagctggataatccaggtgcaaaacgaattctagagcttgaccagtttaaggggcagcagggacaaaaacgtttccaagacatgatgggccacggatctgactactcactcagtgaagtgctgtgggtctgtgccaacctctttagtgatgtccaattcaagatgagtcataagaggatcatgctgttcaccaatgaagacaacccccatggcaatgacagtgccaaagccagccgggccaggaccaaagccggtgatctccgagatacaggcatcttccttgacttgatgcacctgaagaaacctgggggctttgacatatccttgttctacagagatatcatcagcatagcagaggatgaggacctcagggtccttgggatcnaagtaaactgtggnaggtccccgagaccagaagacctgagtagggagcaagaatgactgggtaacgcaaagcacccaaattggaataggaaccgtaagagttccaaagaaggat

SEQ ID NO: 313766 - DNA, 1942 bp, Homo sapiens
  misc_feature (1796)..(1797): n is a, c, g, or t
  misc_feature (1799)..(1799): n is a, c, g, or t
  misc_feature (1801)..(1801): n is a, c, g, or t
  misc_feature (1803)..(1803): n is a, c, g, or t
aattaggctaggtacgaggctgggtgtggtaagcgggccgttatccatttgtgttgttcgccagctaggcctggcctcgtcccgcttcgctcggtcggtctcgcgcgcccccatagccttgctagagggttagcgttagccttaagtgtgcgaatccgaggagcagcgacagactcgagaccacgctccttcctcgggaaggaggcggcacctcgcgtttgaggcccgcctgcgtttgaggcccgcctgcgcttgcggcccgcctgcgcttgaggcctgtctgcgtttgagatctcattgggcgtgattgaggaatttggggaggtttttgggcggtattgaggacgagggggtccgttagtcagcatagaatcctggagcgggaatccctcaccgtctaaatggcgtcgggggcgggacctccgggatctggcttccgcgggccgccgccggccctgaaacgtgagggatagctgagatgaggcagctactgggatggcccccatgcgcatttacatgcagtccgactgccgagctttcgaggcagcaggatttaccgtccacattcctcactactaaccaagcttttagaacagatctcacaagaacctagaggtcggtattttttcgatttaaatttgcctgttactgacgttaacgtctttcgcctagtgagcagtagccaacatgtcagggtgggagtcatattacaaaaccgagggcgatgaagaagcagaggaagaacaagaagagaaccttgaagcaagtggagactataaatattcaggaagagatagtttgatttttttggttgatgcctccaaggctatgtttgaatctcagagtgaagatgagttgacaccttttgacatgagcatccaggcagaggaccctgaggccttccgcagtgtttgtgtccctgggtacttgagattagggagtggtgatgactcttaacgagcatgctgccttcaatccatttaaccctgagtggacacagcacatgtttcagagagcacagggttgtgggtgtatccaaagtgtgtacatcagtaagatcataagcagtgatcgagatctcttggctgtggtgttctatggtaccgagaaagacaaaaattcagtgaattttaaaaatatttacgtcttacaggagctggataatccaggtgcaaaacgaattctagagcttgaccagtttaaggggcagcagggacaaaaacgtttccaagacatgatgggccacggatctgactactcactcagtgaagtgctgtgggtctgtgccaacctctttagtgatgtccaattcaagatgagtcataagaggatcatgctgttcaccaatgaagacaacccccatggcaatgacagtgccaaagccagccgggccaggaccaaagccggtgatctccgagatacaggcatcttccttgacttgatgcacctgaagaaacctgggggctttgacatatccttgttctacagagatatcatcagcatagcagaggatgaggacctcagggttcactttgaggaatccagcaagctagaagacctgttgcggaaggttcgcgccaaggagaccaggaagcgagcactcagcaggttaaagctgaagctcaacaaagatatagtgatctctgtgggcatttataatctggtccagaaggctctcaagcctcctccaataaagctctatcgggaaacaaatgaaccagtgaaaaccaagacccggacctttaatacaagtacaggcggtttgcttctgcctagcgataccaagaggtctcagnnantntnggagcgcagatatacgcgaagagaaccgaggacgcaaggtgcgaccgggtgacgcgcagggtcacgccgggtcgggaaaaccgcgaggcccggggtccagggcggaggcccccccgcgcccaagtgaaggggtggaacg

SEQ ID NO: 313767 - DNA, 1228 bp, Homo sapiens
aattaggctaggtacgaggctgggtgtggtaagcgggccgttatccatttgtgttgttcgccagctaggcctggcctcgtcccgcttcgctcggtcggtctcgcgcgcccccatagccttgctagagggttagcgttagccttaagtgtgcgaatccgaggagcagcgacagactcgagaccacgctccttcctcgggaaggaggcggcacctcgcgtttgaggcccgcctgcgtttgaggcccgcctgcgcttgcggcccgcctgcgcttgaggcctgtctgcgtttgagatctcattgggcgtgattgaggaatttggggaggtttttgggcggtattgaggacgagggggtccgttagtcagcatagaatcctggagcgggaatccctcaccgtctaaatggcgtcgggggcgggacctccgggatctggcttccgcgggccgccgccggccctgaaacgtgagggatagctgagatgaggcagctactgggatggcccccatgcgcatttacatgcagtccgactgccgagctttcgaggcagcaggatttaccgtccacattcctcactactaaccaagcttttagaacagatctcacaagaacctagaggtcggtattttttcgatttaaatttgcctgttactgacgttaacgtctttcgcctagtgagcagtagccaacatgtcagggtgggagtcatattacaaaaccgagggcgatgaagaagcagaggaagaacaagaagagaaccttgaagcaagtggagactataaatattcaggaagagatagtttgatttttttggttgatgcctccaaggctatgtttgaatctcagagtgaagatgagttgacaccttttgacatgagcatccagtgtatccaaagtgtgtacatcagtaagatcataagcagtgatcgagatctcttggctgtggtgttctatggtaccgagaaagacaaaaattcagtgaattttaaaaatatttacgtcttacaggagctggataatccagctgcccttccgcagtgtggccaggctgcctggccttgtcctcagccagttaaaatgtgtttctcctgagctaggaagagtctacccgacataagtcgagggactttatgtttttgaggctttctgttgccatggtgatggtgtagccctcccactttgctgttccttactttactgcctgaataaagagccctaagtttgtactata

SEQ ID NO: 313768 - DNA, 861 bp, Homo sapiens
aattaggctaggtacgaggctgggtgtggtaagcgggccgttatccatttgtgttgttcgccagctaggcctggcctcgtcccgcttcgctcggtcggtctcgcgcgcccccatagccttgctagagggttagcgttagccttaagtgtgcgaatccgaggagcagcgacagactcgagaccacgctccttcctcgggaaggaggcggcacctcgcgtttgaggcccgcctgcgtttgaggcccgcctgcgcttgcggcccgcctgcgcttgaggcctgtctgcgtttgagatctcattgggcgtgattgaggaatttggggaggtttttgggcggtattgaggacgagggggtccgttagtcagcatagaatcctggagcgggaatccctcaccgtctaaatggcgtcgggggcgggacctccgggatctggcttccgcgggccgccgccggccctgaaacgtgagggatagctgagatgaggcagctactgggatggcccccatgcgcatttacatgcagtccgactgccgagctttcgaggcagcaggatttaccgtccacattcctcactactaaccaagcttttagaacagatctcacaagaacctagaggtcggtattttttcgatttaaatttgcctgttactgacgttaacgtctttcgcctagtgagcagtagccaacatgtcagggtgggagtcatattacaaaaccgagggcgatgaagaagcagaggaagaacaagaagagaaccttgaagcaagtgagactatgaatattcaggaaattaaaagtattacagaaataaatgctaactttgaaaagagtgtaagactcaataaagacaggcaaaataag

SEQ ID NO: 313769 - DNA, 354 bp, Homo sapiens
tgggaccacaggcgtgcaccaacatgcctggctgatttttaaattttttgtagagacagggtctcaccatgttgtccaagctggtcttgaactgctagactcaagcattccgcctaccttggcctaccaaagtgctgggattacaggcatgggctactgcacctgacctcaactgttttacttggggtgtttttctcagctcaccccggacctgtagtatctcaggtggttttattctaattttttcaatgtttaaattgtcatgtttcagttgagttacattattgttttaacagaagtgacagctttgagaaccccgtgctgcagcagcacttcaggaacctggaggccttg

SEQ ID NO: 313770 - DNA, 338 bp, Homo sapiens
gttgatgcctccaaggctatgtttgaatctcagagtgaagatgagttgacaccttttgacatgagcatccaggtaagactaccttttaatttaagacaaatttaaaaacagtattggctgggcatggtggcggctcatgcctgtaatctcaggacattgggaggccgagacgggcagatcacttgagcctaggagtttgagaccaacctggtaacatggagaaaccccgtctctacaaaaaatacacaaatcatccaggtgtggtggtgcaaacctgtagtcctagctactcaggaggccgaggcgagaggcttgcttgagcccaggaggtcaaacag

SEQ ID NO: 313771 - DNA, 993 bp, Homo sapiens
  misc_feature (27)..(27): n is a, c, g, or t
  misc_feature (802)..(802): n is a, c, g, or t
  misc_feature (825)..(825): n is a, c, g, or t
  misc_feature (829)..(829): n is a, c, g, or t
ttggctggtacgaggctgggttgaatnggccgaggagttggtcgcttccctgcgccaaagtgagcagtagccaacatgtcagggtgggagtcatattacaaaaccgagggcgatgaagaagcagaggaagaacaagaagagaaccttgaagcaagtggagactataaatattcaggaagagatagtttgatttttttggttgatgcctccaaggctatgtttgaatctcagagtgaagatgagttgacaccttttgacatgagcatccagtgtatccaaagtgtgtacatcagtaagatcataagcagtgatcgagatctcttggctgtggtgttctatggtaccgagaaagacaaaaattcagtgaattttaaaaatatttacgtcttacaggagctggataatccaggtgcaaaacgaattctagagcttgaccagtttaaggggcagcagggacaaaaacgtttccaagacatgatgggccacggatctgactactcactcagtgaagtgctgtgggtctgtgccaacctctttagtgatgtccaattcaagatgagtcataagaggatcatgctgttcaccaatgaagacaacccccatggcaatgacagtgccaaagccagccgggccaggaccaaagccggtgatctccgagatacaggcatcttccttgacttgatgcacctgaagaaacctgggggctttgacatatccttgttctacagagatatcatcagcatagcagaggatgaggacctcagggttccttgggggatcaccagttaaactgttgggaagntcgccagggaccggagggcctcngtangggggcacaagaatggcctggggtaaaagggagaaggggacctccaagcttgtggaataccgaacaccgcaataagggggtggcgagacagagcgatgtgggttagaaaaaacatgtggtttccgaaaacccggggactgtcgaacaacggcgcacacgaacgc

SEQ ID NO: 313772 - DNA, 242 bp, Homo sapiens
agcggggcgttgattgggaccgagtacagggcccgcgcatgcgtggattgtcgtcttctgtccaagttggtcgcttccctgcgccaaagtgagcagtagccaacatgtcagggtgggagtcatattacaaaaccgagggcgatgaagaagcagaggaagaacaagaagagaaccttgaagcaagtgagactataaatatctatcacaaccgacttattaaccacccacaatgacttattaaa

SEQ ID NO: 313773 - DNA, 697 bp, Homo sapiens
cggacgcgtgggtcgacccacgcgtccgggctatcggttgagaagcttcgcttcacatacagaagtgacagctttgagaaccccgtgctgcagcagcacttcaggaacctggaggccttggccttggatttgatggagccggaacaagcagtggacctgacattgcccaaggttgaagcaatgaataaaagactgggctccttggtggatgagtttaaggagcttgtttacccaccagattacaatcctgaagggaaagttaccaagagaaaacacgataatgaaggttctggaagcaaaaggcccaaggtggagtattcagaagaggagctgaagacccacatcagcaagggtacgctgggcaagttcactgtgcccatgctgaaagaggcctgccgggcttacgggctgaagagtgggctgaagaagcaggagctgctggaagccctcaccaagcacttccaggactgaccagaggccgcgcgtccagctgcccttccgcagtgtggccaggctgcctggccttgtcctcagccagttaaaatgtgtttctcctgagctaggaagagtctacccgacataagtcgagggactttatgtttttgaggctttctgttgccatggtgatggtgtagccctcccactttgctgttccttactttactgcctgaataaagagccctaagtttgtactata

SEQ ID NO: 313774 - DNA, 2131 bp, Homo sapiens
  misc_feature (27)..(27): n is a, c, g, or t
ttggctggtacgaggctgggttgaatnggccgaggagttggtcgcttccctgcgccaaagtgagcagtagccaacatgtcagggtgggagtcatattacaaaaccgagggcgatgaagaagcagaggaagaacaagaagagaaccttgaagcaagtggagactataaatattcaggaagagatagtttgatttttttggttgatgcctccaaggctatgtttgaatctcagagtgaagatgagttgacaccttttgacatgagcatccagtgtatccaaagtgtgtacatcagtaagatcataagcagtgatcgagatctcttggctgtggtgttctatggtaccgagaaagacaaaaattcagtgaattttaaaaatatttacgtcttacaggagctggataatccaggtgcaaaacgaattctagagcttgaccagtttaaggggcagcagggacaaaaacgtttccaagacatgatgggccacggatctgactactcactcagtgaagtgctgtgggtctgtgccaacctctttagtgatgtccaattcaagatgagtcataagaggatcatgctgttcaccaatgaagacaacccccatggcaatgacagtgccaaagccagccgggccaggaccaaagccggtgatctccgagatacaggcatcttccttgacttgatgcacctgaagaaacctgggggctttgacatatccttgttctacagagatatcatcagcatagcagaggatgaggacctcagggttcactttgaggaatccagcaagctagaagacctgttgcggaaggttcgcgccaaggagaccaggaagcgagcactcagcaggttaaagctgaagctcaacaaagatatagtgatctctgtgggcatttataatctggtccagaaggctctcaagcctcctccaataaagctctatcgggaaacaaatgaaccagtgaaaaccaagacccggacctttaatacaagtacaggcggtttgcttctgcctagcgataccaagaggtctcagatctatgggagtcgtcagattatactggagaaagaggaaacagaagagctaaaacggtttgatgatccaggtttgatgctcatgggtttcaagccgttggtactgctgaagaaacaccattacctgaggccctccctgttcgtgtacccagaggagtcgctggtgattgggagctcaaccctgttcagtgctctgctcatcaagtgtctggagaaggaggttgcagcattgtgcagatacacaccccgcaggaacatccctccttattttgtggctttggtgccacaggaagaagagttggatgaccagaaaattcaggtgactcctccaggcttccagctggtctttttaccctttgctgatgataaaaggaagatgccctttactgaaaaaatcatggcaactccagagcaggtgggcaagatgaaggctatcgttgagaagcttcgcttcacatacagaagtgacagctttgagaaccccgtgctgcagcagcacttcaggaacctggaggccttggccttggatttgatggagccggaacaagcagtggacctgacattgcccaaggttgaagcaatgaataaaagactgggctccttggtggatgagtttaaggagcttgtttacccaccagattacaatcctgaagggaaagttaccaagagaaaacacgataatgaaggttctggaagcaaaaggcccaaggtggagtattcagaagaggagctgaagacccacatcagcaagggtacgctgggcaagttcactgtgcccatgctgaaagaggcctgccgggcttacgggctgaagagtgggctgaagaagcaggagctgctggaagccctcaccaagcacttccaggactgaccagaggccgcgcgtccagctgcccttccgcagtgtggccaggctgcctggccttgtcctcagccagttaaaatgtgtttctcctgagctaggaagagtctacccgacataagtcgagggactttatgtttttgaggctttctgttgccatggtgatggtgtagccctcccactttgctgttccttactttactgcctgaataaagagccctaagtttgtactata

SEQ ID NO: 313775 - DNA, 2150 bp, Homo sapiens
gacaccacacatcgaggcacaagtttgtactagtacgaggcgggtgtgtaatcggacgagggcgcttccctgcgcaaagtgagcagtagccaacatgtcagggtgggagtcatattacaaaaccgagggcgatgaagaagcagaggaagaacaagaagagaaccttgaagcaagtggagactataaatattcaggaagagatagtttgatttttttggttgatgcctccaaggctatgtttgaatctcagagtgaagatgagttgacaccttttgacatgagcatccagtgtatccaaagtgtgtacatcagtaagatcataagcagtgatcgagatctcttggctgtggtgttctatggtaccgagaaagacaaaaattcagtgaattttaaaaatatttacgtcttacaggagctggataatccaggtgcaaaacgaattctagagcttgaccagtttaaggggcagcagggacaaaaacgtttccaagacatgatgggccacggatctgactactcactcagtgaagtgctgtgggtctgtgccaacctctttagtgatgtccaattcaagatgagtcataagaggatcatgctgttcaccaatgaagacaacccccatggcaatgacagtgccaaagccagccgggccaggaccaaagccggtgatctccgagatacaggcatcttccttgacttgatgcacctgaagaaacctgggggctttgacatatccttgttctacagagatatcatcagcatagcagaggatgaggacctcagggttcactttgaggaatccagcaagctagaagacctgttgcggaaggttcgcgccaaggagaccaggaagcgagcactcagcaggttaaagctgaagctcaacaaagatatagtgatctctgtgggcatttataatctggtccagaaggctctcaagcctcctccaataaagctctatcgggaaacaaatgaaccagtgaaaaccaagacccggacctttaatacaagtacaggcggtttgcttctgcctagcgataccaagaggtctcagatctatgggagtcgtcagattatactggagaaagaggaaacagaagagctaaaacggtttgatgatccaggtttgatgctcatgggtttcaagccgttggtactgctgaagaaacaccattacctgaggccctccctgttcgtgtacccagaggagtcgctggtgattgggagctcaaccctgttcagtgctctgctcatcaagtgtctggagaaggaggttgcagcattgtgcagatacacaccccgcaggaacatccctccttattttgtggctttggtgccacaggaagaagagttggatgaccagaaaattcaggtgactcctccaggcttccagctggtctttttaccctttgctgatgataaaaggaagatgccctttactgaaaaaatcatggcaactccagagcaggtgggcaagatgaaggctatcgttgagaagcttcgcttcacatacagaagtgacagctttgagaaccccgtgctgcagcagcacttcaggaacctggaggccttggccttggatttgatggagccggaacaagcagtggacctgacattgcccaaggttgaagcaatgaataaaagactgggctccttggtggatgagtttaaggagcttgtttacccaccagattacaatcctgaagggaaagttaccaagagaaaacacgataatgaaggttctggaagcaaaaggcccaaggtggagtattcagaagaggagctgaagacccacatcagcaagggtacgctgggcaagttcactgtgcccatgctgaaagaggcctgccgggcttacgggctgaagagtgggctgaagaagcaggagctgctggaagccctcaccaagcacttccaggactgaccagaggccgcgcgtccagctgcccttccgcagtgtggccaggctgcctggccttgtcctcagccagttaaaatgtgtttctcctgagctaggaagagtctacccgacataagtcgagggactttatgtttttgaggctttctgttgccatggtgatggtgtagccctcccactttgctgttccttactttactgcctgaataaagagccctaagtttgtactata

SEQ ID NO: 313776 - DNA, 2099 bp, Homo sapiens
aattaggctaggtacgaggctgggtgtgtgagcagtagccaacatgtcagggtgggagtcatattacaaaaccgagggcgatgaagaagcagaggaagaacaagaagagaaccttgaagcaagtggagactataaatattcaggaagagatagtttgatttttttggttgatgcctccaaggctatgtttgaatctcagagtgaagatgagttgacaccttttgacatgagcatccagtgtatccaaagtgtgtacatcagtaagatcataagcagtgatcgagatctcttggctgtggtgttctatggtaccgagaaagacaaaaattcagtgaattttaaaaatatttacgtcttacaggagctggataatccaggtgcaaaacgaattctagagcttgaccagtttaaggggcagcagggacaaaaacgtttccaagacatgatgggccacggatctgactactcactcagtgaagtgctgtgggtctgtgccaacctctttagtgatgtccaattcaagatgagtcataagaggatcatgctgttcaccaatgaagacaacccccatggcaatgacagtgccaaagccagccgggccaggaccaaagccggtgatctccgagatacaggcatcttccttgacttgatgcacctgaagaaacctgggggctttgacatatccttgttctacagagatatcatcagcatagcagaggatgaggacctcagggttcactttgaggaatccagcaagctagaagacctgttgcggaaggttcgcgccaaggagaccaggaagcgagcactcagcaggttaaagctgaagctcaacaaagatatagtgatctctgtgggcatttataatctggtccagaaggctctcaagcctcctccaataaagctctatcgggaaacaaatgaaccagtgaaaaccaagacccggacctttaatacaagtacaggcggtttgcttctgcctagcgataccaagaggtctcagatctatgggagtcgtcagattatactggagaaagaggaaacagaagagctaaaacggtttgatgatccaggtttgatgctcatgggtttcaagccgttggtactgctgaagaaacaccattacctgaggccctccctgttcgtgtacccagaggagtcgctggtgattgggagctcaaccctgttcagtgctctgctcatcaagtgtctggagaaggaggttgcagcattgtgcagatacacaccccgcaggaacatccctccttattttgtggctttggtgccacaggaagaagagttggatgaccagaaaattcaggtgactcctccaggcttccagctggtctttttaccctttgctgatgataaaaggaagatgccctttactgaaaaaatcatggcaactccagagcaggtgggcaagatgaaggctatcgttgagaagcttcgcttcacatacagaagtgacagctttgagaaccccgtgctgcagcagcacttcaggaacctggaggccttggccttggatttgatggagccggaacaagcagtggacctgacattgcccaaggttgaagcaatgaataaaagactgggctccttggtggatgagtttaaggagcttgtttacccaccagattacaatcctgaagggaaagttaccaagagaaaacacgataatgaaggttctggaagcaaaaggcccaaggtggagtattcagaagaggagctgaagacccacatcagcaagggtacgctgggcaagttcactgtgcccatgctgaaagaggcctgccgggcttacgggctgaagagtgggctgaagaagcaggagctgctggaagccctcaccaagcacttccaggactgaccagaggccgcgcgtccagctgcccttccgcagtgtggccaggctgcctggccttgtcctcagccagttaaaatgtgtttctcctgagctaggaagagtctacccgacataagtcgagggactttatgtttttgaggctttctgttgccatggtgatggtgtagccctcccactttgctgttccttactttactgcctgaataaagagccctaagtttgtactata

SEQ ID NO: 313777 - DNA, 2945 bp, Homo sapiens
aattaggctaggtacgaggctgggtgtggtaagcgggccgttatccatttgtgttgttcgccagctaggcctggcctcgtcccgcttcgctcggtcggtctcgcgcgcccccatagccttgctagagggttagcgttagccttaagtgtgcgaatccgaggagcagcgacagactcgagaccacgctccttcctcgggaaggaggcggcacctcgcgtttgaggcccgcctgcgtttgaggcccgcctgcgcttgcggcccgcctgcgcttgaggcctgtctgcgtttgagatctcattgggcgtgattgaggaatttggggaggtttttgggcggtattgaggacgagggggtccgttagtcagcatagaatcctggagcgggaatccctcaccgtctaaatggcgtcgggggcgggacctccgggatctggcttccgcgggccgccgccggccctgaaacgtgagggatagctgagatgaggcagctactgggatggcccccatgcgcatttacatgcagtccgactgccgagctttcgaggcagcaggatttaccgtccacattcctcactactaaccaagcttttagaacagatctcacaagaacctagaggtcggtattttttcgatttaaatttgcctgttactgacgttaacgtctttcgcctagtgagcagtagccaacatgtcagggtgggagtcatattacaaaaccgagggcgatgaagaagcagaggaagaacaagaagagaaccttgaagcaagtggagactataaatattcaggaagagatagtttgatttttttggttgatgcctccaaggctatgtttgaatctcagagtgaagatgagttgacaccttttgacatgagcatccagtgtatccaaagtgtgtacatcagtaagatcataagcagtgatcgagatctcttggctgtggtgttctatggtaccgagaaagacaaaaattcagtgaattttaaaaatatttacgtcttacaggagctggataatccaggtgcaaaacgaattctagagcttgaccagtttaaggggcagcagggacaaaaacgtttccaagacatgatgggccacggatctgactactcactcagtgaagtgctgtgggtctgtgccaacctctttagtgatgtccaattcaagatgagtcataagaggatcatgctgttcaccaatgaagacaacccccatggcaatgacagtgccaaagccagccgggccaggaccaaagccggtgatctccgagatacaggcatcttccttgacttgatgcacctgaagaaacctgggggctttgacatatccttgttctacagagatatcatcagcatagcagaggatgaggacctcagggttcactttgaggaatccagcaagctagaagacctgttgcggaaggttcgcgccaaggagaccaggaagcgagcactcagcaggttaaagctgaagctcaacaaagatatagtgatctctgtgggcatttataatctggtccagaaggctctcaagcctcctccaataaagctctatcgggaaacaaatgaaccagtgaaaaccaagacccggacctttaatacaagtacaggcggtttgcttctgcctagcgataccaagaggtctcagatctatgggagtcgtcagattatactggagaaagaggaaacagaagagctaaaacggtttgatgatccaggtttgatgctcatgggtttcaagccgttggtactgctgaagaaacaccattacctgaggccctccctgttcgtgtacccagaggagtcgctggtgattgggagctcaaccctgttcagtgctctgctcatcaagtgtctggagaaggaggttgcagcattgtgcagatacacaccccgcaggaacatccctccttattttgtggctttggtgccacaggaagaagagttggatgaccagaaaattcaggtgactcctccaggcttccagctggtctttttaccctttgctgatgataaaaggaagatgccctttactgaaaaaatcatggcaactccagagcaggtgggcaagatgaaggctatcgttgagaagcttcgcttcacatacagaagtgacagctttgagaaccccgtgctgcagcagcacttcaggaacctggaggccttggccttggatttgatggagccggaacaagcagtggacctgacattgcccaaggttgaagcaatgaataaaagactgggctccttggtggatgagtttaaggagcttgtttacccaccagattacaatcctgaagggaaagttaccaagagaaaacacgataatgaaggttctggaagcaaaaggcccaaggtggagtattcagaagaggagctgaagacccacatcagcaagggtacgctgggcaagttcactgtgcccatgctgaaagaggcctgccgggcttacgggctgaagagtgggctgaagaagcaggagctgctggaagccctcaccaagcacttccaggactgaccagaggccgcgcgtccagctgcccttccgcagtgtggccaggctgcctggccttgtcctcagccagttaaaatgtgtttctcctgagctaggaagagtctacccgacataagtcgagggactttatgtttttgaggctttctgttgccatggtgatggtgtagccctcccactttgctgttccttactttactgcctgaataaagagccctaagtttgtactataaaaaaaaaaaaacaaacaacaaaagaaaaaaaaaaaaaaaaagaggagaaaaaaaagaaggggggggagaaaaaaaagggggggggggaaaaatgggggggggggggaaaaaggggtagagggggggggggggggatgtgttggaagaagggattgggggaggggggaaaaagggggggggaaatgggggggggagaggggg

SEQ ID NO: 313778 - DNA, 2291 bp, Homo sapiens
aattaggctaggtacgaggctgggtgtggtaagcgggccgttatccatttgtgttgttcgccagctaggcctggcctcgtcccgcttcgctcggtcggtctcgcgcgcccccatagccttgctagagggttagcgttagccttaagtgtgcgaatccgaggagcagcgacagactcgagaccacgctccttcctcgggaaggaggcggcacctcgcgtttgaggcccgcctgcgtttgaggcccgcctgcgcttgcggcccgcctgcgcttgagtgagcagtagccaacatgtcagggtgggagtcatattacaaaagagactataaatattcaggaagagatagtttgatttttttggttgatgcctccaaggctatgtttgaatctcagagtgaagatgagttgacaccttttgacatgagcatccagtgtatccaaagtgtgtacatcagtaagatcataagcagtgatcgagatctcttggctgtggtgttctatggtaccgagaaagacaaaaattcagtgaattttaaaaatatttacgtcttacaggagctggataatccaggtgcaaaacgaattctagagcttgaccagtttaaggggcagcagggacaaaaacgtttccaagacatgatgggccacggatctgactactcactcagtgaagtgctgtgggtctgtgccaacctctttagtgatgtccaattcaagatgagtcataagaggatcatgctgttcaccaatgaagacaacccccatggcaatgacagtgccaaagccagccgggccaggaccaaagccggtgatctccgagatacaggcatcttccttgacttgatgcacctgaagaaacctgggggctttgacatatccttgttctacagagatatcatcagcatagcagaggatgaggacctcagggttcactttgaggaatccagcaagctagaagacctgttgcggaaggttcgcgccaaggagaccaggaagcgagcactcagcaggttaaagctgaagctcaacaaagatatagtgatctctgtgggcatttataatctggtccagaaggctctcaagcctcctccaataaagctctatcgggaaacaaatgaaccagtgaaaaccaagacccggacctttaatacaagtacaggcggtttgcttctgcctagcgataccaagaggtctcagatctatgggagtcgtcagattatactggagaaagaggaaacagaagagctaaaacggtttgatgatccaggtttgatgctcatgggtttcaagccgttggtactgctgaagaaacaccattacctgaggccctccctgttcgtgtacccagaggagtcgctggtgattgggagctcaaccctgttcagtgctctgctcatcaagtgtctggagaaggaggttgcagcattgtgcagatacacaccccgcaggaacatccctccttattttgtggctttggtgccacaggaagaagagttggatgaccagaaaattcaggtgactcctccaggcttccagctggtctttttaccctttgctgatgataaaaggaagatgccctttactgaaaaaatcatggcaactccagagcaggtgggcaagatgaaggctatcgttgagaagcttcgcttcacatacagaagtgacagctttgagaaccccgtgctgcagcagcacttcaggaacctggaggccttggccttggatttgatggagccggaacaagcagtggacctgacattgcccaaggttgaagcaatgaataaaagactgggctccttggtggatgagtttaaggagcttgtttacccaccagattacaatcctgaagggaaagttaccaagagaaaacacgataatgaaggttctggaagcaaaaggcccaaggtggagtattcagaagaggagctgaagacccacatcagcaagggtacgctgggcaagttcactgtgcccatgctgaaagaggcctgccgggcttacgggctgaagagtgggctgaagaagcaggagctgctggaagccctcaccaagcacttccaggactgaccagaggccgcgcgtccagctgcccttccgcagtgtggccaggctgcctggccttgtcctcagccagttaaaatgtgtttctcctgagctaggaagagtctacccgacataagtcgagggactttatgtttttgaggctttctgttgccatggtgatggtgtagccctcccactttgctgttccttactttactgcctgaataaagagccctaagtttgtactata

SEQ ID NO: 313779 - DNA, 3197 bp, Homo sapiens
aattaggctaggtacgaggctgggtgtggtaagcgggccgttatccatttgtgttgttcgccagctaggcctggcctcgtcccgcttcgctcggtcggtctcgcgcgcccccatagccttgctagagggttagcgttagccttaagtgtgcgaatccgaggagcagcgacagactcgagaccacgctccttcctcgggaaggaggcggcacctcgcgtttgaggcccgcctgcgtttgaggcccgcctgcgcttgcggcccgcctgcgcttgaggcctgtctgcgtttgagatctcattgggcgtgattgaggaatttggggaggtttttgggcggtattgaggacgagggggtccgttagtcagcatagaatcctggagcgggaatccctcaccgtctaaatggcgtcgggggcgggacctccgggatctggcttccgcgggccgccgccggccctgaaacgtgagggatagctgagatgaggcagctactgggatggcccccatgcgcatttacatgcagtccgactgccgagctttcgaggcagcaggatttaccgtccacattcctcactactaaccaagcttttagaacagatctcacaagaacctagaggtcggtattttttcgatttaaatttgcctgttactgacgttaacgtctttcgcctagtgagcagtagccaacatgtcagggtgggagtcatattacaaaaccgagggcgatgaagaagcagaggaagaacaagaagagaaccttgaagcaagtggagactataaatattcaggaagagatagtttgatttttttggttgatgcctccaaggctatgtttgaatctcagagtgaagatgagttgacaccttttgacatgagcatccagtgtatccaaagtgtgtacatcagtaagatcataagcagtgatcgagatctcttggctgtggtgttctatggtaccgagaaagacaaaaattcagtgaattttaaaaatatttacgtcttacaggagctggataatccaggtgcaaaacgaattctagagcttgaccagtttaaggggcagcagggacaaaaacgtttccaagacatgatgggccacggatctgactactcactcagtgaagtgctgtgggtctgtgccaacctctttagtgatgtccaattcaagatgagtcataagaggatcatgctgttcaccaatgaagacaacccccatggcaatgacagtgccaaagccagccgggccaggaccaaagccggtgatctccgagatacaggcatcttccttgacttgatgcacctgaagaaacctgggggctttgacatatccttgttctacagagatatcatcagcatagcagaggatgaggacctcagggttcactttgaggaatccagcaagctagaagacctgttgcggaaggttcgcgccaaggagaccaggaagcgagcactcagcaggttaaagctgaagctcaacaaagatatagtgatctctgtgggcatttataatctggtccagaaggctctcaagcctcctccaataaagctctatcgggaaacaaatgaaccagtgaaaaccaagacccggacctttaatacaagtacaggcggtttgcttctgcctagcgataccaagaggtctcagatctatgggagtcgtcagattatactggagaaagaggaaacagaagagctaaaacggtttgatgatccaggtttgatgctcatgggtttcaagccgttggtactgctgaagaaacaccattacctgaggccctccctgttcgtgtacccagaggagtcgctggtgattgggagctcaaccctgttcagtgctctgctcatcaagtgtctggagaaggaggttgcagcattgtgcagatacacaccccgcaggaacatccctccttattttgtggctttggtgccacaggaagaagagttggatgaccagaaaattcaggtgactcctccaggcttccagctggtctttttaccctttgctgatgataaaaggaagatgccctttactgaaaaaatcatggcaactccagagcaggtgggcaagatgaaggctatcgttgagaagcttcgcttcacatacagaagtgacagctttgagaaccccgtgctgcagcagcacttcaggaacctggaggccttggccttggatttgatggagccggaacaagcagtggacctgacattgcccaaggttgaagcaatgaataaaagactgggctccttggtggatgagtttaaggagcttgtttacccaccagattacaatcctgaagggaaagttaccaagagaaaacacgataatgaaggttctggaagcaaaaggcccaaggtggagtattcagaagaggagctgaagacccacatcagcaagggtacgctgggcaagttcactgtgcccatgctgaaagaggcctgccgggcttacgggctgaagagtgggctgaagaagcaggagctgctggaagccctcaccaagcacttccaggactgaccagaggccgcgcgtccagctgcccttccgcagtgtggccaggctgcctggccttgtcctcagccagttaaaatgtgtttctcctgagctaggaagagtctacccgacataagtcgagggactttatgtttttgaggctttctgttgccatggtgatggtgtagccctcccactttgctgttccttactttactgcctgaataaagagccctaagtttgtactatactaaaacaaaaacacaccacccacccaccaacacacccttttttcccccgctccccgccccacacacaaaccttttcacacacccacccccggggcccagggcccacacctagctcactcgaaccccgcgccccccaacgctgcccccccgagaaaccccggccgccgaacaccagccgccggcctccccccccgataaacaccgcccggggggcaccccgcagccttccgtaccacctccccacagggcgctccgagcagccccacgggaccctaatccccacgcatccaaggcgacccaatacaatacccccgcgcacggtcacccgacgtacctccgcgcccccagccgcaaccccgaacaaccacccacccacaccaccccccctgcgcccagccggccacgcccaccgcgcgccaaccccagccccaaaccgcccaaccccaccactcc

SEQ ID NO: 313780 - DNA, 2891 bp, Homo sapiens
aattaggctaggtacgaggctgggtgtggtaagcgggccgttatccatttgtgttgttcgccagctaggcctggcctcgtcccgcttcgctcggtcggtctcgcgcgcccccatagccttgctagagggttagcgttagccttaagtgtgcgaatccgaggagcagcgacagactcgagaccacgctccttcctcgggaaggaggcggcacctcgcgtttgaggcccgcctgcgtttgaggcccgcctgcgcttgcggcccgcctgcgcttgaggcctgtctgcgtttgagatctcattgggcgtgattgaggaatttggggaggtttttgggcggtattgaggacgagggggtccgttagtcagcatagaatcctggagcgggaatccctcaccgtctaaatggcgtcgggggcgggacctccgggatctggcttccgcgggccgccgccggccctgaaacgtgagggatagctgagatgaggcagctactgggatggcccccatgcgcatttacatgcagtccgactgccgagctttcgaggcagcaggatttaccgtccacattcctcactactaaccaagcttttagaacagatctcacaagaacctagaggtcggtattttttcgatttaaatttgcctgttactgacgttaacgtctttcgcctagtgagcagtagccaacatgtcagggtgggagtcatattacaaaaccgagggcgatgaagaagcagaggaagaacaagaagagaaccttgaagcaagtggagactataaatattcaggaagagatagtttgatttttttggttgatgcctccaaggctatgtttgaatctcagagtgaagatgagttgacaccttttgacatgagcatccaggcagaggaccctgaggccttccgcagtgtttgtgtccctgggtacttgagattagggagtggtgatgactcttaacgagcatgctgccttcaatccatttaaccctgagtggacacagcacatgtttcagagagcacagggttgtgggtgtatccaaagtgtgtacatcagtaagatcataagcagtgatcgagatctcttggctgtggtgttctatggtaccgagaaagacaaaaattcagtgaattttaaaaatatttacgtcttacaggagctggataatccaggtgcaaaacgaattctagagcttgaccagtttaaggggcagcagggacaaaaacgtttccaagacatgatgggccacggatctgactactcactcagtgaagtgctgtgggtctgtgccaacctctttagtgatgtccaattcaagatgagtcataagaggatcatgctgttcaccaatgaagacaacccccatggcaatgacagtgccaaagccagccgggccaggaccaaagccggtgatctccgagatacaggcatcttccttgacttgatgcacctgaagaaacctgggggctttgacatatccttgttctacagagatatcatcagcatagcagaggatgaggacctcagggttcactttgaggaatccagcaagctagaagacctgttgcggaaggttcgcgccaaggagaccaggaagcgagcactcagcaggttaaagctgaagctcaacaaagatatagtgatctctgtgggcatttataatctggtccagaaggctctcaagcctcctccaataaagctctatcgggaaacaaatgaaccagtgaaaaccaagacccggacctttaatacaagtacaggcggtttgcttctgcctagcgataccaagaggtctcagatctatgggagtcgtcagattatactggagaaagaggaaacagaagagctaaaacggtttgatgatccaggtttgatgctcatgggtttcaagccgttggtactgctgaagaaacaccattacctgaggccctccctgttcgtgtacccagaggagtcgctggtgattgggagctcaaccctgttcagtgctctgctcatcaagtgtctggagaaggaggttgcagcattgtgcagatacacaccccgcaggaacatccctccttattttgtggctttggtgccacaggaagaagagttggatgaccagaaaattcaggtgactcctccaggcttccagctggtctttttaccctttgctgatgataaaaggaagatgccctttactgaaaaaatcatggcaactccagagcaggtgggcaagatgaaggctatcgttgagaagcttcgcttcacatacagaagtgacagctttgagaaccccgtgctgcagcagcacttcaggaacctggaggccttggccttggatttgatggagccggaacaagcagtggacctgacattgcccaaggttgaagcaatgaataaaagactgggctccttggtggatgagtttaaggagcttgtttacccaccagattacaatcctgaagggaaagttaccaagagaaaacacgataatgaaggttctggaagcaaaaggcccaaggtggagtattcagaagaggagctgaagacccacatcagcaagggtacgctgggcaagttcactgtgcccatgctgaaagaggcctgccgggcttacgggctgaagagtgggctgaagaagcaggagctgctggaagccctcaccaagcacttccaggactgaccagaggccgcgcgtccagctgcccttccgcagtgtggccaggctgcctggccttgtcctcagccagttaaaatgtgtttctcctgagctaggaagagtctacccgacataagtcgagggactttatgtttttgaggctttctgttgccatggtgatggtgtagccctcccactttgctgttccttactttactgcctgaataaagagccctaagtttgtactata

SEQ ID NO: 313781 - DNA, 2617 bp, Homo sapiens
aattaggctaggtacgaggctgggtgtggtaagcgggccgttatccatttgtgttgttcgccagctaggcctggcctcgtcccgcttcgctcggtcggtctcgcgcgcccccatagccttgctagagggttagcgttagccttaagtgtgcgaatccgaggagcagcgacagactcgagaccacgctccttcctcgggaaggaggcggcacctcgcgtttgaggcccgcctgcgtttgaggcccgcctgcgcttgcggcccgcctgcgcttgaggcctgtctgcgtttgagatctcattgggcgtgattgaggaatttggggaggtttttgggcggtattgaggacgagggggtccgttagtcagcatagaatcctggagcgggaatccctcaccgtctaaatggcgtcgggggcgggacctccgggatctggcttccgcgggccgccgccggccctgaaacgtgagggatagctgagatgaggcagctactgggatggcccccatgcgcatttacatgcagtccgactgccgagctttcgaggcagcaggatttaccgtccacattcctcactactaaccaagcttttagaacagatctcacaagaacctagaggtcggtattttttcgatttaaatttgcctgttactgacgttaacgtctttcgcctagtgagcagtagccaacatgtcagggtgggagtcatattacaaaaccgagggcgatgaagaagcagaggaagaacaagaagagaaccttgaagcaagtggagactataaatattcaggaagagatagtttgatttttttggttgatgcctccaaggctatgtttgaatctcagagtgaagatgagttgacaccttttgacatgagcatccagtgtatccaaagtgtgtacatcagtaagatcataagcagtgatcgagatctcttggctgtggtgttctatggtaccgagaaagacaaaaattcagtgaattttaaaaatatttacgtcttacaggagctggataatccaggtgcaaaacgaattctagagcttgaccagtttaaggggcagcagggacaaaaacgtttccaagacatgatgggccacggatctgactactcactcagtgaagtgctgtgggtctgtgccaacctctttagtgatgtccaattcaagatgagtcataagaggatcatgctgttcaccaatgaagacaacccccatggcaatgacagtgccaaagccagccgggccaggaccaaagccggtgatctccgagatacaggcatcttccttgacttgatgcacctgaagaaacctgggggctttgacatatccttgttctacagagatatcatcagcatagcagaggatgaggacctcagggttcactttgaggaatccagcaagctagaagacctgttgcggaaggttcgcgccaaggagaccaggaagcgagcactcagcaggttaaagctgaagctcaacaaagatatagtgatctctgtgggcatttataatctggtccagaaggctctcaagcctcctccaataaagctctatcgggaaacaaatgaaccagtgaaaaccaagacccggacctttaatacaagtacaggcggtttgcttctgcctagcgataccaagaggtctcagatctatgggagtcgtcagattatactggagaaagaggaaacagaagagctaaaacggtttgatgatccaggtttgatgctcatgggtttcaagccgttggtactgctgaagaaacaccattacctgaggccctccctgttcgtgtacccagaggagtcgctggtgattgggagctcaaccctgttcagtgctctgctcatcaagtgtctggagaaggaggttgcagcattgtgcagatacacaccccgcaggaacatccctccttattttgtggctttggtgccacaggaagaagagttggatgaccagaaaattcaggtgactcctccaggcttccagctggtctttttaccctttgctgatgataaaaggaagatgcccctggaggccttggccttggatttgatggagccggaacaagcagtggacctgacattgcccaaggttgaagcaatgaataaaagactgggctccttggtggatgagtttaaggagcttgtttacccaccagattacaatcctgaagggaaagttaccaagagaaaacacgataatgaaggttctggaagcaaaaggcccaaggtggagtattcagaagaggagctgaagacccacatcagcaagggtacgctgggcaagttcactgtgcccatgctgaaagaggcctgccgggcttacgggctgaagagtgggctgaagaagcaggagctgctggaagccctcaccaagcacttccaggactgaccagaggccgcgcgtccagctgcccttccgcagtgtggccaggctgcctggccttgtcctcagccagttaaaatgtgtttctcctgagctaggaagagtctacccgacataagtcgagggactttatgtttttgaggctttctgttgccatggtgatggtgtagccctcccactttgctgttccttactttactgcctgaataaagagccctaagtttgtactata

SEQ ID NO: 313782 - DNA, 2585 bp, Homo sapiens
aattaggctaggtacgaggctgggtgtggtaagcgggccgttatccatttgtgttgttcgccagctaggcctggcctcgtcccgcttcgctcggtcggtctcgcgcgcccccatagccttgctagagggttagcgttagccttaagtgtgcgaatccgaggagcagcgacagactcgagaccacgctccttcctcgggaaggaggcggcacctcgcgtttgaggcccgcctgcgtttgaggcccgcctgcgcttgcggcccgcctgcgcttgaggcctgtctgcgtttgagatctcattgggcgtgattgaggaatttggggaggtttttgggcggtattgaggacgagggggtccgttagtcagcatagaatcctggagcgggaatccctcaccgtctaaatggcgtcgggggcgggacctccgggatctggcttccgcgggccgccgccggccctgaaacgtgagggatagctgagatgaggcagctactgggatggcccccatgcgcatttacatgcagtccgactgccgagctttcgaggcagcaggatttaccgtccacattcctcactactaaccaagcttttagaacagatctcacaagaacctagaggtcggtattttttcgatttaaatttgcctgttactgacgttaacgtctttcgcctagtgagcagtagccaacatgtcagggtgggagtcatattacaaaaccgagggcgatgaagaagcagaggaagaacaagaagagaaccttgaagcaagtggagactataaatattcaggaagagatagtttgatttttttggttgatgcctccaaggctatgtttgaatctcagagtgaagatgagttgacaccttttgacatgagcatccagtgtatccaaagtgtgtacatcagtaagatcataagcagtgatcgagatctcttggctgtggtgttctatggtaccgagaaagacaaaaattcagtgaattttaaaaatatttacgtcttacaggagctggataatccaggtgcaaaacgaattctagagcttgaccagtttaaggggcagcagggacaaaaacgtttccaagacatgatgggccacggatctgactactcactcagtgaagtgctgtgggtctgtgccaacctctttagtgatgtccaattcaagatgagtcataagaggatcatgctgttcaccaatgaagacaacccccatggcaatgacagtgccaaagccagccgggccaggaccaaagccggtgatctccgagatacaggcatcttccttgacttgatgcacctgaagaaacctgggggctttgacatatccttgttctacagagatatcatcagcatagcagaggatgaggacctcagggttcactttgaggaatccagcaagctagaagacctgttgcggaaggttcgcgccaaggagaccaggaagcgagcactcagcaggttaaagctgaagctcaacaaagatatagtgatctctgtgggcatttataatctggtccagaaggctctcaagcctcctccaataaagctctatcgggaaacaaatgaaccagtgaaaaccaagacccggacctttaatacaagtacaggcggtttgcttctgcctagcgataccaagaggtctcagatctatgggagtcgtcagattatactggagaaagaggaaacagaagagctaaaacggtttgatgatccaggtttgatgctcatgggtttcaagccgttggtactgctgaagaaacaccattacctgaggccctccctgttcgtgtacccagaggagtcgctggtgattgggagctcaaccctgttcagtgctctgctcatcaagtgtctggagaaggaggttgcagcattgtgcagatacacaccccgcaggaacatccctccttattttgtggctttggtgccacaggaagaagagttggatgaccagaaaattcaggtgactcctccaggcttccagctggtctttttaccctttgctgatgataaaaggaagatgccctttactgaaaaaatcatggcaactccagagcaggtgggcaagatgaaggctatcgttgagaagcttcgcttcacatacagaagtgacagctttgagaaccccgtgctgcagcagcacttcaggaacctggaggccttggccttggatttgatggagccggaacaagcagtggacctgacattgcccaaggttgaagcaatgaataaaagactgggctccttggtggatgagtttaaggagcttgtttacccaccagattacaatcctgaagggaaagttaccaagagaaaacacgctgctggaagccctcaccaagcacttccaggactgaccagaggccgcgcgtccagctgcccttccgcagtgtggccaggctgcctggccttgtcctcagccagttaaaatgtgtttctcctgagctaggaagagtctacccgacataagtcgagggactttatgtttttgaggctttctgttgccatggtgatggtgtagccctcccactttgctgttccttactttactgcctgaataaagagccctaagtttgtactata

SEQ ID NO: 313783 - DNA, 2327 bp, Homo sapiens
aattaggctaggtacgaggctgggtgtggtaagcgggccgttatccatttgtgttgttcgccagctaggcctggcctcgtcccgcttcgctcggtcggtctcgcgcgcccccatagccttgctagagggttagcgttagccttaagtgtgcgaatccgaggagcagcgacagactcgagaccacgctccttcctcgggaaggaggcggcacctcgcgtttgaggcccgcctgcgtttgaggcccgcctgcgcttgcggcccgcctgcgcttgaggcctgtctgcgtttgagatctcattgggcgtgattgaggaatttggggaggtttttgggcggtattgaggacgagggggtccgttagtcagcatagaatcctggagcgggaatccctcaccgtctaaatggcgtcgggggcgggacctccgggatctggcttccgcgggccgccgccggccctgaaacgtgagggatagctgagatgaggcagctactgggatggcccccatgcgcatttacatgcagtccgactgccgagctttcgaggcagcaggatttaccgtccacattcctcactactaaccaagcttttagaacagatctcacaagaacctagaggtcggtattttttcgatttaaatttgcctgttactgacgttaacgtctttcgcctagtgagcagtagccaacatgtcagggtgggagtcatattacaaaaccgagggcgatgaagaagcagaggaagaacaagaagagaaccttgaagcaagtggagactataaatattcaggaagagatagtttgatttttttggttgatgcctccaaggctatgtttgaatctcagagtgaagatgagttgacaccttttgacatgagcatccagtgtatccaaagtgtgtacatcagtaagatcataagcagtgatcgagatctcttggctgtggtgttctatggtaccgagaaagacaaaaattcagtgaattttaaaaatatttacgtcttacaggagctggataatccaggtgcaaaacgaattctagagcttgaccagtttaaggggcagcagggacaaaaacgtttccaagacatgatgggccacggatctgactactcactcagtgaagtgctgtgggtctgtgccaacctctttagtgatgtccaattcaagatgagtcataagaggatcatgctgttcaccaatgaagacaacccccatggcaatgacagtgccaaagccagccgggccaggaccaaagccggtgatctccgagatacaggcatcttccttgacttgatgcacctgaagaaacctgggggctttgacatatccttgttctacagagatatcatcagcatagcagaggatgaggacctcagggttcactttgaggaatccagcaagctagaagacctgttgcggaaggttcgcgccaaggagaccaggaagcgagcactcagcaggttaaagctgaagctcaacaaagatatagtgatctctgtgggcatttataatctggtccagaaggctctcaagcctcctccaataaagctctatcgggaaacaaatgaaccagtgaaaaccaagacccggacctttaatacaagtacaggcggtttgcttctgcctagcgataccaagaggtctcagatctatgggagtcgtcagattatactggagaaagaggaaacagaagagctaaaacggtttgatgatccaggtttgatgctcatgggtttcaagccgttggtactgctgaagaaacaccattacctgaggccctccctgttcgtgtacccagaggagtcgctggtgattgggagctcaaccctgttcagtgctctgctcatcaagtgtctggagaaggaggttgcagcattgtgcagatacacaccccgcaggaacatccctccttattttgtggctttggtgccacaggaagaagagttggatgaccagaaaattcaggtgactcctccaggcttccagctggtctttttaccctttgctgatgataaaaggaagatgccctttactgaaaaaatcatggcaactccagagcaggtgggcaagatgaaggctatcgttgagaagcttcgcttcacatacagaagtgacagctttgagaaccccgtgctgcagcagcacttcaggaacctggaggccttggccttggatttgatggagccggaacaagcagtggacctgacatggcccaagggtggagcaatgaaataaagactgggccctgggtgggtagtttaaagggctgttaccacccgatttaaccgggggagatccacaaaaagcatagggctgggcaagcccgg

SEQ ID NO: 313784 - DNA, 1991 bp, Homo sapiens
  misc_feature (1907)..(1907): n is a, c, g, or t
  misc_feature (1917)..(1917): n is a, c, g, or t
  misc_feature (1923)..(1923): n is a, c, g, or t
aattaggctaggtacgaggctgggtgtggtaagcgggccgttatccatttgtgttgttcgccagctaggcctggcctcgtcccgcttcgctcggtcggtctcgcgcgcccccatagccttgctagagggttagcgttagccttaagtgtgcgaatccgaggagcagcgacagactcgagaccacgctccttcctcgggaaggaggcggcacctcgcgtttgaggcccgcctgcgtttgaggcccgcctgcgcttgcggcccgcctgcgcttgaggcctgtctgcgtttgagatctcattgggcgtgattgaggaatttggggaggtttttgggcggtattgaggacgagggggtccgttagtcagcatagaatcctggagcgggaatccctcaccgtctaaatggcgtcgggggcgggacctccgggatctggcttccgcgggccgccgccggccctgaaacgtgagggatagctgagatgaggcagctactgggatggcccccatgcgcatttacatgcagtccgactgccgagctttcgaggcagcaggatttaccgtccacattcctcactactaaccaagcttttagaacagatctcacaagaacctagaggtcggtattttttcgatttaaatttgcctgttactgacgttaacgtctttcgcctagtgagcagtagccaacatgtcagggtgggagtcatattacaaaaccgagggcgatgaagaagcagaggaagaacaagaagagaaccttgaagcaagtggagactataaatattcaggaagagatagtttgatttttttggttgatgcctccaaggctatgtttgaatctcagagtgaagatgagttgacaccttttgacatgagcatccagtgtatccaaagtgtgtacatcagtaagatcataagcagtgatcgagatctcttggctgtggtgttctatggtaccgagaaagacaaaaattcagtgaattttaaaaatatttacgtcttacaggagctggataatccaggtgcaaaacgaattctagagcttgaccagtttaaggggcagcagggacaaaaacgtttccaagacatgatgggccacggatctgactactcactcagtgaagtgctgtgggtctgtgccaacctctttagtgatgtccaattcaagatgagtcataagaggatcatgctgttcaccaatgaagacaacccccatggcaatgacagtgccaaagccagccgggccaggaccaaagccggtgatctccgagatacaggcatcttccttgacttgatgcacctgaagaaacctgggggctttgacatatccttgttctacagagatatcatcagcatagcagaggatgaggacctcagggttcactttgaggaatccagcaagctagaagacctgttgcggaaggttcgcgccaaggagaccaggaagcgagcactcagcaggttaaagctgaagctcaacaaagatatagtgatctctgtgggcatttataatctggtccagaaggctctcaagcctcctccaataaagctctatcgggaaacaaatgaaccagtgaaaaccaagacccggacctttaatacaagtacaggcggtttgcttctgcctagcgataccaagaggtctcagatctatgggagtcgtcagattatactggagaaagaggaaacagaagagctaaaacggtttgatgatccaggtttgatgctcatgggtttcaagccgttggtactgctgaagaaacaccattacctgaggccctccctgttcgtgtacccagaggagtcgctggtgattgggagctcaaccctgttcagtgctctgctcatcaagtgtctggagaaggaggttgcagcattgtgcagatacacaccccgggggaatcctcntatttgggtngggccngaacaattgtttcccaaatcgggctccgctcacggtttcctttggaagggaggctttgaaaagggccg

SEQ ID NO: 313785 - DNA, 1605 bp, Homo sapiens
gacaccacacatcgaggcacaagtttgtactagtacgaggcgggtgtgtaatcggacgagggcgcttccctgcgcaaagatgagtcataagaggatcatgctgttcaccaatgaagacaacccccatggcaatgacagtgccaaagccagccgggccaggaccaaagccggtgatctccgagatacaggcatcttccttgacttgatgcacctgaagaaacctgggggctttgacatatccttgttctacagagatatcatcagcatagcagaggatgaggacctcagggttcactttgaggaatccagcaagctagaagacctgttgcggaaggttcgcgccaaggagaccaggaagcgagcactcagcaggttaaagctgaagctcaacaaagatatagtgatctctgtgggcatttataatctggtccagaaggctctcaagcctcctccaataaagctctatcgggaaacaaatgaaccagtgaaaaccaagacccggacctttaatacaagtacaggcggtttgcttctgcctagcgataccaagaggtctcagatctatgggagtcgtcagattatactggagaaagaggaaacagaagagctaaaacggtttgatgatccaggtttgatgctcatgggtttcaagccgttggtactgctgaagaaacaccattacctgaggccctccctgttcgtgtacccagaggagtcgctggtgattgggagctcaaccctgttcagtgctctgctcatcaagtgtctggagaaggaggttgcagcattgtgcagatacacaccccgcaggaacatccctccttattttgtggctttggtgccacaggaagaagagttggatgaccagaaaattcaggtgactcctccagtttactgaaaaaatcatggcaactccagagcaggtgggcaagatgaaggctatcgttgagaagcttcgcttcacatacagaagtgacagctttgagaaccccgtgctgcagcagcacttcaggaacctggaggccttggccttggatttgatggagccggaacaagcagtggacctgacattgcccaaggttgaagcaatgaataaaagactgggctccttggtggatgagtttaaggagcttgtttacccaccagattacaatcctgaagggaaagttaccaagagaaaacacgataatgaaggttctggaagcaaaaggcccaaggtggagtattcagaagaggagctgaagacccacatcagcaagggtacgctgggcaagttcactgtgcccatgctgaaagaggcctgccgggcttacgggctgaagagtgggctgaagaagcaggagctgctggaagccctcaccaagcacttccaggactgaccagaggccgcgcgtccagctgcccttccgcagtgtggccaggctgcctggccttgtcctcagccagttaaaatgtgtttctcctgagctaggaagagtctacccgacataagtcgagggactttatgtttttgaggctttctgttgccatggtgatggtgtagccctcccactttgctgttccttactttactgcctgaataaagagccctaagtttgtactata

SEQ ID NO: 313786 - DNA, 1558 bp, Homo sapiens
  misc_feature (1469)..(1469): n is a, c, g, or t
  misc_feature (1481)..(1481): n is a, c, g, or t
  misc_feature (1484)..(1484): n is a, c, g, or t
  misc_feature (1488)..(1488): n is a, c, g, or t
  misc_feature (1496)..(1496): n is a, c, g, or t
  misc_feature (1502)..(1502): n is a, c, g, or t
aattaggctaggtacgaggctgggtgtggtaagcgggccgttatccatttgtgttgttcgccagctaggcctggcctcgtcccgcttcgctcggtcggtctcgcgcgcccccatagccttgctagagggttagcgttagccttaagtgtgcgaatccgaggagcagcgacagactcgagaccacgctccttcctcgggaaggaggcggcacctcgcgtttgaggcccgcctgcgtttgaggcccgcctgcgcttgcggcccgcctgcgcttgaggcctgtctgcgtttgagatctcattgggcgtgattgaggaatttggggaggtttttgggcggtattgaggacgagggggtccgttagtcagcatagaatcctggagcgggaatccctcaccgtctaaatggcgtcgggggcgggacctccgggatctggcttccgcgggccgccgccggccctgaaacgtgagggatagctgagatgaggcagctactgggatggcccccatgcgcatttacatgcagtccgactgccgagctttcgaggcagcaggatttaccgtccacattcctcactactaaccaagcttttagaacagatctcacaagaacctagaggtcggtattttttcgatttaaatttgcctgttactgacgttaacgtctttcgcctagtgagcagtagccaacatgtcagggtgggagtcatattacaaaaccgagggcgatgaagaagcagaggaagaacaagaagagaaccttgaagcaagtggagactataaatattcaggaagagatagtttgatttttttggttgatgcctccaaggctatgtttgaatctcagagtgaagatgagttgacaccttttgacatgagcatccagtgtatccaaagtgtgtacatcagtaagatcataagcagtgatcgagatctcttggctgtggtgttctatggtaccgagaaagacaaaaattcagtgaattttaaaaatatttacgtcttacaggagctggataatccaggtgcaaaacgaattctagagcttgaccagtttaaggggcagcagggacaaaaacgtttccaagacatgatgggccacggatctgactactcactcagtgaagtgctgtgggtctgtgccaacctctttagtgatgtccaattcaagatgagtcataagaggatcatgctgttcaccaatgaagacaacccccatggcaatgacagtgccaaagccagccgggccaggaccaaagccggtgatctccgagatacaggcatcttccttgacttgatgcacctgaagaaacctgggggctttgacatatccttgttctacagagatatcatcagcatagcagaggatgaggacctcagggttcactttgaggaatccagcaagctagaagacctgttgcggaaggttcgcgccaaggagaccaggaagcgagcactcagcagtaactgaanctaacaagattnggnaccngggggctnataccnggccaaaggctaaagctcaaaagttttggaacatgacctgaaacacgcgctacata

SEQ ID NO: 313787 - DNA, 1535 bp, Homo sapiens
aattaggctaggtacgaggctgggtgtggtaagcgggccgttatccatttgtgttgttcgccagctaggcctggcctcgtcccgcttcgctcggtcggtctcgcgcgcccccatagccttgctagagggttagcgttagccttaagtgtgcgaatccgaggagcagcgacagactcgagaccacgctccttcctcgggaaggaggcggcacctcgcgtttgaggcccgcctgcgtttgaggcccgcctgcgcttgcggcccgcctgcgcttgaggcctgtctgcgtttgagatctcattgggcgtgattgaggaatttggggaggtttttgggcggtattgaggacgagggggtccgttagtcagcatagaatcctggagcgggaatccctcaccgtctaaatggcgtcgggggcgggacctccgggatctggcttccgcgggccgccgccggccctgaaacgtgagggatagctgagatgaggcagctactgggatggcccccatgcgcatttacatgcagtccgactgccgagctttcgaggcagcaggatttaccgtccacattcctcactactaaccaagcttttagaacagatctcacaagaacctagaggtcggtattttttcgatttaaatttgcctgttactgacgttaacgtctttcgcctagtgagcagtagccaacatgtcagggtgggagtcatattacaaaaccgagggcgatgaagaagcagaggaagaacaagaagagaaccttgaagcaagtggagactataaatattcaggaagagatagtttgatttttttggttgatgcctccaaggctatgtttgaatctcagagtgaagatgagttgacaccttttgacatgagcatccagtgtatccaaagtgtgtacatcagtaagatcataagcagtgatcgagatctcttggctgtggtgttctatggtaccgagaaagacaaaaattcagtgaattttaaaaatatttacgtcttacaggagctggataatccaggtgcaaaacgaattctagagcttgaccagtttaaggggcagcagggacaaaaacgtttccaagacatgatgggccacggatctgactactcactcagtgaagtgctgtgggtctgtgccaacctctttagtgatgtccaattcaagatgagtcataagaggatcatgctgttcaccaatgaagacaacccccatggcaatgacagtgccaaagccagccgggccaggaccaaagccggtgatctccgagatacaggcatcttccttgacttgatgcacctgaagaaacctgggggctttgacatatccttgttctacagagatatcatcagcatagcagaggatgaggacctcagggttcactttgaggaatccagcaagctagaagacctgttgcggaaggttcgcgccaaggagaccaggaagcgagcactcagcagtaaagctgaagctcaactcaagatatagtgatctacgtggccgtctatgaattgggatacttaggagtcgctatg

SEQ ID NO: 313788 - DNA, 1024 bp, Homo sapiens
aattaggctaggtacgaggctgggtgtggtaagcgggccgttatccatttgtgttgttcgccagctaggcctggcctcgtcccgcttcgctcggtcggtctcgcgcgcccccatagccttgctagagggttagcgttagccttaagtgtgcgaatccgaggagcagcgacagactcgagaccacgctccttcctcgggaaggaggcggcacctcgcgtttgaggcccgcctgcgtttgaggcccgcctgcgcttgcggcccgcctgcgcttgaggcctgtctgcgtttgagatctcattgggcgtgattgaggaatttggggaggtttttgggcggtattgaggacgagggggtccgttagtcagcatagaatcctggagcgggaatccctcaccgtctaaatggcgtcgggggcgggacctccgggatctggcttccgcgggccgccgccggccctgaaacgtgagggatagctgagatgaggcagctactgggatggcccccatgcgcatttacatgcagtccgactgccgagctttcgaggcagcaggatttaccgtccacattcctcactactaaccaagcttttagaacagatctcacaagaacctagaggtcggtattttttcgatttaaatttgcctgttactgacgttaacgtctttcgcctagtgagcagtagccaacatgtcagggtgggagtcatattacaaaaccgagggcgatgaagaagcagaggaagaacaagaagagaaccttgaagcaagtggagactataaatattcaggaagagatagtttgatttttttggttgatgcctccaaggctatgtttgaatctcagactggtagcttcaaacatctcacagttaaggaagctgtgctgaatggtttggtggccactgaggtgttgatgtggtttatgtcggagagattataggcaagcggggcatcattggctatgatgtttgaagcccaatctttaacatctgattatatttgatttattatttgagtgttgttgg

SEQ ID NO: 313789 - DNA, 211 bp, Homo sapiens
atttcaatgtcatgatgaaagctaatgggagaaggcttttattctacaaaaattttctttattttttcaactttattgaggttataattgatattaaaaaactgtacagatttaatgtgtacagtctaatgagttgggacatatgcttacacccatgatgctgttaccacaggcaaggtaatacacatatccgtcacctgcaagagtttct

SEQ ID NO: 313790 - DNA, 609 bp, Homo sapiens
cggccgcctttttgggctccgggacccccgggagtgggagcggcagtcggggacgcctcaactcgttcactcagggaatcctgcccatcgccttctccaggccgacttcgcagaactactgctccctggagcagccaggccagggcggcagcaccagcgccttcgagcagctgcagaggtcccgacggcgcctcatctcccagagatcttccttggagaccctggaagatattgaggagaacgcccctctccggagatgtcgaactctctcaggttcacccagaccaaagaattttaagaagattcattttatcaagaacatgcggcaacacgataccaggaatggcagaatagtccttatcagtggcagaagatccttctgtagtatattttcagtgctgccgtatcgcgacagtacccaagtcgggtcgggtatgtatatgcatgcatgctttgtagttctctgggtgaaaagatctcacaccaatgtacataatgtggccatcctttccattttcaagaagttgccttgctttgatactgcaaattcagtatttgtacactggaatgataaaaagatgttccactttcttttcagccagaaagctt

SEQ ID NO: 313791 - DNA, 554 bp, Homo sapiens
cggccgcctttttgggctccgggacccccgggagtgggagcggcagtcggggacgcctcaactcgttcactcagggaatcctgcccatcgccttctccaggccgacttcgcagaactactgctccctggagcagccaggccagggcggcagcaccagcgccttcgagcagctgcagaggtcccgacggcgcctcatctcccagagatcttccttggagaccctggaagatattgaggagaacgcccctctccggagatgtcgaactctctcaggttcacccagaccaaagaattttaagaagattcattttatcaagaacatgcggcaacacgataccaggaatggcagctcctgagtctccttgggacccctgatgagcacagcccaggctctcagtctgcaggccagatccacggctgatttgctcttctgaccctgaaaacgctggcatggaggctcccgcgtccccagacctgctgaccgtgtgatagaggccccagtattgaggaggatttggacttctcatctcagcaaggaccagagtgcagctcaa

SEQ ID NO: 313792 - DNA, 4297 bp, Homo sapiens
ggccatttttcttcctggaatgtttgaatgactcataaaatgagtttggagtggtctgaagcctctgcctccttccttgaatgctttctaagaggggctgccatgcaagaatatatgctgattttcccatacggcgcctcatctcccagagatcttccttggagaccctggaagatattgaggagaacgcccctctccggagatgtcgaactctctcaggttcacccagaccaaagaattttaagaagattcattttatcaagaacatgcggcaacacgataccaggaatggcagaatagtccttatcagtggcagaagatccttctgtagtatattttcagtgctgccgtatcgcgacagtacccaagtcggggacttgaagttggacggaggaagacaatcaactggtgcagtgagtttgaaagagatcattggtctggaaggtgtggagctgggtgctgatgggaagactgtttcctatacccaatttctgttacccacaaatgcctttggagcccggagaaataccatagactccacctcctctttctcccagttccgtaacctgagccaccgcagcctctccataggccgggcaagcggcacccaggggagcctcgacacaggtagtgacctgggagactttatggactatgacccaaatctcttggatgacccccagtggccttgtggcaaacacaaacgcgttctgatcttcccttcctacatgacaacagtgattgactacgtgaagccctcggatctcaagaaggacatgaacgagaccttcaaggagaagtttcctcacattaagctgacactcagcaaaattaggagtctgaaacgagagatgcggaagcttgcgcaggaggactgtggccttgaggagcccacggtggccatggccttcgtctactttgaaaagctcgccctcaaggggaaactcaacaaacagaaccggaagctgtgtgctggggcatgtgtgctgttagcagccaaaattggaagtgacctcaaaaaacacgaagtcaagcatttaattgacaaactggaagagaagttccggctgaacaggcgagaactgattgcctttgaattcccggtgttagtggccttggaattcgccctccacttgcccgagcacgaagtcatgccccactacagacggctggtccagagttcctagcactggccccgaggacagccaagggccatttcttctcagcttggtggagcagcacttacttactactggaaatgaaaaaaagtagaactcagaataccagacttttcttcctctcgacatagtttggggagaagcagtactagaaactttccaaggagtcttgggtgtgtagccaagaggagccatgagctatggactcctcaagcacgggaagaggaggtgtgtgctgagaacagagaggccctgccctctgtccactagcgagaatccctagctgccccagcccagtctttctccccggcattcacaaactttgcaagcgtggtccagggccttctccagatctgttccaacttggagtgtgaagggcttgagcatacgggggaagagagtctgcagaagttgggggaaaacttttaaaagataccctcattgtgtcaaagagtgtgccaatctatttttgtatcagcattggaagtgcactttcccctggggcgtgtgggtgtgtgaatgtgcaagtgtctgagagatactgcatcagccctagacccccagagccagtcccgccctttacagagcagcccttagcctggggccatgggtcaggctgaccttcaacaattatttctagatgatttctggataagaattgctctctcggtaccagacagtttgacatcctccacccttagaaaatgactgacattgttttgttactgctcctacccaccaaggggataaagaaggcgagttctgagtgttggatgagtcagtcgcgtggaaggacgtggagcgtggcgctctgtaacttcctgccgtctgccaccccgccacgtgtatttaaccctcgcactttctccactgtggagatggctggggcggcgccccacagtgtgtattcctgtcctctatgttagagtgcatcagaagcacatttactgtgctatctatatctctatataaaagtgttttataaaaacccagaataggagcacgacgcatgattggtgtttgaggcgtttgccagctgggacaaactgcgtttggagctgtggttaagctgactaaggaggcggtggctctttcttaacattcccacgtgcccagggctgttcatgcaagattttaatggtgacttgtcctggcttactgggacagtctgtatgaggcatgtcaccacactgtcgcctcatagctgcaagagagaggcaccagctgaagttcccctgactgaagagagcctgtggccatgtaaaaagagaattaaactcttgttgctttttgtatacctgtatgcgtttgtgtagacgtgtgtctcaccagtcacctttgccctgcattgctgatccccttgcgcacactgattctagtgaggtcacagattcggagcttcacacaccagcccagagaaagggcgatggaaccgaaccgagggtctgcagctttcgttagcagagctgtcagattcttgacagtcttggaggatggagaaattcaagcagcagctggtgagggccaaaacagaatacttggcttcttcagaatcttagattgcactgagtttagtcctaaatattttgctaacaaatttccttggccagaatcagttgtaagacagtgatttgggtggggggggagggaggagggagaggatatgattaatgtggtctctttggctgatcgaaagctagatcaactggtacttagggcacttgctgtttataaagcaaaattgagaaaatattcaaggtgcctccatcgcctgaactacaaaatgcccttggccttcctcacatggggtctgtcaccttgcatctctgataagccatccaccttcctggtcagtgcctacagggggagagcctttctgagaagcaggtcctgtggtatctgagaatggtctagagagctccccactgcccatctgcccccgaatttcctgccaagctctggggagtggggtggggggagggacgtccgatggatgacaggccgccagcccagacgtggggagagaagcctgagtcctttcctgtgtgataaaatcaggctaatttacttggatttggggtgatttgtttggtttttagcatttatgaggtgagcccatgaagttagtggtccattactttttaaagatgcattttcattttaaactgtctcctggcctgtggatttgtggaatggacagttttgtgggttttaatttatttgtgaggagtcggggctgagaaggcattttatcaggaggtctccttttgcacgtccatgacatgagcttttcggaggcaaaggaagtggaggagggtgagagatgcaggtcactgccagaggcacctctgtgacacggaacattccagacacgtcgcagccttgggcttcggcgaggaggaagtctgagcctgtgaagcgagaaggccaggcagtagactggctctgaggttttgccctttgacctcctccacagagggcagcttcagccccttgtaagccctgccccctctcaggactgccctgaggcctctccagtcctccccacactcagagatctgtggggaagctccgcccagccacactccttgggataatactagccggttctgcctgattccttttcccccggagccagcctagggggcccgggactcctctagtgagccttgactgttaggtaagagacaggaagcagacaagccaagaggttgctgcagctgcccccaggaggaaacgggcagcagggagtgtggcccagcccccactgtacccctccaggggcccgagcccttgccagcccaatgacaccttgaagtcaccacttttcctttcttgcccgctaataaaacctatttaaacaggaaattcataccaaatgcaaatgggttttgttttccttggcattttgttgttccgatcacagatttccctgccagggtgtctgtggttatcagctgcaggctcagcttggggcggccgcttcacacaagccactctgtaccacgtgccctaccttagtgacgggagtaaggagcttccttcccctccatgtcattccttcctgttcccttcattccccaacagcaaataaaactgttgaatgctctggctgctga

SEQ ID NO: 313793 - DNA, 3752 bp, Homo sapiens
ggattagacgacaatgtaaacgacgggaagtgtaacacacggagggtgttacaaggggggcccgtggaaacctgagggacaggtagtgacctgggagactttatggactatgacccaaatctcttggatgacccccagtggccttgtggcaaacacaaacgcgttctgatcttcccttcctacatgacaacagtgattgactacgtgaagccctcggatctcaagaaggacatgaacgagaccttcaaggagaagtttcctcacattaagctgacactcagcaaaattaggagtctgaaacgagagatgcggaagcttgcgcaggaggactgtggccttgaggagcccacggtggccatggccttcgtctactttgaaaagctcgccctcaaggggaaactcaacaaacagaaccggaagctgtgtgctggggcatgtgtgctgttagcagccaaaattggaagtgacctcaaaaaacacgaagtcaagcatttaattgacaaactggaagagaagttccggctgaacaggcgagaactgattgcctttgaattcccggtgttagtggccttggaattcgccctccacttgcccgagcacgaagtcatgccccactacagacggctggtccagagttcctagcactggccccgaggacagccaagggccatttcttctcagcttggtggagcagcacttacttactactggaaatgaaaaaaagtagaactcagaataccagacttttcttcctctcgacatagtttggggagaagcagtactagaaactttccaaggagtcttgggtgtgtagccaagaggagccatgagctatggactcctcaagcacgggaagaggaggtgtgtgctgagaacagagaggccctgccctctgtccactagcgagaatccctagctgccccagcccagtctttctccccggcattcacaaactttgcaagcgtggtccagggccttctccagatctgttccaacttggagtgtgaagggcttgagcatacgggggaagagagtctgcagaagttgggggaaaacttttaaaagataccctcattgtgtcaaagagtgtgccaatctatttttgtatcagcattggaagtgcactttcccctggggcgtgtgggtgtgtgaatgtgcaagtgtctgagagatactgcatcagccctagacccccagagccagtcccgccctttacagagcagcccttagcctggggccatgggtcaggctgaccttcaacaattatttctagatgatttctggataagaattgctctctcggtaccagacagtttgacatcctccacccttagaaaatgactgacattgttttgttactgctcctacccaccaaggggataaagaaggcgagttctgagtgttggatgagtcagtcgcgtggaaggacgtggagcgtggcgctctgtaacttcctgccgtctgccaccccgccacgtgtatttaaccctcgcactttctccactgtggagatggctggggcggcgccccacagtgtgtattcctgtcctctatgttagagtgcatcagaagcacatttactgtgctatctatatctctatataaaagtgttttataaaaacccagaataggagcacgacgcatgattggtgtttgaggcgtttgccagctgggacaaactgcgtttggagctgtggttaagctgactaaggaggcggtggctctttcttaacattcccacgtgcccagggctgttcatgcaagattttaatggtgacttgtcctggcttactgggacagtctgtatgaggcatgtcaccacactgtcgcctcatagctgcaagagagaggcaccagctgaagttcccctgactgaagagagcctgtggccatgtaaaaagagaattaaactcttgttgctttttgtatacctgtatgcgtttgtgtagacgtgtgtctcaccagtcacctttgccctgcattgctgatccccttgcgcacactgattctagtgaggtcacagattcggagcttcacacaccagcccagagaaagggcgatggaaccgaaccgagggtctgcagctttcgttagcagagctgtcagattcttgacagtcttggaggatggagaaattcaagcagcagctggtgagggccaaaacagaatacttggcttcttcagaatcttagattgcactgagtttagtcctaaatattttgctaacaaatttccttggccagaatcagttgtaagacagtgatttgggtggggggggagggaggagggagaggatatgattaatgtggtctctttggctgatcgaaagctagatcaactggtacttagggcacttgctgtttataaagcaaaattgagaaaatattcaaggtgcctccatcgcctgaactacaaaatgcccttggccttcctcacatggggtctgtcaccttgcatctctgataagccatccaccttcctggtcagtgcctacagggggagagcctttctgagaagcaggtcctgtggtatctgagaatggtctagagagctccccactgcccatctgcccccgaatttcctgccaagctctggggagtggggtggggggagggacgtccgatggatgacaggccgccagcccagacgtggggagagaagcctgagtcctttcctgtgtgataaaatcaggctaatttacttggatttggggtgatttgtttggtttttagcatttatgaggtgagcccatgaagttagtggtccattactttttaaagatgcattttcattttaaactgtctcctggcctgtggatttgtggaatggacagttttgtgggttttaatttatttgtgaggagtcggggctgagaaggcattttatcaggaggtctccttttgcacgtccatgacatgagcttttcggaggcaaaggaagtggaggagggtgagagatgcaggtcactgccagaggcacctctgtgacacggaacattccagacacgtcgcagccttgggcttcggcgaggaggaagtctgagcctgtgaagcgagaaggccaggcagtagactggctctgaggttttgccctttgacctcctccacagagggcagcttcagccccttgtaagccctgccccctctcaggactgccctgaggcctctccagtcctccccacactcagagatctgtggggaagctccgcccagccacactccttgggataatactagccggttctgcctgattccttttcccccggagccagcctagggggcccgggactcctctagtgagccttgactgttaggtaagagacaggaagcagacaagccaagaggttgctgcagctgcccccaggaggaaacgggcagcagggagtgtggcccagcccccactgtacccctccaggggcccgagcccttgccagcccaatgacaccttgaagtcaccacttttcctttcttgcccgctaataaaacctatttaaacaggaaattcataccaaatgcaaatgggttttgttttccttggcattttgttgttccgatcacagatttccctgccagggtgtctgtggttatcagctgcaggctcagcttggggcggccgcttcacacaagccactctgtaccacgtgccctaccttagtgacgggagtaaggagcttccttcccctccatgtcattccttcctgttcccttcattccccaacagcaaataaaactgttgaatgctctggctgctga

SEQ ID NO: 313794 - DNA, 3292 bp, Homo sapiens
cccccggacttctcttccagtttgtcaattaaatgcttgacaaactggaagagaagttccggctgaacaggcgagaactgattgcctttgaattcccggtgttagtggccttggaattcgccctccacttgcccgagcacgaagtcatgccccactacagacggctggtccagagttcctagcactggccccgaggacagccaagggccatttcttctcagcttggtggagcagcacttacttactactggaaatgaaaaaaagtagaactcagaataccagacttttcttcctctcgacatagtttggggagaagcagtactagaaactttccaaggagtcttgggtgtgtagccaagaggagccatgagctatggactcctcaagcacgggaagaggaggtgtgtgctgagaacagagaggccctgccctctgtccactagcgagaatccctagctgccccagcccagtctttctccccggcattcacaaactttgcaagcgtggtccagggccttctccagatctgttccaacttggagtgtgaagggcttgagcatacgggggaagagagtctgcagaagttgggggaaaacttttaaaagataccctcattgtgtcaaagagtgtgccaatctatttttgtatcagcattggaagtgcactttcccctggggcgtgtgggtgtgtgaatgtgcaagtgtctgagagatactgcatcagccctagacccccagagccagtcccgccctttacagagcagcccttagcctggggccatgggtcaggctgaccttcaacaattatttctagatgatttctggataagaattgctctctcggtaccagacagtttgacatcctccacccttagaaaatgactgacattgttttgttactgctcctacccaccaaggggataaagaaggcgagttctgagtgttggatgagtcagtcgcgtggaaggacgtggagcgtggcgctctgtaacttcctgccgtctgccaccccgccacgtgtatttaaccctcgcactttctccactgtggagatggctggggcggcgccccacagtgtgtattcctgtcctctatgttagagtgcatcagaagcacatttactgtgctatctatatctctatataaaagtgttttataaaaacccagaataggagcacgacgcatgattggtgtttgaggcgtttgccagctgggacaaactgcgtttggagctgtggttaagctgactaaggaggcggtggctctttcttaacattcccacgtgcccagggctgttcatgcaagattttaatggtgacttgtcctggcttactgggacagtctgtatgaggcatgtcaccacactgtcgcctcatagctgcaagagagaggcaccagctgaagttcccctgactgaagagagcctgtggccatgtaaaaagagaattaaactcttgttgctttttgtatacctgtatgcgtttgtgtagacgtgtgtctcaccagtcacctttgccctgcattgctgatccccttgcgcacactgattctagtgaggtcacagattcggagcttcacacaccagcccagagaaagggcgatggaaccgaaccgagggtctgcagctttcgttagcagagctgtcagattcttgacagtcttggaggatggagaaattcaagcagcagctggtgagggccaaaacagaatacttggcttcttcagaatcttagattgcactgagtttagtcctaaatattttgctaacaaatttccttggccagaatcagttgtaagacagtgatttgggtggggggggagggaggagggagaggatatgattaatgtggtctctttggctgatcgaaagctagatcaactggtacttagggcacttgctgtttataaagcaaaattgagaaaatattcaaggtgcctccatcgcctgaactacaaaatgcccttggccttcctcacatggggtctgtcaccttgcatctctgataagccatccaccttcctggtcagtgcctacagggggagagcctttctgagaagcaggtcctgtggtatctgagaatggtctagagagctccccactgcccatctgcccccgaatttcctgccaagctctggggagtggggtggggggagggacgtccgatggatgacaggccgccagcccagacgtggggagagaagcctgagtcctttcctgtgtgataaaatcaggctaatttacttggatttggggtgatttgtttggtttttagcatttatgaggtgagcccatgaagttagtggtccattactttttaaagatgcattttcattttaaactgtctcctggcctgtggatttgtggaatggacagttttgtgggttttaatttatttgtgaggagtcggggctgagaaggcattttatcaggaggtctccttttgcacgtccatgacatgagcttttcggaggcaaaggaagtggaggagggtgagagatgcaggtcactgccagaggcacctctgtgacacggaacattccagacacgtcgcagccttgggcttcggcgaggaggaagtctgagcctgtgaagcgagaaggccaggcagtagactggctctgaggttttgccctttgacctcctccacagagggcagcttcagccccttgtaagccctgccccctctcaggactgccctgaggcctctccagtcctccccacactcagagatctgtggggaagctccgcccagccacactccttgggataatactagccggttctgcctgattccttttcccccggagccagcctagggggcccgggactcctctagtgagccttgactgttaggtaagagacaggaagcagacaagccaagaggttgctgcagctgcccccaggaggaaacgggcagcagggagtgtggcccagcccccactgtacccctccaggggcccgagcccttgccagcccaatgacaccttgaagtcaccacttttcctttcttgcccgctaataaaacctatttaaacaggaaattcataccaaatgcaaatgggttttgttttccttggcattttgttgttccgatcacagatttccctgccagggtgtctgtggttatcagctgcaggctcagcttggggcggccgcttcacacaagccactctgtaccacgtgccctaccttagtgacgggagtaaggagcttccttcccctccatgtcattccttcctgttcccttcattccccaacagcaaataaaactgttgaatgctctggctgctga

SEQ ID NO: 313795 - DNA, 2527 bp, Homo sapiens
cggccgcctttttgggctccgggacccccgggagtgggagcggcagtcggggacgcctcaactcgttcactcagggaatcctgcccatcgccttctccaggccgacttcgcagaactactgctccctggagcagccaggccagggcggcagcaccagcgccttcgagcagctgcagaggtcccgacggcgcctcatctcccagagatcttccttggagaccctggaagatattgaggagaacgcccctctccggagatgtcgaactctctcaggttcacccagaccaaagaattttaagaagattcattttatcaagaacatgcggcaacacgataccaggaatggcagaatagtccttatcagtggcagaagatccttctgtagtatattttcagtgctgccgtatcgcgacagtacccaagtcggggacttgaagttggacggaggaagacaatcaactggtgcagtgagtttgaaagagatcattggtctggaaggtgtggagctgggtgctgatgggaagactgtttcctatacccaatttctgttacccacaaatgcctttggagcccggagaaataccatagactccacctcctctttctcccagttccgtaacctgagccaccgcagcctctccataggccgggcaagcggcacccaggggagcctcgacacaggtagtgacctgggagactttatggactatgacccaaatctcttggatgacccccagtggccttgtggcaaacacaaacgcgttctgatcttcccttcctacatgacaacagtgattgactacgtgaagccctcggatctcaagaaggacatgaacgagaccttcaaggagaagtttcctcacattaagctgacactcagcaaaattaggagtctgaaacgagagatgcggaagcttgcgcaggaggactgtggccttgaggagcccacggtggccatggccttcgtctactttgaaaagctcgccctcaaggggaaactcaacaaacagaaccggaagctgtgtgctggggcatgtgtgctgttagcagccaaaattggaagtgacctcaaaaaacacgaagtcaagcatttaattgacaaactggaagagaagttccggctgaacaggcgagaactgattgcctttgaattcccggtgttagtggccttggaattcgccctccacttgcccgagcacgaagtcatgccccactacagacggctggtccagagttcctagcactggccccgaggacagccaagggccatttcttctcagcttggtggagcagcacttacttactactggaaatgaaaaaaagtagaactcagaataccagacttttcttcctctcgacatagtttggggagaagcagtactagaaactttccaaggagtcttgggtgtgtagccaagaggagccatgagctatggactcctcaagcacgggaagaggaggtgtgtgctgagaacagagaggccctgccctctgtccactagcgagaatccctagctgccccagcccagtctttctccccggcattcacaaactttgcaagcgtggtccagggccttctccagatctgttccaacttggagtgtgaagggcttgagcatacgggggaagagagtctgcagaagttgggggaaaacttttaaaagataccctcattgtgtcaaagagtgtgccaatctatttttgtatcagcattggaagtgcactttcccctggggcgtgtgggtgtgtgaatgtgcaagtgtctgagagatactgcatcagccctagacccccagagccagtcccgccctttacagagcagcccttagcctggggccatgggtcaggctgaccttcaacaattatttctagatgatttctggataagaattgctctctcggtaccagacagtttgacatcctccacccttagaaaatgactgacattgttttgttactgctcctacccaccaaggggataaagaaggcgagttctgagtgttggatgagtcagtcgcgtggaaggacgtggagcgtggcgctctgtaacttcctgccgtctgccaccccgccacgtgtatttaaccctcgcactttctccactgtggagatggctggggcggcgccccacagtgtgtattcctgtcctctatgttagagtgcatcagaagcacatttactgtgctatctatatctctatataaaagtgttttataaaaacccagaataggagcacgacgcatgattggtgtttgaggcgtttgccagctgggacaaactgcgtttggagctgtggttaagctgactaaggaggcggtggctctttcttaacattcccacgtgcccagggctgttcatgcaagattttaatggtgacttgtcctggcttactgggacagtctgtatgaggcatgtcaccacactgtcgcctcatagctgcaagagagaggcaccagctgaagttcccctgactgaagagagcctgtggccatgtaaaaagagaattaaactcttgttgctttttgta

SEQ ID NO: 313796 - DNA, 3483 bp, Homo sapiens
acggacgcgtgtatccgcaggccggtgtaaaagagtgtgctggtacatagatggtgatagtagacagaaggggaatgtacctcgaagaaccacgaagtaaaacgttcaatggacggtctcactctgtcacccagactggagtgcagtggcacaatcatagctcactgcagcctccacctcccagactcaagcaatcctcccatctccgcctcccaagtagctggaactacagaaactggaagagaagttccggctgaacaggcgagaactgattgcctttgaattcccggtgttagtggccttggaattcgccctccacttgcccgagcacgaagtcatgccccactacagacggctggtccagagttcctagcactggccccgaggacagccaagggccatttcttctcagcttggtggagcagcacttacttactactggaaatgaaaaaaagtagaactcagaataccagacttttcttcctctcgacatagtttggggagaagcagtactagaaactttccaaggagtcttgggtgtgtagccaagaggagccatgagctatggactcctcaagcacgggaagaggaggtgtgtgctgagaacagagaggccctgccctctgtccactagcgagaatccctagctgccccagcccagtctttctccccggcattcacaaactttgcaagcgtggtccagggccttctccagatctgttccaacttggagtgtgaagggcttgagcatacgggggaagagagtctgcagaagttgggggaaaacttttaaaagataccctcattgtgtcaaagagtgtgccaatctatttttgtatcagcattggaagtgcactttcccctggggcgtgtgggtgtgtgaatgtgcaagtgtctgagagatactgcatcagccctagacccccagagccagtcccgccctttacagagcagcccttagcctggggccatgggtcaggctgaccttcaacaattatttctagatgatttctggataagaattgctctctcggtaccagacagtttgacatcctccacccttagaaaatgactgacattgttttgttactgctcctacccaccaaggggataaagaaggcgagttctgagtgttggatgagtcagtcgcgtggaaggacgtggagcgtggcgctctgtaacttcctgccgtctgccaccccgccacgtgtatttaaccctcgcactttctccactgtggagatggctggggcggcgccccacagtgtgtattcctgtcctctatgttagagtgcatcagaagcacatttactgtgctatctatatctctatataaaagtgttttataaaaacccagaataggagcacgacgcatgattggtgtttgaggcgtttgccagctgggacaaactgcgtttggagctgtggttaagctgactaaggaggcggtggctctttcttaacattcccacgtgcccagggctgttcatgcaagattttaatggtgacttgtcctggcttactgggacagtctgtatgaggcatgtcaccacactgtcgcctcatagctgcaagagagaggcaccagctgaagttcccctgactgaagagagcctgtggccatgtaaaaagagaattaaactcttgttgctttttgtatacctgtatgcgtttgtgtagacgtgtgtctcaccagtcacctttgccctgcattgctgatccccttgcgcacactgattctagtgaggtcacagattcggagcttcacacaccagcccagagaaagggcgatggaaccgaaccgagggtctgcagctttcgttagcagagctgtcagattcttgacagtcttggaggatggagaaattcaagcagcagctggtgagggccaaaacagaatacttggcttcttcagaatcttagattgcactgagtttagtcctaaatattttgctaacaaatttccttggccagaatcagttgtaagacagtgatttgggtggggggggagggaggagggagaggatatgattaatgtggtctctttggctgatcgaaagctagatcaactggtacttagggcacttgctgtttataaagcaaaattgagaaaatattcaaggtgcctccatcgcctgaactacaaaatgcccttggccttcctcacatggggtctgtcaccttgcatctctgataagccatccaccttcctggtcagtgcctacagggggagagcctttctgagaagcaggtcctgtggtatctgagaatggtctagagagctccccactgcccatctgcccccgaatttcctgccaagctctggggagtggggtggggggagggacgtccgatggatgacaggccgccagcccagacgtggggagagaagcctgagtcctttcctgtgtgataaaatcaggctaatttacttggatttggggtgatttgtttggtttttagcatttatgaggtgagcccatgaagttagtggtccattactttttaaagatgcattttcattttaaactgtctcctggcctgtggatttgtggaatggacagttttgtgggttttaatttatttgtgaggagtcggggctgagaaggcattttatcaggaggtctccttttgcacgtccatgacatgagcttttcggaggcaaaggaagtggaggagggtgagagatgcaggtcactgccagaggcacctctgtgacacggaacattccagacacgtcgcagccttgggcttcggcgaggaggaagtctgagcctgtgaagcgagaaggccaggcagtagactggctctgaggttttgccctttgacctcctccacagagggcagcttcagccccttgtaagccctgccccctctcaggactgccctgaggcctctccagtcctccccacactcagagatctgtggggaagctccgcccagccacactccttgggataatactagccggttctgcctgattccttttcccccggagccagcctagggggcccgggactcctctagtgagccttgactgttaggtaagagacaggaagcagacaagccaagaggttgctgcagctgcccccaggaggaaacgggcagcagggagtgtggcccagcccccactgtacccctccaggggcccgagcccttgccagcccaatgacaccttgaagtcaccacttttcctttcttgcccgctaataaaacctatttaaacaggaaattcataccaaatgcaaatgggttttgttttccttggcattttgttgttccgatcacagatttccctgccagggtgtctgtggttatcagctgcaggctcagcttggggcggccgcttcacacaagccactctgtaccacgtgccctaccttagtgacgggagtaaggagcttccttcccctccatgtcattccttcctgttcccttcattccccaacagcaaataaaactgttgaatgctctggctgctga

SEQ ID NO: 313797 - DNA, 3022 bp, Homo sapiens
tggtaatttcagtgaggggccggggtatagttttgggtgacgaggccgtggaccagacatttccaaggagtcttgggtgtgtagccaagaggagccatgagctatggactcctcaagcacgggaagaggaggtgtgtgctgagaacagagaggccctgccctctgtccactagcgagaatccctagctgccccagcccagtctttctccccggcattcacaaactttgcaagcgtggtccagggccttctccagatctgttccaacttggagtgtgaagggcttgagcatacgggggaagagagtctgcagaagttgggggaaaacttttaaaagataccctcattgtgtcaaagagtgtgccaatctatttttgtatcagcattggaagtgcactttcccctggggcgtgtgggtgtgtgaatgtgcaagtgtctgagagatactgcatcagccctagacccccagagccagtcccgccctttacagagcagcccttagcctggggccatgggtcaggctgaccttcaacaattatttctagatgatttctggataagaattgctctctcggtaccagacagtttgacatcctccacccttagaaaatgactgacattgttttgttactgctcctacccaccaaggggataaagaaggcgagttctgagtgttggatgagtcagtcgcgtggaaggacgtggagcgtggcgctctgtaacttcctgccgtctgccaccccgccacgtgtatttaaccctcgcactttctccactgtggagatggctggggcggcgccccacagtgtgtattcctgtcctctatgttagagtgcatcagaagcacatttactgtgctatctatatctctatataaaagtgttttataaaaacccagaataggagcacgacgcatgattggtgtttgaggcgtttgccagctgggacaaactgcgtttggagctgtggttaagctgactaaggaggcggtggctctttcttaacattcccacgtgcccagggctgttcatgcaagattttaatggtgacttgtcctggcttactgggacagtctgtatgaggcatgtcaccacactgtcgcctcatagctgcaagagagaggcaccagctgaagttcccctgactgaagagagcctgtggccatgtaaaaagagaattaaactcttgttgctttttgtatacctgtatgcgtttgtgtagacgtgtgtctcaccagtcacctttgccctgcattgctgatccccttgcgcacactgattctagtgaggtcacagattcggagcttcacacaccagcccagagaaagggcgatggaaccgaaccgagggtctgcagctttcgttagcagagctgtcagattcttgacagtcttggaggatggagaaattcaagcagcagctggtgagggccaaaacagaatacttggcttcttcagaatcttagattgcactgagtttagtcctaaatattttgctaacaaatttccttggccagaatcagttgtaagacagtgatttgggtggggggggagggaggagggagaggatatgattaatgtggtctctttggctgatcgaaagctagatcaactggtacttagggcacttgctgtttataaagcaaaattgagaaaatattcaaggtgcctccatcgcctgaactacaaaatgcccttggccttcctcacatggggtctgtcaccttgcatctctgataagccatccaccttcctggtcagtgcctacagggggagagcctttctgagaagcaggtcctgtggtatctgagaatggtctagagagctccccactgcccatctgcccccgaatttcctgccaagctctggggagtggggtggggggagggacgtccgatggatgacaggccgccagcccagacgtggggagagaagcctgagtcctttcctgtgtgataaaatcaggctaatttacttggatttggggtgatttgtttggtttttagcatttatgaggtgagcccatgaagttagtggtccattactttttaaagatgcattttcattttaaactgtctcctggcctgtggatttgtggaatggacagttttgtgggttttaatttatttgtgaggagtcggggctgagaaggcattttatcaggaggtctccttttgcacgtccatgacatgagcttttcggaggcaaaggaagtggaggagggtgagagatgcaggtcactgccagaggcacctctgtgacacggaacattccagacacgtcgcagccttgggcttcggcgaggaggaagtctgagcctgtgaagcgagaaggccaggcagtagactggctctgaggttttgccctttgacctcctccacagagggcagcttcagccccttgtaagccctgccccctctcaggactgccctgaggcctctccagtcctccccacactcagagatctgtggggaagctccgcccagccacactccttgggataatactagccggttctgcctgattccttttcccccggagccagcctagggggcccgggactcctctagtgagccttgactgttaggtaagagacaggaagcagacaagccaagaggttgctgcagctgcccccaggaggaaacgggcagcagggagtgtggcccagcccccactgtacccctccaggggcccgagcccttgccagcccaatgacaccttgaagtcaccacttttcctttcttgcccgctaataaaacctatttaaacaggaaattcataccaaatgcaaatgggttttgttttccttggcattttgttgttccgatcacagatttccctgccagggtgtctgtggttatcagctgcaggctcagcttggggcggccgcttcacacaagccactctgtaccacgtgccctaccttagtgacgggagtaaggagcttccttcccctccatgtcattccttcctgttcccttcattccccaacagcaaataaaactgttgaatgctctggctgctga

SEQ ID NO: 313798 - DNA, 2232 bp, Homo sapiens
gggtcgacccacgcgtccggtttgaggcgtttgccagctgggacaaacaccaatcatgcgtcgtgctcctattctgggtttttataaaacacttttatatagcgatatagatagcacgacgcatgattggtgtttgaggcgtttgccagctgggacaaactgcgtttggagctgtggttaagctgactaaggaggcggtggctctttcttaacattcccacgtgcccagggctgttcatgcaagattttaatggtgacttgtcctggcttactgggacagtctgtatgaggcatgtcaccacactgtcgcctcatagctgcaagagagaggcaccagctgaagttcccctgactgaagagagcctgtggccatgtaaaaagagaattaaactcttgttgctttttgtatacctgtatgcgtttgtgtagacgtgtgtctcaccagtcacctttgccctgcattgctgatccccttgcgcacactgattctagtgaggtcacagattcggagcttcacacaccagcccagagaaagggcgatggaaccgaaccgagggtctgcagctttcgttagcagagctgtcagattcttgacagtcttggaggatggagaaattcaagcagcagctggtgagggccaaaacagaatacttggcttcttcagaatcttagattgcactgagtttagtcctaaatattttgctaacaaatttccttggccagaatcagttgtaagacagtgatttgggtggggggggagggaggagggagaggatatgattaatgtggtctctttggctgatcgaaagctagatcaactggtacttagggcacttgctgtttataaagcaaaattgagaaaatattcaaggtgcctccatcgcctgaactacaaaatgcccttggccttcctcacatggggtctgtcaccttgcatctctgataagccatccaccttcctggtcagtgcctacagggggagagcctttctgagaagcaggtcctgtggtatctgagaatggtctagagagctccccactgcccatctgcccccgaatttcctgccaagctctggggagtggggtggggggagggacgtccgatggatgacaggccgccagcccagacgtggggagagaagcctgagtcctttcctgtgtgataaaatcaggctaatttacttggatttggggtgatttgtttggtttttagcatttatgaggtgagcccatgaagttagtggtccattactttttaaagatgcattttcattttaaactgtctcctggcctgtggatttgtggaatggacagttttgtgggttttaatttatttgtgaggagtcggggctgagaaggcattttatcaggaggtctccttttgcacgtccatgacatgagcttttcggaggcaaaggaagtggaggagggtgagagatgcaggtcactgccagaggcacctctgtgacacggaacattccagacacgtcgcagccttgggcttcggcgaggaggaagtctgagcctgtgaagcgagaaggccaggcagtagactggctctgaggttttgccctttgacctcctccacagagggcagcttcagccccttgtaagccctgccccctctcaggactgccctgaggcctctccagtcctccccacactcagagatctgtggggaagctccgcccagccacactccttgggataatactagccggttctgcctgattccttttcccccggagccagcctagggggcccgggactcctctagtgagccttgactgttaggtaagagacaggaagcagacaagccaagaggttgctgcagctgcccccaggaggaaacgggcagcagggagtgtggcccagcccccactgtacccctccaggggcccgagcccttgccagcccaatgacaccttgaagtcaccacttttcctttcttgcccgctaataaaacctatttaaacaggaaattcataccaaatgcaaatgggttttgttttccttggcattttgttgttccgatcacagatttccctgccagggtgtctgtggttatcagctgcaggctcagcttggggcggccgcttcacacaagccactctgtaccacgtgccctaccttagtgacgggagtaaggagcttccttcccctccatgtcattccttcctgttcccttcattccccaacagcaaataaaactgttgaatgctctggctgctga

SEQ ID NO: 313799 - DNA, 492 bp, Homo sapiens
cggccgcctttttgggctccgggacccccgggagtgggagcggcagtcggggacgcctcaactcgttcactcagggaatcctgcccatcgccttctccaggccgacttcgcagaactactgctccctggagcagccaggccagggcggcagcaccagcgccttcgagcagctgcagaggtcccgacggcgcctcatctcccagagatcttccttggagaccctggaagatattgaggagaacgcccctctccggagatgtcgaactctctcaggttcacccagaccaaagaattttaagaagattcattttatcaagaacatgcggcaacacgataccaggaatggcagaatagtccttatcagtggcagaagatccttctgtagtatattttcagtgctgccgtatcgcgacagtacccaagtcggttcccctgactgaagagagcctgtggccatgtaaaaagagaattaaactcttgttgctttttgta

SEQ ID NO: 313800 - DNA, 4351 bp, Homo sapiens
cggccgcctttttgggctccgggacccccgggagtgggagcggcagtcggggacgcctcaactcgttcactcagggaatcctgcccatcgccttctccaggccgacttcgcagaactactgctccctggagcagccaggccagggcggcagcaccagcgccttcgagcagctgcagaggtcccgacggcgcctcatctcccagagatcttccttggagaccctggaagatattgaggagaacgcccctctccggagatgtcgaactctctcaggttcacccagaccaaagaattttaagaagattcattttatcaagaacatgcggcaacacgataccaggaatggcagaatagtccttatcagtggcagaagatccttctgtagtatattttcagtgctgccgtatcgcgacagtacccaagtcggggacttgaagttggacggaggaagacaatcaactggtgcagtgagtttgaaagagatcattggtctggaaggtgtggagctgggtgctgatgggaagactgtttcctatacccaatttctgttacccacaaatgcctttggagcccggagaaataccatagactccacctcctctttctcccagttccgtaacctgagccaccgcagcctctccataggccgggcaagcggcacccaggggagcctcgacacaggtagtgacctgggagactttatggactatgacccaaatctcttggatgacccccagtggccttgtggcaaacacaaacgcgttctgatcttcccttcctacatgacaacagtgattgactacgtgaagccctcggatctcaagaaggacatgaacgagaccttcaaggagaagtttcctcacattaagctgacactcagcaaaattaggagtctgaaacgagagatgcggaagcttgcgcaggaggactgtggccttgaggagcccacggtggccatggccttcgtctactttgaaaagctcgccctcaaggggaaactcaacaaacagaaccggaagctgtgtgctggggcatgtgtgctgttagcagccaaaattggaagtgacctcaaaaaacacgaagtcaagcatttaattgacaaactggaagagaagttccggctgaacaggcgagaactgattgcctttgaattcccggtgttagtggccttggaattcgccctccacttgcccgagcacgaagtcatgccccactacagacggctggtccagagttcctagcactggccccgaggacagccaagggccatttcttctcagcttggtggagcagcacttacttactactggaaatgaaaaaaagtagaactcagaataccagacttttcttcctctcgacatagtttggggagaagcagtactagaaactttccaaggagtcttgggtgtgtagccaagaggagccatgagctatggactcctcaagcacgggaagaggaggtgtgtgctgagaacagagaggccctgccctctgtccactagcgagaatccctagctgccccagcccagtctttctccccggcattcacaaactttgcaagcgtggtccagggccttctccagatctgttccaacttggagtgtgaagggcttgagcatacgggggaagagagtctgcagaagttgggggaaaacttttaaaagataccctcattgtgtcaaagagtgtgccaatctatttttgtatcagcattggaagtgcactttcccctggggcgtgtgggtgtgtgaatgtgcaagtgtctgagagatactgcatcagccctagacccccagagccagtcccgccctttacagagcagcccttagcctggggccatgggtcaggctgaccttcaacaattatttctagatgatttctggataagaattgctctctcggtaccagacagtttgacatcctccacccttagaaaatgactgacattgttttgttactgctcctacccaccaaggggataaagaaggcgagttctgagtgttggatgagtcagtcgcgtggaaggacgtggagcgtggcgctctgtaacttcctgccgtctgccaccccgccacgtgtatttaaccctcgcactttctccactgtggagatggctggggcggcgccccacagtgtgtattcctgtcctctatgttagagtgcatcagaagcacatttactgtgctatctatatctctatataaaagtgttttataaaaacccagaataggagcacgacgcatgattggtgtttgaggcgtttgccagctgggacaaactgcgtttggagctgtggttaagctgactaaggaggcggtggctctttcttaacattcccacgtgcccagggctgttcatgcaagattttaatggtgacttgtcctggcttactgggacagtctgtatgaggcatgtcaccacactgtcgcctcatagctgcaagagagaggcaccagctgaagttcccctgactgaagagagcctgtggccatgtaaaaagagaattaaactcttgttgctttttgtatacctgtatgcgtttgtgtagacgtgtgtctcaccagtcacctttgccctgcattgctgatccccttgcgcacactgattctagtgaggtcacagattcggagcttcacacaccagcccagagaaagggcgatggaaccgaaccgagggtctgcagctttcgttagcagagctgtcagattcttgacagtcttggaggatggagaaattcaagcagcagctggtgagggccaaaacagaatacttggcttcttcagaatcttagattgcactgagtttagtcctaaatattttgctaacaaatttccttggccagaatcagttgtaagacagtgatttgggtggggggggagggaggagggagaggatatgattaatgtggtctctttggctgatcgaaagctagatcaactggtacttagggcacttgctgtttataaagcaaaattgagaaaatattcaaggtgcctccatcgcctgaactacaaaatgcccttggccttcctcacatggggtctgtcaccttgcatctctgataagccatccaccttcctggtcagtgcctacagggggagagcctttctgagaagcaggtcctgtggtatctgagaatggtctagagagctccccactgcccatctgcccccgaatttcctgccaagctctggggagtggggtggggggagggacgtccgatggatgacaggccgccagcccagacgtggggagagaagcctgagtcctttcctgtgtgataaaatcaggctaatttacttggatttggggtgatttgtttggtttttagcatttatgaggtgagcccatgaagttagtggtccattactttttaaagatgcattttcattttaaactgtctcctggcctgtggatttgtggaatggacagttttgtgggttttaatttatttgtgaggagtcggggctgagaaggcattttatcaggaggtctccttttgcacgtccatgacatgagcttttcggaggcaaaggaagtggaggagggtgagagatgcaggtcactgccagaggcacctctgtgacacggaacattccagacacgtcgcagccttgggcttcggcgaggaggaagtctgagcctgtgaagcgagaaggccaggcagtagactggctctgaggttttgccctttgacctcctccacagagggcagcttcagccccttgtaagccctgccccctctcaggactgccctgaggcctctccagtcctccccacactcagagatctgtggggaagctccgcccagccacactccttgggataatactagccggttctgcctgattccttttcccccggagccagcctagggggcccgggactcctctagtgagccttgactgttaggtaagagacaggaagcagacaagccaagaggttgctgcagctgcccccaggaggaaacgggcagcagggagtgtggcccagcccccactgtacccctccaggggcccgagcccttgccagcccaatgacaccttgaagtcaccacttttcctttcttgcccgctaataaaacctatttaaacaggaaattcataccaaatgcaaatgggttttgttttccttggcattttgttgttccgatcacagatttccctgccagggtgtctgtggttatcagctgcaggctcagcttggggcggccgcttcacacaagccactctgtaccacgtgccctaccttagtgacgggagtaaggagcttccttcccctccatgtcattccttcctgttcccttcattccccaacagcaaataaaactgttgaatgctctggctgctga

SEQ ID NO: 313801 - DNA, 4249 bp, Homo sapiens
cggccgcctttttgggctccgggacccccgggagtgggagcggcagtcggggacgcctcaactcgttcactcagggaatcctgcccatcgccttctccaggccgacttcgcagaactactgctccctggagcagccaggccagggcggcagcaccagcgccttcgagcagctgcagaggtcccgacggcgcctcatctcccagagatcttccttggagaccctggaagatattgaggagaacgcccctctccggagatgtcgaactctctcaggttcacccagaccaaagaattttaagaagattcattttatcaagaacatgcggcaacacgataccaggaatggcagaatagtccttatcagtggcagaagatccttctgtagtatattttcagtgctgccgtatcgcgacagtacccaagtcggggacttgaagttggacggaggaagacaatcaactggtgcagtgagtttgaaagagatcattggtctggaaggtgtggagctgggtgctgatgggaagactgtttcctatacccaatttctgttacccacaaatgcctttggagcccggagaaataccatagactccacctcctctttctcccagttccgtaacctgagccaccgcagcctctccataggccgggcaagcggcacccaggggagcctcgacacaggtagtgacctgggagactttatggactatgacccaaatctcttggatgacccccagtggccttgtggcaaacacaaacgcgttctgatcttcccttcctacatgacaacagtgattgactacgtgaagccctcggatctcaagaaggacatgaacgagaccttcaaggagaagtttcctcacattaagctgacactcagcaaaattaggagtctgaaacgagagatgcggaagcttgcgcaggaggactgtggccttgaggagcccacggtggccatggccttcgtctactttgaaaagctcgccctcaaggggaaactcaacaaacagaaccggaagctgtgtgctggggcatgtgtgctgttagcagccaaaattggaagtgacctcaaaaaacacgaagtcaagcatttaattgacaaactggaagagaagttccggctgaacaggcgagaactgattgcctttgaattcccggtgttagtggccttggaattcgccctccacttgcccgagcacgaagtcatgccccactacagacggctggtccagagttcctagcactggccccgaggacagccaagggccatttcttctcagcttggtggagcagcacttacttactactggaaatgaaaaaaagtagaactcagaataccagacttttcttcctctcgacatagtttggggagaagcagtactagaaactttccaaggagtcttgggtgtgtagccaagaggacccagtctttctccccggcattcacaaactttgcaagcgtggtccagggccttctccagatctgttccaacttggagtgtgaagggcttgagcatacgggggaagagagtctgcagaagttgggggaaaacttttaaaagataccctcattgtgtcaaagagtgtgccaatctatttttgtatcagcattggaagtgcactttcccctggggcgtgtgggtgtgtgaatgtgcaagtgtctgagagatactgcatcagccctagacccccagagccagtcccgccctttacagagcagcccttagcctggggccatgggtcaggctgaccttcaacaattatttctagatgatttctggataagaattgctctctcggtaccagacagtttgacatcctccacccttagaaaatgactgacattgttttgttactgctcctacccaccaaggggataaagaaggcgagttctgagtgttggatgagtcagtcgcgtggaaggacgtggagcgtggcgctctgtaacttcctgccgtctgccaccccgccacgtgtatttaaccctcgcactttctccactgtggagatggctggggcggcgccccacagtgtgtattcctgtcctctatgttagagtgcatcagaagcacatttactgtgctatctatatctctatataaaagtgttttataaaaacccagaataggagcacgacgcatgattggtgtttgaggcgtttgccagctgggacaaactgcgtttggagctgtggttaagctgactaaggaggcggtggctctttcttaacattcccacgtgcccagggctgttcatgcaagattttaatggtgacttgtcctggcttactgggacagtctgtatgaggcatgtcaccacactgtcgcctcatagctgcaagagagaggcaccagctgaagttcccctgactgaagagagcctgtggccatgtaaaaagagaattaaactcttgttgctttttgtatacctgtatgcgtttgtgtagacgtgtgtctcaccagtcacctttgccctgcattgctgatccccttgcgcacactgattctagtgaggtcacagattcggagcttcacacaccagcccagagaaagggcgatggaaccgaaccgagggtctgcagctttcgttagcagagctgtcagattcttgacagtcttggaggatggagaaattcaagcagcagctggtgagggccaaaacagaatacttggcttcttcagaatcttagattgcactgagtttagtcctaaatattttgctaacaaatttccttggccagaatcagttgtaagacagtgatttgggtggggggggagggaggagggagaggatatgattaatgtggtctctttggctgatcgaaagctagatcaactggtacttagggcacttgctgtttataaagcaaaattgagaaaatattcaaggtgcctccatcgcctgaactacaaaatgcccttggccttcctcacatggggtctgtcaccttgcatctctgataagccatccaccttcctggtcagtgcctacagggggagagcctttctgagaagcaggtcctgtggtatctgagaatggtctagagagctccccactgcccatctgcccccgaatttcctgccaagctctggggagtggggtggggggagggacgtccgatggatgacaggccgccagcccagacgtggggagagaagcctgagtcctttcctgtgtgataaaatcaggctaatttacttggatttggggtgatttgtttggtttttagcatttatgaggtgagcccatgaagttagtggtccattactttttaaagatgcattttcattttaaactgtctcctggcctgtggatttgtggaatggacagttttgtgggttttaatttatttgtgaggagtcggggctgagaaggcattttatcaggaggtctccttttgcacgtccatgacatgagcttttcggaggcaaaggaagtggaggagggtgagagatgcaggtcactgccagaggcacctctgtgacacggaacattccagacacgtcgcagccttgggcttcggcgaggaggaagtctgagcctgtgaagcgagaaggccaggcagtagactggctctgaggttttgccctttgacctcctccacagagggcagcttcagccccttgtaagccctgccccctctcaggactgccctgaggcctctccagtcctccccacactcagagatctgtggggaagctccgcccagccacactccttgggataatactagccggttctgcctgattccttttcccccggagccagcctagggggcccgggactcctctagtgagccttgactgttaggtaagagacaggaagcagacaagccaagaggttgctgcagctgcccccaggaggaaacgggcagcagggagtgtggcccagcccccactgtacccctccaggggcccgagcccttgccagcccaatgacaccttgaagtcaccacttttcctttcttgcccgctaataaaacctatttaaacaggaaattcataccaaatgcaaatgggttttgttttccttggcattttgttgttccgatcacagatttccctgccagggtgtctgtggttatcagctgcaggctcagcttggggcggccgcttcacacaagccactctgtaccacgtgccctaccttagtgacgggagtaaggagcttccttcccctccatgtcattccttcctgttcccttcattccccaacagcaaataaaactgttgaatgctctggctgctga

SEQ ID NO: 313802 - DNA, 740 bp, Homo sapiens
cggccgcctttttgggctccgggacccccgggagtgggagcggcagtcggggacgcctcaactcgttcactcagggaatcctgcccatcgccttctccaggccgacttcgcagaactactgctccctggagcagccaggccagggcggcagcaccagcgccttcgagcagctgcagaggtcccgacggcgcctcatctcccagagatcttccttggagaccctggaagatattgaggagaacgcccctctccggagatgtcgaactctctcaggttcacccagaccaaagaattttaagaagattcattttatcaagaacatgcggcaacacgataccaggaatggcagaatagtccttatcagtggcagaagatccttctgtagtatattttcagtgctgccgtatcgcgacagtacccaagtcggggacttgaagttggacggaggaagacaatcaactggtgcagtgagtttgaaagagatcattggtctggaaggtgtggagctgggtgctgatgggaagactgtttcctatacccaatttctgttacccacaaatgcctttggagcccggagaaataccatagactccacctcctctttctcccagttccgtaacctgagccaccgcagcctctccataggccgggcaagcggcacccaggggagcctcgacacaggtggtgacctgggagactttatggactatggagaggctgcggtggctcaggttacggaa

SEQ ID NO: 313803 - DNA, 4816 bp, Homo sapiens
agtggcgtcggaactgcaaagcacctgtgagcttgcggaagtcagttcagactccagcccgctccagcccggcccgacccgaccgcacccggcgcctgccctcgctcggcgtccccggccagccatgggcccttggagccgcagcctctcggcgctgctgctgctgctgcaggtctcctcttggctctgccaggagccggagccctgccaccctggctttgacgccgagagctacacgttcacggtgccccggcgccacctggagagaggccgcgtcctgggcagagtgaattttgaagattgcaccggtcgacaaaggacagcctatttttccctcgacacccgattcaaagtgggcacagatggtgtgattacagtcaaaaggcctctacggtttcataacccacagatccatttcttggtctacgcctgggactccacctacagaaagttttccaccaaagtcacgctgaatacagtggggcaccaccaccgccccccgccccatcaggcctccgtttctggaatccaagcagaattgctcacatttcccaactcctctcctggcctcagaagacagaagagagactgggttattcctcccatcagctgcccagaaaatgaaaaaggcccatttcctaaaaacctggttcagatcaaatccaacaaagacaaagaaggcaaggttttctacagcatcactggccaaggagctgacacaccccctgttggtgtctttattattgaaagagaaacaggatggctgaaggtgacagagcctctggatagagaacgcattgccacatacactctcttctctcacgctgtgtcatccaacgggaatgcagttgaggatccaatggagattttgatcacggtaaccgatcagaatgacaacaagcccgaattcacccaggaggtctttaaggggtctgtcatggaaggtgctcttccaggaacctctgtgatggaggtcacagccacagacgcggacgatgatgtgaacacctacaatgccgccatcgcttacaccatcctcagccaagatcctgagctccctgacaaaaatatgttcaccattaacaggaacacaggagtcatcagtgtggtcaccactgggctggaccgagagagtttccctacgtataccctggtggttcaagctgctgaccttcaaggtgaggggttaagcacaacagcaacagctgtgatcacagtcactgacaccaacgataatcctccgatcttcaatcccaccacgtacaagggtcaggtgcctgagaacgaggctaacgtcgtaatcaccacactgaaagtgactgatgctgatgcccccaataccccagcgtgggaggctgtatacaccatattgaatgatgatggtggacaatttgtcgtcaccacaaatccagtgaacaacgatggcattttgaaaacagcaaagggcttggattttgaggccaagcagcagtacattctacacgtagcagtgacgaatgtggtaccttttgaggtctctctcaccacctccacagccaccgtcaccgtggatgtgctggatgtgaatgaagcccccatctttgtgcctcctgaaaagagagtggaagtgtccgaggactttggcgtgggccaggaaatcacatcctacactgcccaggagccagacacatttatggaacagaaaataacatatcggatttggagagacactgccaactggctggagattaatccggacactggtgccatttccactcgggctgagctggacagggaggattttgagcacgtgaagaacagcacgtacacagccctaatcatagctacagacaatggttctccagttgctactggaacagggacacttctgctgatcctgtctgatgtgaatgacaacgcccccataccagaacctcgaactatattcttctgtgagaggaatccaaagcctcaggtcataaacatcattgatgcagaccttcctcccaatacatctcccttcacagcagaactaacacacggggcgagtgccaactggaccattcagtacaacgacccaacccaagaatctatcattttgaagccaaagatggccttagaggtgggtgactacaaaatcaatctcaagctcatggataaccagaataaagaccaagtgaccaccttagaggtcagcgtgtgtgactgtgaaggggccgccggcgtctgtaggaaggcacagcctgtcgaagcaggattgcaaattcctgccattctggggattcttggaggaattcttgctttgctaattctgattctgctgctcttgctgtttcttcggaggagagcggtggtcaaagagcccttactgcccccagaggatgacacccgggacaacgtttattactatgatgaagaaggaggcggagaagaggaccaggactttgacttgagccagctgcacaggggcctggacgctcggcctgaagtgactcgtaacgacgttgcaccaaccctcatgagtgtcccccggtatcttccccgccctgccaatcccgatgaaattggaaattttattgatgaaaatctgaaagcggctgatactgaccccacagccccgccttatgattctctgctcgtgtttgactatgaaggaagcggttccgaagctgctagtctgagctccctgaactcctcagagtcagacaaagaccaggactatgactacttgaacgaatggggcaatcgcttcaagaagctggctgacatgtacggaggcggcgaggacgactaggggactcgagagaggcgggccccagacccatgtgctgggaaatgcagaaatcacgttgctggtggtttttcagctcccttcccttgagatgagtttctggggaaaaaaaagagactggttagtgatgcagttagtatagctttatactctctccactttatagctctaataagtttgtgttagaaaagtttcgacttatttcttaaagcttttttttttttcccatcactctttacatggtggtgatgtccaaaagatacccaaattttaatattccagaagaacaactttagcatcagaaggttcacccagcaccttgcagattttcttaaggaattttgtctcacttttaaaaagaaggggagaagtcagctactctagttctgttgttttgtgtatataattttttaaaaaaaatttgtgtgcttctgctcattactacactggtgtgtccctctgccttttttttttttttaagacagggtctcattctatcggccaggctggagtgcagtggtgcaatcacagctcactgcagccttgtcctcccaggctcaagctatccttgcacctcagcctcccaagtagctgggaccacaggcatgcaccactacgcatgactaattttttaaatatttgagacggggtctccctgtgttacccaggctggtctcaaactcctgggctcaagtgatcctcccatcttggcctcccagagtattgggattacagacatgagccactgcacctgcccagctccccaactccctgccattttttaagagacagtttcgctccatcgcccaggcctgggatgcagtgatgtgatcatagctcactgtaacctcaaactctggggctcaagcagttctcccaccagcctcctttttatttttttgtacagatggggtcttgctatgttgcccaagctggtcttaaactcctggcctcaagcaatccttctgccttggccccccaaagtgctgggattgtgggcatgagctgctgtgcccagcctccatgttttaatatcaactctcactcctgaattcagttgctttgcccaagataggagttctctgatgcagaaattattgggctcttttagggtaagaagtttgtgtctttgtctggccacatcttgactaggtattgtctactctgaagacctttaatggcttccctctttcatctcctgagtatgtaacttgcaatgggcagctatccagtgacttgttctgagtaagtgtgttcattaatgtttatttagctctgaagcaagagtgatatactccaggacttagaatagtgcctaaagtgctgcagccaaagacagagcggaactatgaaaagtgggcttggagatggcaggagagcttgtcattgagcctggcaatttagcaaactgatgctgaggatgattgaggtgggtctacctcatctctgaaaattctggaaggaatggaggagtctcaacatgtgtttctgacacaagatccgtggtttgtactcaaagcccagaatccccaagtgcctgcttttgatgatgtctacagaaaatgctggctgagctgaacacatttgcccaattccaggtgtgcacagaaaaccgagaatattcaaaattccaaatttttttcttaggagcaagaagaaaatgtggccctaaagggggttagttgaggggtagggggtagtgaggatcttgatttggatctctttttatttaaatgtgaatttcaacttttgacaatcaaagaaaagacttttgttgaaatagctttactgtttctcaagtgttttggagaaaaaaatcaaccctgcaatcactttttggaattgtcttgatttttcggcagttcaagctatatcgaatatagttctgtgtagagaatgtcactgtagttttgagtgtatacatgtgtgggtgctgataattgtgtattttctttgggggtggaaaaggaaaacaattcaagctgagaaaagtattctcaaagatgcatttttataaattttattaaacaattttgttaaaccatt

SEQ ID NO: 313804 - DNA, 405 bp, Homo sapiens
cccaaatggaatccctcaaggcccaggactattgcggaagaggtgggcgcgtaagattgtaagggccgattttgaaagatccagtaagttcagtttctctatgaactaatcattcaagtcaaaggcacactgatgcaaaatcagtatatggacccctgtgtctgattagcaaggttttctacagcatcactggccaaggagctgacacaccccctgttggtgtctttattattgaaagagaaacaggatggctgaaggtgacagagcctctggatagagaacgcattgccacatacactctcttctctcacgctgtgtcatccaacgggattccatttggggattccatttggggattccatttggggattccatttggggattccatttggggattccatttgg

SEQ ID NO: 313805 - DNA, 4875 bp, Homo sapiens
agtggcgtcggaactgcaaagcacctgtgagcttgcggaagtcagttcagactccagcccgctccagcccggcccgacccgaccgcacccggcgcctgccctcgctcggcgtccccggccagccatgggcccttggagccgcagcctctcggcgctgctgctgctgctgcaggtctcctcttggctctgccaggagccggagccctgccaccctggctttgacgccgagagctacacgttcacggtgccccggcgccacctggagagaggccgcgtcctgggcagagtgaattttgaagattgcaccggtcgacaaaggacagcctatttttccctcgacacccgattcaaagtgggcacagatggtgtgattacagtcaaaaggcctctacggtttcataacccacagatccatttcttggtctacgcctgggactccacctacagaaagttttccaccaaagtcacgctgaatacagtggggcaccaccaccgccccccgccccatcaggcctccgtttctggaatccaagcagaattgctcacatttcccaactcctctcctggcctcagaagacagaagagagactgggttattcctcccatcagctgcccagaaaatgaaaaaggcccatttcctaaaaacctggttcagatcaaatccaacaaagacaaagaaggcaaggttttctacagcatcactggccaaggagctgacacaccccctgttggtgtctttattattgaaagagaaacaggatggctgaaggtgacagagcctctggatagagaacgcattgccacatacactctcttctctcacgctgtgtcatccaacgggaatgcagttgaggatccaatggagattttgatcacggtaaccgatcagaatgacaacaagcccgaattcacccaggaggtctttaaggggtctgtcatggaaggtgctcttccaggaacctctgtgatggaggtcacagccacagacgcggacgatgatgtgaacacctacaatgccgccatcgcttacaccatcctcagccaagatcctgagctccctgacaaaaatatgttcaccattaacaggaacacaggagtcatcagtgtggtcaccactgggctggaccgagagagtttccctacgtataccctggtggttcaagctgctgaccttcaaggtgaggggttaagcacaacagcaacagctgtgatcacagtcactgacaccaacgataatcctccgatcttcaatcccaccacgtacaagggtcaggtgcctgagaacgaggctaacgtcgtaatcaccacactgaaagtgactgatgctgatgcccccaataccccagcgtgggaggctgtatacaccatattgaatgatgatggtggacaatttgtcgtcaccacaaatccagtgaacaacgatggcattttgaaaacagcaaagaggacctggcaagatgcagaaactggcatcctcacagctgttcatacccttgtcccctgggcttggattttgaggccaagcagcagtacattctacacgtagcagtgacgaatgtggtaccttttgaggtctctctcaccacctccacagccaccgtcaccgtggatgtgctggatgtgaatgaagcccccatctttgtgcctcctgaaaagagagtggaagtgtccgaggactttggcgtgggccaggaaatcacatcctacactgcccaggagccagacacatttatggaacagaaaataacatatcggatttggagagacactgccaactggctggagattaatccggacactggtgccatttccactcgggctgagctggacagggaggattttgagcacgtgaagaacagcacgtacacagccctaatcatagctacagacaatggttctccagttgctactggaacagggacacttctgctgatcctgtctgatgtgaatgacaacgcccccataccagaacctcgaactatattcttctgtgagaggaatccaaagcctcaggtcataaacatcattgatgcagaccttcctcccaatacatctcccttcacagcagaactaacacacggggcgagtgccaactggaccattcagtacaacgacccaacccaagaatctatcattttgaagccaaagatggccttagaggtgggtgactacaaaatcaatctcaagctcatggataaccagaataaagaccaagtgaccaccttagaggtcagcgtgtgtgactgtgaaggggccgccggcgtctgtaggaaggcacagcctgtcgaagcaggattgcaaattcctgccattctggggattcttggaggaattcttgctttgctaattctgattctgctgctcttgctgtttcttcggaggagagcggtggtcaaagagcccttactgcccccagaggatgacacccgggacaacgtttattactatgatgaagaaggaggcggagaagaggaccaggactttgacttgagccagctgcacaggggcctggacgctcggcctgaagtgactcgtaacgacgttgcaccaaccctcatgagtgtcccccggtatcttccccgccctgccaatcccgatgaaattggaaattttattgatgaaaatctgaaagcggctgatactgaccccacagccccgccttatgattctctgctcgtgtttgactatgaaggaagcggttccgaagctgctagtctgagctccctgaactcctcagagtcagacaaagaccaggactatgactacttgaacgaatggggcaatcgcttcaagaagctggctgacatgtacggaggcggcgaggacgactaggggactcgagagaggcgggccccagacccatgtgctgggaaatgcagaaatcacgttgctggtggtttttcagctcccttcccttgagatgagtttctggggaaaaaaaagagactggttagtgatgcagttagtatagctttatactctctccactttatagctctaataagtttgtgttagaaaagtttcgacttatttcttaaagcttttttttttttcccatcactctttacatggtggtgatgtccaaaagatacccaaattttaatattccagaagaacaactttagcatcagaaggttcacccagcaccttgcagattttcttaaggaattttgtctcacttttaaaaagaaggggagaagtcagctactctagttctgttgttttgtgtatataattttttaaaaaaaatttgtgtgcttctgctcattactacactggtgtgtccctctgccttttttttttttttaagacagggtctcattctatcggccaggctggagtgcagtggtgcaatcacagctcactgcagccttgtcctcccaggctcaagctatccttgcacctcagcctcccaagtagctgggaccacaggcatgcaccactacgcatgactaattttttaaatatttgagacggggtctccctgtgttacccaggctggtctcaaactcctgggctcaagtgatcctcccatcttggcctcccagagtattgggattacagacatgagccactgcacctgcccagctccccaactccctgccattttttaagagacagtttcgctccatcgcccaggcctgggatgcagtgatgtgatcatagctcactgtaacctcaaactctggggctcaagcagttctcccaccagcctcctttttatttttttgtacagatggggtcttgctatgttgcccaagctggtcttaaactcctggcctcaagcaatccttctgccttggccccccaaagtgctgggattgtgggcatgagctgctgtgcccagcctccatgttttaatatcaactctcactcctgaattcagttgctttgcccaagataggagttctctgatgcagaaattattgggctcttttagggtaagaagtttgtgtctttgtctggccacatcttgactaggtattgtctactctgaagacctttaatggcttccctctttcatctcctgagtatgtaacttgcaatgggcagctatccagtgacttgttctgagtaagtgtgttcattaatgtttatttagctctgaagcaagagtgatatactccaggacttagaatagtgcctaaagtgctgcagccaaagacagagcggaactatgaaaagtgggcttggagatggcaggagagcttgtcattgagcctggcaatttagcaaactgatgctgaggatgattgaggtgggtctacctcatctctgaaaattctggaaggaatggaggagtctcaacatgtgtttctgacacaagatccgtggtttgtactcaaagcccagaatccccaagtgcctgcttttgatgatgtctacagaaaatgctggctgagctgaacacatttgcccaattccaggtgtgcacagaaaaccgagaatattcaaaattccaaatttttttcttaggagcaagaagaaaatgtggccctaaagggggttagttgaggggtagggggtagtgaggatcttgatttggatctctttttatttaaatgtgaatttcaacttttgacaatcaaagaaaagacttttgttgaaatagctttactgtttctcaagtgttttggagaaaaaaatcaaccctgcaatcactttttggaattgtcttgatttttcggcagttcaagctatatcgaatatagttctgtgtagagaatgtcactgtagttttgagtgtatacatgtgtgggtgctgataattgtgtattttctttgggggtggaaaaggaaaacaattcaagctgagaaaagtattctcaaagatgcatttttataaattttattaaacaattttgttaaaccatt

SEQ ID NO: 313806 - DNA, 4660 bp, Homo sapiens
agtggcgtcggaactgcaaagcacctgtgagcttgcggaagtcagttcagactccagcccgctccagcccggcccgacccgaccgcacccggcgcctgccctcgctcggcgtccccggccagccatgggcccttggagccgcagcctctcggcgctgctgctgctgctgcaggtctcctcttggctctgccaggagccggagccctgccaccctggctttgacgccgagagctacacgttcacggtgccccggcgccacctggagagaggccgcgtcctgggcagagtgaattttgaagattgcaccggtcgacaaaggacagcctatttttccctcgacacccgattcaaagtgggcacagatggtgtgattacagtcaaaaggcctctacggtttcataacccacagatccatttcttggtctacgcctgggactccacctacagaaagttttccaccaaagtcacgctgaatacagtggggcaccaccaccgccccccgccccatcaggcctccgtttctggaatccaagcagaattgctcacatttcccaactcctctcctggcctcagaagacagaagagagactgggttattcctcccatcagctgcccagaaaatgaaaaaggcccatttcctaaaaacctggttcagctcttctctcacgctgtgtcatccaacgggaatgcagttgaggatccaatggagattttgatcacggtaaccgatcagaatgacaacaagcccgaattcacccaggaggtctttaaggggtctgtcatggaaggtgctcttccaggaacctctgtgatggaggtcacagccacagacgcggacgatgatgtgaacacctacaatgccgccatcgcttacaccatcctcagccaagatcctgagctccctgacaaaaatatgttcaccattaacaggaacacaggagtcatcagtgtggtcaccactgggctggaccgagagagtttccctacgtataccctggtggttcaagctgctgaccttcaaggtgaggggttaagcacaacagcaacagctgtgatcacagtcactgacaccaacgataatcctccgatcttcaatcccaccacgtacaagggtcaggtgcctgagaacgaggctaacgtcgtaatcaccacactgaaagtgactgatgctgatgcccccaataccccagcgtgggaggctgtatacaccatattgaatgatgatggtggacaatttgtcgtcaccacaaatccagtgaacaacgatggcattttgaaaacagcaaagggcttggattttgaggccaagcagcagtacattctacacgtagcagtgacgaatgtggtaccttttgaggtctctctcaccacctccacagccaccgtcaccgtggatgtgctggatgtgaatgaagcccccatctttgtgcctcctgaaaagagagtggaagtgtccgaggactttggcgtgggccaggaaatcacatcctacactgcccaggagccagacacatttatggaacagaaaataacatatcggatttggagagacactgccaactggctggagattaatccggacactggtgccatttccactcgggctgagctggacagggaggattttgagcacgtgaagaacagcacgtacacagccctaatcatagctacagacaatggttctccagttgctactggaacagggacacttctgctgatcctgtctgatgtgaatgacaacgcccccataccagaacctcgaactatattcttctgtgagaggaatccaaagcctcaggtcataaacatcattgatgcagaccttcctcccaatacatctcccttcacagcagaactaacacacggggcgagtgccaactggaccattcagtacaacgacccaacccaagaatctatcattttgaagccaaagatggccttagaggtgggtgactacaaaatcaatctcaagctcatggataaccagaataaagaccaagtgaccaccttagaggtcagcgtgtgtgactgtgaaggggccgccggcgtctgtaggaaggcacagcctgtcgaagcaggattgcaaattcctgccattctggggattcttggaggaattcttgctttgctaattctgattctgctgctcttgctgtttcttcggaggagagcggtggtcaaagagcccttactgcccccagaggatgacacccgggacaacgtttattactatgatgaagaaggaggcggagaagaggaccaggactttgacttgagccagctgcacaggggcctggacgctcggcctgaagtgactcgtaacgacgttgcaccaaccctcatgagtgtcccccggtatcttccccgccctgccaatcccgatgaaattggaaattttattgatgaaaatctgaaagcggctgatactgaccccacagccccgccttatgattctctgctcgtgtttgactatgaaggaagcggttccgaagctgctagtctgagctccctgaactcctcagagtcagacaaagaccaggactatgactacttgaacgaatggggcaatcgcttcaagaagctggctgacatgtacggaggcggcgaggacgactaggggactcgagagaggcgggccccagacccatgtgctgggaaatgcagaaatcacgttgctggtggtttttcagctcccttcccttgagatgagtttctggggaaaaaaaagagactggttagtgatgcagttagtatagctttatactctctccactttatagctctaataagtttgtgttagaaaagtttcgacttatttcttaaagcttttttttttttcccatcactctttacatggtggtgatgtccaaaagatacccaaattttaatattccagaagaacaactttagcatcagaaggttcacccagcaccttgcagattttcttaaggaattttgtctcacttttaaaaagaaggggagaagtcagctactctagttctgttgttttgtgtatataattttttaaaaaaaatttgtgtgcttctgctcattactacactggtgtgtccctctgccttttttttttttttaagacagggtctcattctatcggccaggctggagtgcagtggtgcaatcacagctcactgcagccttgtcctcccaggctcaagctatccttgcacctcagcctcccaagtagctgggaccacaggcatgcaccactacgcatgactaattttttaaatatttgagacggggtctccctgtgttacccaggctggtctcaaactcctgggctcaagtgatcctcccatcttggcctcccagagtattgggattacagacatgagccactgcacctgcccagctccccaactccctgccattttttaagagacagtttcgctccatcgcccaggcctgggatgcagtgatgtgatcatagctcactgtaacctcaaactctggggctcaagcagttctcccaccagcctcctttttatttttttgtacagatggggtcttgctatgttgcccaagctggtcttaaactcctggcctcaagcaatccttctgccttggccccccaaagtgctgggattgtgggcatgagctgctgtgcccagcctccatgttttaatatcaactctcactcctgaattcagttgctttgcccaagataggagttctctgatgcagaaattattgggctcttttagggtaagaagtttgtgtctttgtctggccacatcttgactaggtattgtctactctgaagacctttaatggcttccctctttcatctcctgagtatgtaacttgcaatgggcagctatccagtgacttgttctgagtaagtgtgttcattaatgtttatttagctctgaagcaagagtgatatactccaggacttagaatagtgcctaaagtgctgcagccaaagacagagcggaactatgaaaagtgggcttggagatggcaggagagcttgtcattgagcctggcaatttagcaaactgatgctgaggatgattgaggtgggtctacctcatctctgaaaattctggaaggaatggaggagtctcaacatgtgtttctgacacaagatccgtggtttgtactcaaagcccagaatccccaagtgcctgcttttgatgatgtctacagaaaatgctggctgagctgaacacatttgcccaattccaggtgtgcacagaaaaccgagaatattcaaaattccaaatttttttcttaggagcaagaagaaaatgtggccctaaagggggttagttgaggggtagggggtagtgaggatcttgatttggatctctttttatttaaatgtgaatttcaacttttgacaatcaaagaaaagacttttgttgaaatagctttactgtttctcaagtgttttggagaaaaaaatcaaccctgcaatcactttttggaattgtcttgatttttcggcagttcaagctatatcgaatatagttctgtgtagagaatgtcactgtagttttgagtgtatacatgtgtgggtgctgataattgtgtattttctttgggggtggaaaaggaaaacaattcaagctgagaaaagtattctcaaagatgcatttttataaattttattaaacaattttgttaaaccatt

SEQ ID NO: 313807 - DNA, 4120 bp, Homo sapiens
cgagctcggcaccattgaaaccaatgagcattagctctagacaggatcagcattgttgttcactggatttgtggtgacgacaaattgtccaccatcatcattcaatatggtgtatacagcctcccacgctggggtattgggggcatcagcatcagtcactttcagtgtggtgattacgacgttagccgatcagaatgacaacaagcccgaattcacccaggaggtctttaaggggtctgtcatggaaggtgctcttccaggaacctctgtgatggaggtcacagccacagacgcggacgatgatgtgaacacctacaatgccgccatcgcttacaccatcctcagccaagatcctgagctccctgacaaaaatatgttcaccattaacaggaacacaggagtcatcagtgtggtcaccactgggctggaccgagagagtttccctacgtataccctggtggttcaagctgctgaccttcaaggtgaggggttaagcacaacagcaacagctgtgatcacagtcactgacaccaacgataatcctccgatcttcaatcccaccacgtacaagggtcaggtgcctgagaacgaggctaacgtcgtaatcaccacactgaaagtgactgatgctgatgcccccaataccccagcgtgggaggctgtatacaccatattgaatgatgatggtggacaatttgtcgtcaccacaaatccagtgaacaacgatggcattttgaaaacagcaaagggcttggattttgaggccaagcagcagtacattctacacgtagcagtgacgaatgtggtaccttttgaggtctctctcaccacctccacagccaccgtcaccgtggatgtgctggatgtgaatgaagcccccatctttgtgcctcctgaaaagagagtggaagtgtccgaggactttggcgtgggccaggaaatcacatcctacactgcccaggagccagacacatttatggaacagaaaataacatatcggatttggagagacactgccaactggctggagattaatccggacactggtgccatttccactcgggctgagctggacagggaggattttgagcacgtgaagaacagcacgtacacagccctaatcatagctacagacaatggttctccagttgctactggaacagggacacttctgctgatcctgtctgatgtgaatgacaacgcccccataccagaacctcgaactatattcttctgtgagaggaatccaaagcctcaggtcataaacatcattgatgcagaccttcctcccaatacatctcccttcacagcagaactaacacacggggcgagtgccaactggaccattcagtacaacgacccaacccaagaatctatcattttgaagccaaagatggccttagaggtgggtgactacaaaatcaatctcaagctcatggataaccagaataaagaccaagtgaccaccttagaggtcagcgtgtgtgactgtgaaggggccgccggcgtctgtaggaaggcacagcctgtcgaagcaggattgcaaattcctgccattctggggattcttggaggaattcttgctttgctaattctgattctgctgctcttgctgtttcttcggaggagagcggtggtcaaagagcccttactgcccccagaggatgacacccgggacaacgtttattactatgatgaagaaggaggcggagaagaggaccaggactttgacttgagccagctgcacaggggcctggacgctcggcctgaagtgactcgtaacgacgttgcaccaaccctcatgagtgtcccccggtatcttccccgccctgccaatcccgatgaaattggaaattttattgatgaaaatctgaaagcggctgatactgaccccacagccccgccttatgattctctgctcgtgtttgactatgaaggaagcggttccgaagctgctagtctgagctccctgaactcctcagagtcagacaaagaccaggactatgactacttgaacgaatggggcaatcgcttcaagaagctggctgacatgtacggaggcggcgaggacgactaggggactcgagagaggcgggccccagacccatgtgctgggaaatgcagaaatcacgttgctggtggtttttcagctcccttcccttgagatgagtttctggggaaaaaaaagagactggttagtgatgcagttagtatagctttatactctctccactttatagctctaataagtttgtgttagaaaagtttcgacttatttcttaaagcttttttttttttcccatcactctttacatggtggtgatgtccaaaagatacccaaattttaatattccagaagaacaactttagcatcagaaggttcacccagcaccttgcagattttcttaaggaattttgtctcacttttaaaaagaaggggagaagtcagctactctagttctgttgttttgtgtatataattttttaaaaaaaatttgtgtgcttctgctcattactacactggtgtgtccctctgccttttttttttttttaagacagggtctcattctatcggccaggctggagtgcagtggtgcaatcacagctcactgcagccttgtcctcccaggctcaagctatccttgcacctcagcctcccaagtagctgggaccacaggcatgcaccactacgcatgactaattttttaaatatttgagacggggtctccctgtgttacccaggctggtctcaaactcctgggctcaagtgatcctcccatcttggcctcccagagtattgggattacagacatgagccactgcacctgcccagctccccaactccctgccattttttaagagacagtttcgctccatcgcccaggcctgggatgcagtgatgtgatcatagctcactgtaacctcaaactctggggctcaagcagttctcccaccagcctcctttttatttttttgtacagatggggtcttgctatgttgcccaagctggtcttaaactcctggcctcaagcaatccttctgccttggccccccaaagtgctgggattgtgggcatgagctgctgtgcccagcctccatgttttaatatcaactctcactcctgaattcagttgctttgcccaagataggagttctctgatgcagaaattattgggctcttttagggtaagaagtttgtgtctttgtctggccacatcttgactaggtattgtctactctgaagacctttaatggcttccctctttcatctcctgagtatgtaacttgcaatgggcagctatccagtgacttgttctgagtaagtgtgttcattaatgtttatttagctctgaagcaagagtgatatactccaggacttagaatagtgcctaaagtgctgcagccaaagacagagcggaactatgaaaagtgggcttggagatggcaggagagcttgtcattgagcctggcaatttagcaaactgatgctgaggatgattgaggtgggtctacctcatctctgaaaattctggaaggaatggaggagtctcaacatgtgtttctgacacaagatccgtggtttgtactcaaagcccagaatccccaagtgcctgcttttgatgatgtctacagaaaatgctggctgagctgaacacatttgcccaattccaggtgtgcacagaaaaccgagaatattcaaaattccaaatttttttcttaggagcaagaagaaaatgtggccctaaagggggttagttgaggggtagggggtagtgaggatcttgatttggatctctttttatttaaatgtgaatttcaacttttgacaatcaaagaaaagacttttgttgaaatagctttactgtttctcaagtgttttggagaaaaaaatcaaccctgcaatcactttttggaattgtcttgatttttcggcagttcaagctatatcgaatatagttctgtgtagagaatgtcactgtagttttgagtgtatacatgtgtgggtgctgataattgtgtattttctttgggggtggaaaaggaaaacaattcaagctgagaaaagtattctcaaagatgcatttttataaattttattaaacaattttgttaaaccatt

SEQ ID NO: 313808 - DNA, 3751 bp, Homo sapiens
gggctgggctaggccaaaggtggctagtgttcctggtcctgacttggttgtgtcgatctctctgcagagtttccctacgtataccctggtggttcaagctgctgaccttcaaggtgaggggttaagcacaacagcaacagctgtgatcacagtcactgacaccaacgataatcctccgatcttcaatcccaccacgtacaagggtcaggtgcctgagaacgaggctaacgtcgtaatcaccacactgaaagtgactgatgctgatgcccccaataccccagcgtgggaggctgtatacaccatattgaatgatgatggtggacaatttgtcgtcaccacaaatccagtgaacaacgatggcattttgaaaacagcaaagggcttggattttgaggccaagcagcagtacattctacacgtagcagtgacgaatgtggtaccttttgaggtctctctcaccacctccacagccaccgtcaccgtggatgtgctggatgtgaatgaagcccccatctttgtgcctcctgaaaagagagtggaagtgtccgaggactttggcgtgggccaggaaatcacatcctacactgcccaggagccagacacatttatggaacagaaaataacatatcggatttggagagacactgccaactggctggagattaatccggacactggtgccatttccactcgggctgagctggacagggaggattttgagcacgtgaagaacagcacgtacacagccctaatcatagctacagacaatggttctccagttgctactggaacagggacacttctgctgatcctgtctgatgtgaatgacaacgcccccataccagaacctcgaactatattcttctgtgagaggaatccaaagcctcaggtcataaacatcattgatgcagaccttcctcccaatacatctcccttcacagcagaactaacacacggggcgagtgccaactggaccattcagtacaacgacccaacccaagaatctatcattttgaagccaaagatggccttagaggtgggtgactacaaaatcaatctcaagctcatggataaccagaataaagaccaagtgaccaccttagaggtcagcgtgtgtgactgtgaaggggccgccggcgtctgtaggaaggcacagcctgtcgaagcaggattgcaaattcctgccattctggggattcttggaggaattcttgctttgctaattctgattctgctgctcttgctgtttcttcggaggagagcggtggtcaaagagcccttactgcccccagaggatgacacccgggacaacgtttattactatgatgaagaaggaggcggagaagaggaccaggactttgacttgagccagctgcacaggggcctggacgctcggcctgaagtgactcgtaacgacgttgcaccaaccctcatgagtgtcccccggtatcttccccgccctgccaatcccgatgaaattggaaattttattgatgaaaatctgaaagcggctgatactgaccccacagccccgccttatgattctctgctcgtgtttgactatgaaggaagcggttccgaagctgctagtctgagctccctgaactcctcagagtcagacaaagaccaggactatgactacttgaacgaatggggcaatcgcttcaagaagctggctgacatgtacggaggcggcgaggacgactaggggactcgagagaggcgggccccagacccatgtgctgggaaatgcagaaatcacgttgctggtggtttttcagctcccttcccttgagatgagtttctggggaaaaaaaagagactggttagtgatgcagttagtatagctttatactctctccactttatagctctaataagtttgtgttagaaaagtttcgacttatttcttaaagcttttttttttttcccatcactctttacatggtggtgatgtccaaaagatacccaaattttaatattccagaagaacaactttagcatcagaaggttcacccagcaccttgcagattttcttaaggaattttgtctcacttttaaaaagaaggggagaagtcagctactctagttctgttgttttgtgtatataattttttaaaaaaaatttgtgtgcttctgctcattactacactggtgtgtccctctgccttttttttttttttaagacagggtctcattctatcggccaggctggagtgcagtggtgcaatcacagctcactgcagccttgtcctcccaggctcaagctatccttgcacctcagcctcccaagtagctgggaccacaggcatgcaccactacgcatgactaattttttaaatatttgagacggggtctccctgtgttacccaggctggtctcaaactcctgggctcaagtgatcctcccatcttggcctcccagagtattgggattacagacatgagccactgcacctgcccagctccccaactccctgccattttttaagagacagtttcgctccatcgcccaggcctgggatgcagtgatgtgatcatagctcactgtaacctcaaactctggggctcaagcagttctcccaccagcctcctttttatttttttgtacagatggggtcttgctatgttgcccaagctggtcttaaactcctggcctcaagcaatccttctgccttggccccccaaagtgctgggattgtgggcatgagctgctgtgcccagcctccatgttttaatatcaactctcactcctgaattcagttgctttgcccaagataggagttctctgatgcagaaattattgggctcttttagggtaagaagtttgtgtctttgtctggccacatcttgactaggtattgtctactctgaagacctttaatggcttccctctttcatctcctgagtatgtaacttgcaatgggcagctatccagtgacttgttctgagtaagtgtgttcattaatgtttatttagctctgaagcaagagtgatatactccaggacttagaatagtgcctaaagtgctgcagccaaagacagagcggaactatgaaaagtgggcttggagatggcaggagagcttgtcattgagcctggcaatttagcaaactgatgctgaggatgattgaggtgggtctacctcatctctgaaaattctggaaggaatggaggagtctcaacatgtgtttctgacacaagatccgtggtttgtactcaaagcccagaatccccaagtgcctgcttttgatgatgtctacagaaaatgctggctgagctgaacacatttgcccaattccaggtgtgcacagaaaaccgagaatattcaaaattccaaatttttttcttaggagcaagaagaaaatgtggccctaaagggggttagttgaggggtagggggtagtgaggatcttgatttggatctctttttatttaaatgtgaatttcaacttttgacaatcaaagaaaagacttttgttgaaatagctttactgtttctcaagtgttttggagaaaaaaatcaaccctgcaatcactttttggaattgtcttgatttttcggcagttcaagctatatcgaatatagttctgtgtagagaatgtcactgtagttttgagtgtatacatgtgtgggtgctgataattgtgtattttctttgggggtggaaaaggaaaacaattcaagctgagaaaagtattctcaaagatgcatttttataaattttattaaacaattttgttaaaccatt

SEQ ID NO: 313809 - DNA, 3241 bp, Homo sapiens
  misc_feature (1)..(1): n is a, c, g, or t
  misc_feature (3)..(3): n is a, c, g, or t
ngnagaagattatgatgcgactgtgagtgcgttcgtagtttgagtttgctaggcagaatagtaatgaggatgtaagcccgtgggcgattatgagaatgactgcgccggtgaagcatatcggatttggagagacactgccaactggctggagattaatccggacactggtgccatttccactcgggctgagctggacagggaggattttgagcacgtgaagaacagcacgtacacagccctaatcatagctacagacaatggttctccagttgctactggaacagggacacttctgctgatcctgtctgatgtgaatgacaacgcccccataccagaacctcgaactatattcttctgtgagaggaatccaaagcctcaggtcataaacatcattgatgcagaccttcctcccaatacatctcccttcacagcagaactaacacacggggcgagtgccaactggaccattcagtacaacgacccaacccaagaatctatcattttgaagccaaagatggccttagaggtgggtgactacaaaatcaatctcaagctcatggataaccagaataaagaccaagtgaccaccttagaggtcagcgtgtgtgactgtgaaggggccgccggcgtctgtaggaaggcacagcctgtcgaagcaggattgcaaattcctgccattctggggattcttggaggaattcttgctttgctaattctgattctgctgctcttgctgtttcttcggaggagagcggtggtcaaagagcccttactgcccccagaggatgacacccgggacaacgtttattactatgatgaagaaggaggcggagaagaggaccaggactttgacttgagccagctgcacaggggcctggacgctcggcctgaagtgactcgtaacgacgttgcaccaaccctcatgagtgtcccccggtatcttccccgccctgccaatcccgatgaaattggaaattttattgatgaaaatctgaaagcggctgatactgaccccacagccccgccttatgattctctgctcgtgtttgactatgaaggaagcggttccgaagctgctagtctgagctccctgaactcctcagagtcagacaaagaccaggactatgactacttgaacgaatggggcaatcgcttcaagaagctggctgacatgtacggaggcggcgaggacgactaggggactcgagagaggcgggccccagacccatgtgctgggaaatgcagaaatcacgttgctggtggtttttcagctcccttcccttgagatgagtttctggggaaaaaaaagagactggttagtgatgcagttagtatagctttatactctctccactttatagctctaataagtttgtgttagaaaagtttcgacttatttcttaaagcttttttttttttcccatcactctttacatggtggtgatgtccaaaagatacccaaattttaatattccagaagaacaactttagcatcagaaggttcacccagcaccttgcagattttcttaaggaattttgtctcacttttaaaaagaaggggagaagtcagctactctagttctgttgttttgtgtatataattttttaaaaaaaatttgtgtgcttctgctcattactacactggtgtgtccctctgccttttttttttttttaagacagggtctcattctatcggccaggctggagtgcagtggtgcaatcacagctcactgcagccttgtcctcccaggctcaagctatccttgcacctcagcctcccaagtagctgggaccacaggcatgcaccactacgcatgactaattttttaaatatttgagacggggtctccctgtgttacccaggctggtctcaaactcctgggctcaagtgatcctcccatcttggcctcccagagtattgggattacagacatgagccactgcacctgcccagctccccaactccctgccattttttaagagacagtttcgctccatcgcccaggcctgggatgcagtgatgtgatcatagctcactgtaacctcaaactctggggctcaagcagttctcccaccagcctcctttttatttttttgtacagatggggtcttgctatgttgcccaagctggtcttaaactcctggcctcaagcaatccttctgccttggccccccaaagtgctgggattgtgggcatgagctgctgtgcccagcctccatgttttaatatcaactctcactcctgaattcagttgctttgcccaagataggagttctctgatgcagaaattattgggctcttttagggtaagaagtttgtgtctttgtctggccacatcttgactaggtattgtctactctgaagacctttaatggcttccctctttcatctcctgagtatgtaacttgcaatgggcagctatccagtgacttgttctgagtaagtgtgttcattaatgtttatttagctctgaagcaagagtgatatactccaggacttagaatagtgcctaaagtgctgcagccaaagacagagcggaactatgaaaagtgggcttggagatggcaggagagcttgtcattgagcctggcaatttagcaaactgatgctgaggatgattgaggtgggtctacctcatctctgaaaattctggaaggaatggaggagtctcaacatgtgtttctgacacaagatccgtggtttgtactcaaagcccagaatccccaagtgcctgcttttgatgatgtctacagaaaatgctggctgagctgaacacatttgcccaattccaggtgtgcacagaaaaccgagaatattcaaaattccaaatttttttcttaggagcaagaagaaaatgtggccctaaagggggttagttgaggggtagggggtagtgaggatcttgatttggatctctttttatttaaatgtgaatttcaacttttgacaatcaaagaaaagacttttgttgaaatagctttactgtttctcaagtgttttggagaaaaaaatcaaccctgcaatcactttttggaattgtcttgatttttcggcagttcaagctatatcgaatatagttctgtgtagagaatgtcactgtagttttgagtgtatacatgtgtgggtgctgataattgtgtattttctttgggggtggaaaaggaaaacaattcaagctgagaaaagtattctcaaagatgcatttttataaattttattaaacaattttgttaaaccatt

SEQ ID NO: 313810 - DNA, 1470 bp, Homo sapiens
ctcttttgtagtgtattttaagggccatatttcattaatgatcacctgtctgtggtgctaatcttcaaaacagaatttgtgtcatattaaaaatgttagtaatctaccatataacttatcaaaacatctcagaaattttatttttttggagagggtctcatcctcaccctgtcacccaagctagacaggctagagtgcagtggggtgatcacagctcactacacccttcacttcccgggctcaagtgatccccttacttcagcctcccgagtagctgggactacaggtgcaagccacaacacccagctaatatttaaatttttttgtagagacaaggtatcaccgtgttgcctaggctggtcttaaactcctggcctcaagcaatccttctgccttggccccccaaagtgctgggattgtgggcatgagctgctgtgcccagcctccatgttttaatatcaactctcactcctgaattcagttgctttgcccaagataggagttctctgatgcagaaattattgggctcttttagggtaagaagtttgtgtctttgtctggccacatcttgactaggtattgtctactctgaagacctttaatggcttccctctttcatctcctgagtatgtaacttgcaatgggcagctatccagtgacttgttctgagtaagtgtgttcattaatgtttatttagctctgaagcaagagtgatatactccaggacttagaatagtgcctaaagtgctgcagccaaagacagagcggaactatgaaaagtgggcttggagatggcaggagagcttgtcattgagcctggcaatttagcaaactgatgctgaggatgattgaggtgggtctacctcatctctgaaaattctggaaggaatggaggagtctcaacatgtgtttctgacacaagatccgtggtttgtactcaaagcccagaatccccaagtgcctgcttttgatgatgtctacagaaaatgctggctgagctgaacacatttgcccaattccaggtgtgcacagaaaaccgagaatattcaaaattccaaatttttttcttaggagcaagaagaaaatgtggccctaaagggggttagttgaggggtagggggtagtgaggatcttgatttggatctctttttatttaaatgtgaatttcaacttttgacaatcaaagaaaagacttttgttgaaatagctttactgtttctcaagtgttttggagaaaaaaatcaaccctgcaatcactttttggaattgtcttgatttttcggcagttcaagctatatcgaatatagttctgtgtagagaatgtcactgtagttttgagtgtatacatgtgtgggtgctgataattgtgtattttctttgggggtggaaaaggaaaacaattcaagctgagaaaagtattctcaaagatgcatttttataaattttattaaacaattttgttaaaccatt

SEQ ID NO: 313811 - DNA, 1338 bp, Homo sapiens
  misc_feature (20)..(20): n is a, c, g, or t
  misc_feature (23)..(23): n is a, c, g, or t
atgtgtgctctaccttactnttntttgagacaaagtcttgccctgtagcccaggctggatgcagtgcagtggtgtgatatcagctcactgcaaactccacctcccagcttcaagtgattctcctgcctcaacctcctgagtcgctgggattacaggcatgcaccaccacacctggctaatttttgtatttttagtagagacagggtttcaccatgttggccaggctggtcttgaactcttgagctcaaatgatctgcctaccttggccccccaaagtgctgggattgtgggcatgagctgctgtgcccagcctccatgttttaatatcaactctcactcctgaattcagttgctttgcccaagataggagttctctgatgcagaaattattgggctcttttagggtaagaagtttgtgtctttgtctggccacatcttgactaggtattgtctactctgaagacctttaatggcttccctctttcatctcctgagtatgtaacttgcaatgggcagctatccagtgacttgttctgagtaagtgtgttcattaatgtttatttagctctgaagcaagagtgatatactccaggacttagaatagtgcctaaagtgctgcagccaaagacagagcggaactatgaaaagtgggcttggagatggcaggagagcttgtcattgagcctggcaatttagcaaactgatgctgaggatgattgaggtgggtctacctcatctctgaaaattctggaaggaatggaggagtctcaacatgtgtttctgacacaagatccgtggtttgtactcaaagcccagaatccccaagtgcctgcttttgatgatgtctacagaaaatgctggctgagctgaacacatttgcccaattccaggtgtgcacagaaaaccgagaatattcaaaattccaaatttttttcttaggagcaagaagaaaatgtggccctaaagggggttagttgaggggtagggggtagtgaggatcttgatttggatctctttttatttaaatgtgaatttcaacttttgacaatcaaagaaaagacttttgttgaaatagctttactgtttctcaagtgttttggagaaaaaaatcaaccctgcaatcactttttggaattgtcttgatttttcggcagttcaagctatatcgaatatagttctgtgtagagaatgtcactgtagttttgagtgtatacatgtgtgggtgctgataattgtgtattttctttgggggtggaaaaggaaaacaattcaagctgagaaaagtattctcaaagatgcatttttataaattttattaaacaattttgttaaaccatt

SEQ ID NO: 313812 - DNA, 4421 bp, Homo sapiens
agtggcgtcggaactgcaaagcacctgtgagcttgcggaagtcagttcagactccagcccgctccagcccggcccgacccgaccgcacccggcgcctgccctcgctcggcgtccccggccagccatgggcccttggagccgcagcctctcggcgctgctgctgctgctgcaggtctcctcttggctctgccaggagccggagccctgccaccctggctttgacgccgagagctacacgttcacggtgccccggcgccacctggagagaggccgcgtcctgggcagagtgaattttgaagattgcaccggtcgacaaaggacagcctatttttccctcgacacccgattcaaagtgggcacagatggtgtgattacagtcaaaaggcctctacggtttcataacccacagatccatttcttggtctacgcctgggactccacctacagaaagttttccaccaaagtcacgctgaatacagtggggcaccaccaccgccccccgccccatcaggcctccgtttctggaatccaagcagaattgctcacatttcccaactcctctcctggcctcagaagacagaagagagactgggttattcctcccatcagctgcccagaaaatgaaaaaggcccatttcctaaaaacctggttcagatcaaatccaacaaagacaaagaaggcaaggttttctacagcatcactggccaaggagctgacacaccccctgttggtgtctttattattgaaagagaaacaggatggctgaaggtgacagagcctctggatagagaacgcattgccacatacactctcttctctcacgctgtgtcatccaacgggaatgcagttgaggatccaatggagattttgatcacggtaaccgatcagaatgacaacaagcccgaattcacccaggaggtctttaaggggtctgtcatggaaggtgctcttccaggaacctctgtgatggaggtcacagccacagacgcggacgatgatgtgaacacctacaatgccgccatcgcttacaccatcctcagccaagatcctgagctccctgacaaaaatatgttcaccattaacaggaacacaggagtcatcagtgtggtcaccactgggctggaccgagagagtttccctacgtataccctggtggttcaagctgctgaccttcaaggtgaggggttaagcacaacagcaacagctgtgatcacagtcactgacaccaacgataatcctccgatcttcaatcccaccacgtacaagggtcaggtgcctgagaacgaggctaacgtcgtaatcaccacactgaaagtgactgatgctgatgcccccaataccccagcgtgggaggctgtatacaccatattgaatgatgatggtggacaatttgtcgtcaccacaaatccagtgaacaacgatggcattttgaaaacagcaaagggcttggattttgaggccaagcagcagtacattctacacgtagcagtgacgaatgtggtaccttttgaggtctctctcaccacctccacagccaccgtcaccgtggatgtgctggatgtgaatgaagcccccatctttgtgcctcctgaaaagagagtggaagtgtccgaggactttggcgtgggccaggaaatcacatcctacactgcccaggagccagacacatttatggaacagaaaataacatatcggatttggagagacactgccaactggctggagattaatccggacactggtgccatttccactcgggctgagctggacagggaggattttgagcacgtgaagaacagcacgtacacagccctaatcatagctacagacaatggttctccagttgctactggaacagggacacttctgctgatcctgtctgatgtgaatgacaacgcccccataccagaacctcgaactatattcttctgtgagaggaatccaaagcctcaggtcataaacatcattgatgcagaccttcctcccaatacatctcccttcacagcagaactaacacacggggcgagtgccaactggaccattcagtacaacgacccaacccaagaatctatcattttgaagccaaagatggccttagaggtgggtgactacaaaatcaatctcaagctcatggataaccagaataaagaccaagtgaccaccttagaggtcagcgtgtgtgactgtgaaggggccgccggcgtctgtaggaaggcacagcctgtcgaagcaggattgcaaattcctgccattctggggattcttggaggaattcttgctttgctaattctgattctgctgctcttgctgtttcttcggaggagagcggtggtcaaagagcccttactgcccccagaggatgacacccgggacaacgtttattactatgatgaagaaggaggcggagaagaggaccaggactttgacttgagccagctgcacaggggcctggacgctcggcctgaagtgactcgtaacgacgttgcaccaaccctcatgagtgtcccccggtatcttccccgccctgccaatcccgatgaaattggaaattttattgatgaaaatctgaaagcggctgatactgaccccacagccccgccttatgattctctgctcgtgtttgactatgaaggaagcggttccgaagctgctagtctgagctccctgaactcctcagagtcagacaaagaccaggactatgactacttgaacgaatggggcaatcgcttcaagaagctggctgacatgtacggaggcggcgaggacgactaggggactcgagagaggcgggccccagacccatgtgctgggaaatgcagaaatcacgttgctggtggtttttcagctcccttcccttgagatgagtttctggggaaaaaaaagagactggttagtgatgcagttagtatagctttatactctctccactttatagctctaataagtttgtgttagaaaagtttcgacttatttcttaaagcttttttttttttcccatcactctttacatggtggtgatgtccaaaagatacccaaattttaatattccagaagaacaactttagcatcagaaggttcacccagcaccttgcagattttcttaaggaattttgtctcacttttaaaaagaaggggagaagtcagctactctagttctgttgttttgtgtatataattttttaaaaaaaatttgtgtgcttctgctcattactacactggtgtgtccctctgccttttttttttttttaagacagggtctcattctatcggccaggctggagtgcagtggtgcaatcacagctcactgcagccttgtcctcccaggctcaagctatccttgcacctcagcctcccaagtagctgggaccacaggcatgcaccactacgcatgactaattttttaaatatttgagacggggtctccctgtgttacccaggctggtctcaaactcctgggctcaagtgatcctcccatcttggcctcccagagtattgggattacagacatgagccactgcacctgcccagctccccaactccctgccattttttaagagacagtttcgctccatcgcccaggcctgggatgcagtgatgtgatcatagctcactgtaacctcaaactctggggctcaagcagttctcccaccagcctcctttttatttttttgtacagatggggtcttgctatgttgcccaagctggtcttaaactcctggcctcaagcaatccttctgccttggccccccaaagtgctgggattgtgggcatgagctgctgtgcccagcctccatgttttaatatcaactctcactcctgaattcagttgctttgcccaagataggagttctctgatgcagaaattattgggctcttttagggtaagaagtttgtgtctttgtctggccacatcttgactaggtattgtctactctgaagacctttaatggcttccctctttcatctcctgagtatgtaacttgcaatgggcagctatccagtgacttgttctgagtaagtgtgttcattaatgtttatttagctctgaagcaagagtgatatactccaggacttagaatagtgcctaaagtgctgcagccaaagacagagcggaactatgaaaagtgggcttggagatggcaggagagcttgtcattgagcctggcaatttagcaaactgatgctgaggatgattgaggtgggtctacctcatctctgaaaattctggaaggaatggaggagtctcaacatgtgtttctgacacaagatccgtggtttgtactcaaagcccagaatccccaagtgcctgcttttgatgatgtctacagaaaatgctggctgagctgaacacatttgcccaattccagtcgtggcagtacgagtcgtggcaagaaaggtgtcctctagaatcgccgcagcg

SEQ ID NO: 313813 - DNA, 4372 bp, Homo sapiens
agtggcgtcggaactgcaaagcacctgtgagcttgcggaagtcagttcagactccagcccgctccagcccggcccgacccgaccgcacccggcgcctgccctcgctcggcgtccccggccagccatgggcccttggagccgcagcctctcggcgctgctgctgctgctgcaggtctcctcttggctctgccaggagccggagccctgccaccctggctttgacgccgagagctacacgttcacggtgccccggcgccacctggagagaggccgcgtcctgggcagagtgaattttgaagattgcaccggtcgacaaaggacagcctatttttccctcgacacccgattcaaagtgggcacagatggtgtgattacagtcaaaaggcctctacggtttcataacccacagatccatttcttggtctacgcctgggactccacctacagaaagttttccaccaaagtcacgctgaatacagtggggcaccaccaccgccccccgccccatcaggcctccgtttctggaatccaagcagaattgctcacatttcccaactcctctcctggcctcagaagacagaagagagactgggttattcctcccatcagctgcccagaaaatgaaaaaggcccatttcctaaaaacctggttcagatcaaatccaacaaagacaaagaaggcaaggttttctacagcatcactggccaaggagctgacacaccccctgttggtgtctttattattgaaagagaaacaggatggctgaaggtgacagagcctctggatagagaacgcattgccacatacactctcttctctcacgctgtgtcatccaacgggaatgcagttgaggatccaatggagattttgatcacggtaaccgatcagaatgacaacaagcccgaattcacccaggaggtctttaaggggtctgtcatggaaggtgctcttccaggaacctctgtgatggaggtcacagccacagacgcggacgatgatgtgaacacctacaatgccgccatcgcttacaccatcctcagccaagatcctgagctccctgacaaaaatatgttcaccattaacaggaacacaggagtcatcagtgtggtcaccactgggctggaccgagagagtttccctacgtataccctggtggttcaagctgctgaccttcaaggtgaggggttaagcacaacagcaacagctgtgatcacagtcactgacaccaacgataatcctccgatcttcaatcccaccacgtacaagggtcaggtgcctgagaacgaggctaacgtcgtaatcaccacactgaaagtgactgatgctgatgcccccaataccccagcgtgggaggctgtatacaccatattgaatgatgatggtggacaatttgtcgtcaccacaaatccagtgaacaacgatggcattttgaaaacagcaaagggcttggattttgaggccaagcagcagtacattctacacgtagcagtgacgaatgtggtaccttttgaggtctctctcaccacctccacagccaccgtcaccgtggatgtgctggatgtgaatgaagcccccatctttgtgcctcctgaaaagagagtggaagtgtccgaggactttggcgtgggccaggaaatcacatcctacactgcccaggagccagacacatttatggaacagaaaataacatatcggatttggagagacactgccaactggctggagattaatccggacactggtgccatttccactcgggctgagctggacagggaggattttgagcacgtgaagaacagcacgtacacagccctaatcatagctacagacaatggttctccagttgctactggaacagggacacttctgctgatcctgtctgatgtgaatgacaacgcccccataccagaacctcgaactatattcttctgtgagaggaatccaaagcctcaggtcataaacatcattgatgcagaccttcctcccaatacatctcccttcacagcagaactaacacacggggcgagtgccaactggaccattcagtacaacgacccaacccaagaatctatcattttgaagccaaagatggccttagaggtgggtgactacaaaatcaatctcaagctcatggataaccagaataaagaccaagtgaccaccttagaggtcagcgtgtgtgactgtgaaggggccgccggcgtctgtaggaaggcacagcctgtcgaagcaggattgcaaattcctgccattctggggattcttggaggaattcttgctttgctaattctgattctgctgctcttgctgtttcttcggaggagagcggtggtcaaagagcccttactgcccccagaggatgacacccgggacaacgtttattactatgatgaagaaggaggcggagaagaggaccaggactttgacttgagccagctgcacaggggcctggacgctcggcctgaagtgactcgtaacgacgttgcaccaaccctcatgagtgtcccccggtatcttccccgccctgccaatcccgatgaaattggaaattttattgatgaaaatctgaaagcggctgatactgaccccacagccccgccttatgattctctgctcgtgtttgactatgaaggaagcggttccgaagctgctagtctgagctccctgaactcctcagagtcagacaaagaccaggactatgactacttgaacgaatggggcaatcgcttcaagaagctggctgacatgtacggaggcggcgaggacgactaggggactcgagagaggcgggccccagacccatgtgctgggaaatgcagaaatcacgttgctggtggtttttcagctcccttcccttgagatgagtttctggggaaaaaaaagagactggttagtgatgcagttagtatagctttatactctctccactttatagctctaataagtttgtgttagaaaagtttcgacttatttcttaaagcttttttttttttcccatcactctttacatggtggtgatgtccaaaagatacccaaattttaatattccagaagaacaactttagcatcagaaggttcacccagcaccttgcagattttcttaaggaattttgtctcacttttaaaaagaaggggagaagtcagctactctagttctgttgttttgtgtatataattttttaaaaaaaatttgtgtgcttctgctcattactacactggtgtgtccctctgccttttttttttttttaagacagggtctcattctatcggccaggctggagtgcagtggtgcaatcacagctcactgcagccttgtcctcccaggctcaagctatccttgcacctcagcctcccaagtagctgggaccacaggcatgcaccactacgcatgactaattttttaaatatttgagacggggtctccctgtgttacccaggctggtctcaaactcctgggctcaagtgatcctcccatcttggcctcccagagtattgggattacagacatgagccactgcacctgcccagctccccaactccctgccattttttaagagacagtttcgctccatcgcccaggcctgggatgcagtgatgtgatcatagctcactgtaacctcaaactctggggctcaagcagttctcccaccagcctcctttttatttttttgtacagatggggtcttgctatgttgcccaagctggtcttaaactcctggcctcaagcaatccttctgccttggccccccaaagtgctgggattgtgggcatgagctgctgtgcccagcctccatgttttaatatcaactctcactcctgaattcagttgctttgcccaagataggagttctctgatgcagaaattattgggctcttttagggtaagaagtttgtgtctttgtctggccacatcttgactaggtattgtctactctgaagacctttaatggcttccctctttcatctcctgagtatgtaacttgcaatgggcagctatccagtgacttgttctgagtaagtgtgttcattaatgtttatttagctctgaagcaagagtgatatactccaggacttagaatagtgcctaaagtgctgcagccaaagacagagcggaactatgaaaagtgggcttggagatggcaggagagcttgtcattgagcctggcaatttagcaaactgatgctgaggatgattgaggtgggtctacctcatctctgaaaattctggaaggaatggaggagtctcaacatgtgtttctgacacaagatccgtggtttgtactcaaagcccagaatccccaagtgccagtttctgtagacatcatcaaaagcaggcacttggggattctgggctttgagtacaaaccacgg

SEQ ID NO: 313814 - DNA, 1041 bp, Homo sapiens
cccagaattttcagagatgaggtagacccacctcaatcatcctcagcatcagttgctttgcccaagataggagttctctgatgcagaaattattgggctcttttagggtaagaagtttgtgtctttgtctggccacatcttgactaggtattgtctactctgaagacctttaatggcttccctctttcatctcctgagtatgtaacttgcaatgggcagctatccagtgacttgttctgagtaagtgtgttcattaatgtttatttagctctgaagcaagagtgatatactccaggacttagaatagtgcctaaagtgctgcagccaaagacagagcggaactatgaaaagtgggcttggagatggcaggagagcttgtcattgagcctggcaatttagcaaactgatgctgaggatgattgaggtgggtctacctcatctctgaaaattctggaaggaatggaggagtctcaacatgtgtttctgacacaagatccgtggtttgtactcaaagcccagaatccccaagtgcctgcttttgatgatgtctacagaaaatgctggctgagctgaacacatttgcccaattccaggtgtgcacagaaaaccgagaatattcaaaattccaaatttttttcttaggagcaagaagaaaatgtggccctaaagggggttagttgaggggtagggggtagtgaggatcttgatttggatctctttttatttaaatgtgaatttcaacttttgacaatcaaagaaaagacttttgttgaaatagctttactgtttctcaagtgttttggagaaaaaaatcaaccctgcaatcactttttggaattgtcttgatttttcggcagttcaagctatatcgaatatagttctgtgtagagaatgtcactgtagttttgagtgtatacatgtgtgggtgctgataattgtgtattttctttgggggtggaaaaggaaaacaattcaagctgagaaaagtattctcaaagatgcatttttataaattttattaaacaattttgttaaaccatt

SEQ ID NO: 313815 - DNA, 2534 bp, Homo sapiens
agtggcgtcggaactgcaaagcacctgtgagcttgcggaagtcagttcagactccagcccgctccagcccggcccgacccgaccgcacccggcgcctgccctcgctcggcgtccccggccagccatgggcccttggagccgcagcctctcggcgctgctgctgctgctgcaggtctcctcttggctctgccaggagccggagccctgccaccctggctttgacgccgagagctacacgttcacggtgccccggcgccacctggagagaggccgcgtcctgggcagagtgaattttgaagattgcaccggtcgacaaaggacagcctatttttccctcgacacccgattcaaagtgggcacagatggtgtgattacagtcaaaaggcctctacggtttcataacccacagatccatttcttggtctacgcctgggactccacctacagaaagttttccaccaaagtcacgctgaatacagtggggcaccaccaccgccccccgccccatcaggcctccgtttctggaatccaagcagaattgctcacatttcccaactcctctcctggcctcagaagacagaagagagactgggttattcctcccatcagctgcccagaaaatgaaaaaggcccatttcctaaaaacctggttcagatcaaatccaacaaagacaaagaaggcaaggttttctacagcatcactggccaaggagctgacacaccccctgttggtgtctttattattgaaagagaaacaggatggctgaaggtgacagagcctctggatagagaacgcattgccacatacactctcttctctcacgctgtgtcatccaacgggaatgcagttgaggatccaatggagattttgatcacggtaaccgatcagaatgacaacaagcccgaattcacccaggaggtctttaaggggtctgtcatggaaggtgctcttccaggaacctctgtgatggaggtcacagccacagacgcggacgatgatgtgaacacctacaatgccgccatcgcttacaccatcctcagccaagatcctgagctccctgacaaaaatatgttcaccattaacaggaacacaggagtcatcagtgtggtcaccactgggctggaccgagagagtttccctacgtataccctggtggttcaagctgctgaccttcaaggtgaggggttaagcacaacagcaacagctgtgatcacagtcactgacaccaacgataatcctccgatcttcaatcccaccacgtacaagggtcaggtgcctgagaacgaggctaacgtcgtaatcaccacactgaaagtgactgatgctgatgcccccaataccccagcgtgggaggctgtatacaccatattgaatgatgatggtggacaatttgtcgtcaccacaaatccagtgaacaacgatggcattttgaaaacagcaaagggcttggattttgaggccaagcagcagtacattctacacgtagcagtgacgaatgtggtaccttttgaggtctctctcaccacctccacagccaccgtcaccgtggatgtgctggatgtgaatgaagcccccatctttgtgcctcctgaaaagagagtggaagtgtccgaggactttggcgtgggccaggaaatcacatcctacactgcccaggagccagacacatttatggaacagaaaataacatatcggatttggagagacactgccaactggctggagattaatccggacactggtgccatttccactcgggctgagctggacagggaggattttgagcacgtgaagaacagcacgtacacagccctaatcatagctacagacaatggttctccagttgctactggaacagggacacttctgctgatcctgtctgatgtgaatgacaacgcccccataccagaacctcgaactatattcttctgtgagaggaatccaaagcctcaggtcataaacatcattgatgcagaccttcctcccaatacatctcccttcacagcagaactaacacacggggcgagtgccaactggaccattcagtacaacgacccaacccaagaatctatcattttgaagccaaagatggccttagaggtgggtgactacaaaatcaatctcaagctcatggataaccagaataaagaccaagtgaccaccttagaggtcagcgtgtgtgactgtgaaggggccgccggcgtctgtaggaaggcacagcctgtcgaagcaggattgcaaattcctgccattctggggattcttggaggaattcttgctttgctaattctgattctgctgctcttgctgtttcttcggaggagagcggtggtcaaagagcccttactgcccccagaggatgacacccgggacaacgtttattactatgatgaagaaggaggcggagaagaggaccaggactttgacttgagccacttgcccctcttcggctaccccttctatggggtgctgcgagtgagcatgcaggccctgtccggacccactctcctggggctcaaccgccagcatctca

SEQ ID NO: 313816 - DNA, 970 bp, Homo sapiens
agtggcgtcggaactgcaaagcacctgtgagcttgcggaagtcagttcagactccagcccgctccagcccggcccgacccgaccgcacccggcgcctgccctcgctcggcgtccccggccagccatgggcccttggagccgcagcctctcggcgctgctgctgctgctgcaggtctcctcttggctctgccaggagccggagccctgccaccctggctttgacgccgagagctacacgttcacggtgccccggcgccacctggagagaggccgcgtcctgggcagagtgaattttgaagattgcaccggtcgacaaaggacagcctatttttccctcgacacccgattcaaagtgggcacagatggtgtgattacagtcaaaaggcctctacggtttcataacccacagatccatttcttggtctacgcctgggactccacctacagaaagttttccaccaaagtcacgctgaatacagtggggcaccaccaccgccccccgccccatcaggcctccgtttctggaatccaagcagaattgctcacatttcccaactcctctcctggcctcagaagacagaagagagactgggttattcctcccatcagctgcccagaaaatgaaaaaggcccatttcctaaaaacctggttcagatcaaatccaacaaagacaaagaaggcaaggttttctacagcatcactggccaaggagctgacacaccccctgttggtgtctttattattgaaagagaaacaggatggctgaaggtgacagagcctctggatagagaacgcattgccacatacactgtaagtatctcttagaagcttgttgacaccggggtaacatccacccaggattttttggtcaacccatgctggatccgcagatcagaggctctgaacacatgaggagcttaacttgacacctcttgacctgttgctaaggagaagtgatgggagaacgtg

SEQ ID NO: 313817 - DNA, 411 bp, Homo sapiens
caaacatgctcctcctgcctcaggacctctgtccttactgtttcctctgcctggaacactttcccccagatttgggaaaatgacagtgattgagtttaaaacccatctgaaagttaaggaccatgcttgagttcacatatcactgtctactatgttgtactgtacataccgacttcagggatgtgagtgtcacgtggattgacatcttcaagtgtattgaaggcagctagtggctgtctaactgccccctgtctggtatgaggggtgctctgtgatagctgctgcttctggccttctttatctttggctctcaacacttgctctgtctcccccaccatcccagttctgattctgctgctcttgctgtttcttcggaggagagcggtggtcaaagagcccttactgccccca

SEQ ID NO: 313818 - DNA, 1345 bp, Homo sapiens
agtggcgtcggaactgcaaagcacctgtgagcttgcggaagtcagttcagactccagcccgctccagcccggcccgacccgaccgcacccggcgcctgccctcgctcggcgtccccggccagccatgggcccttggagccgcagcctctcggcgctgctgctgctgctgcaggtctcctcttggctctgccaggagccggagccctgccaccctggctttgacgccgagagctacacgttcacggtgccccggcgccacctggagagaggccgcgtcctgggcagagtgaattttgaagattgcaccggtcgacaaaggacagcctatttttccctcgacacccgattcaaagtgggcacagatggtgtgattacagtcaaaaggcctctacggtttcataacccacagatccatttcttggtctacgcctgggactccacctacagaaagttttccaccaaagtcacgctgaatacagtggggcaccaccaccgccccccgccccatcaggcctccgtttctggaatccaagcagaattgctcacatttcccaactcctctcctggcctcagaagacagaagagagactgggttattcctcccatcagctgcccagaaaatgaaaaaggcccatttcctaaaaacctggttcagatcaaatccaacaaagacaaagaaggcaaggttttctacagcatcactggccaaggagctgacacaccccctgttggtgtctttattattgaaagagaaacaggatggctgaaggtgacagagcctctggatagagaacgcattgccacatacactctcttctctcacgctgtgtcatcgaagaaggaagctcctgcccctcctaaagctgaagccaaagcgaaggctttaaaggccaagaaggcagtgttgaaaggtgtccacagccacaaaaagaagaagatccgcacgtcacccaccttccggcggccgaagacactgcgactccggagacagcccaaatatcctcggaagagcgctcccaggagaaacaagcttgaccactatgctatcatcaagtttccgctgaccactgagtctgccatgaagaagatagaagacaacaacacacttgtgttcattgtggatgttaaagccaacaagcaccagattaaacaggctgtgaagaagctgtatgacattgatgtggccaaggtcaacaccctgattcggcctgatggagagaagaaggcatatgttcgactggctcctgattacgatgctttggatgttgccaacaaaattgggatcatctaaactgagtccagctgcctaattctgaatatatatatatatatatcttttcaccat

SEQ ID NO: 313819 - DNA, 4633 bp, Homo sapiens
agtggcgtcggaactgcaaagcacctgtgagcttgcggaagtcagttcagactccagcccgctccagcccggcccgacccgaccgcacccggcgcctgccctcgctcggcgtccccggccagccatgggcccttggagccgcagcctctcggcgctgctgctgctgctgcaggtctcctcttggctctgccaggagccggagccctgccaccctggctttgacgccgagagctacacgttcacggtgccccggcgccacctggagagaggccgcgtcctgggcagagtgaattttgaagattgcaccggtcgacaaaggacagcctatttttccctcgacacccgattcaaagtgggcacagatggtgtgattacagtcaaaaggcctctacggtttcataacccacagatccatttcttggtctacgcctgggactccacctacagaaagttttccaccaaagtcacgctgaatacagtggggcaccaccaccgccccccgccccatcaggcctccgtttctggaatccaagcagaattgctcacatttcccaactcctctcctggcctcagaagacagaagagagactgggttattcctcccatcagctgcccagaaaatgaaaaaggcccatttcctaaaaacctggttcagatcaaatccaacaaagacaaagaaggcaaggttttctacagcatcactggccaaggagctgacacaccccctgttggtgtctttattattgaaagagaaacaggatggctgaaggtgacagagcctctggatagagaacgcattgccacatacactctcttctctcacgctgtgtcatccaacgggaatgcagttgaggatccaatggagattttgatcacggtaaccgatcagaatgacaacaagcccgaattcacccaggaggtctttaaggggtctgtcatggaaggtgctcttccaggaacctctgtgatggaggtcacagccacagacgcggacgatgatgtgaacacctacaatgccgccatcgcttacaccatcctcagccaagatcctgagctccctgacaaaaatatgttcaccattaacaggaacacaggagtcatcagtgtggtcaccactgggctggaccgagagagtttccctacgtataccctggtggttcaagctgctgaccttcaaggtgaggggttaagcacaacagcaacagctgtgatcacagtcactgacaccaacgataatcctccgatcttcaatcccaccacgggcttggattttgaggccaagcagcagtacattctacacgtagcagtgacgaatgtggtaccttttgaggtctctctcaccacctccacagccaccgtcaccgtggatgtgctggatgtgaatgaagcccccatctttgtgcctcctgaaaagagagtggaagtgtccgaggactttggcgtgggccaggaaatcacatcctacactgcccaggagccagacacatttatggaacagaaaataacatatcggatttggagagacactgccaactggctggagattaatccggacactggtgccatttccactcgggctgagctggacagggaggattttgagcacgtgaagaacagcacgtacacagccctaatcatagctacagacaatggttctccagttgctactggaacagggacacttctgctgatcctgtctgatgtgaatgacaacgcccccataccagaacctcgaactatattcttctgtgagaggaatccaaagcctcaggtcataaacatcattgatgcagaccttcctcccaatacatctcccttcacagcagaactaacacacggggcgagtgccaactggaccattcagtacaacgacccaacccaagaatctatcattttgaagccaaagatggccttagaggtgggtgactacaaaatcaatctcaagctcatggataaccagaataaagaccaagtgaccaccttagaggtcagcgtgtgtgactgtgaaggggccgccggcgtctgtaggaaggcacagcctgtcgaagcaggattgcaaattcctgccattctggggattcttggaggaattcttgctttgctaattctgattctgctgctcttgctgtttcttcggaggagagcggtggtcaaagagcccttactgcccccagaggatgacacccgggacaacgtttattactatgatgaagaaggaggcggagaagaggaccaggactttgacttgagccagctgcacaggggcctggacgctcggcctgaagtgactcgtaacgacgttgcaccaaccctcatgagtgtcccccggtatcttccccgccctgccaatcccgatgaaattggaaattttattgatgaaaatctgaaagcggctgatactgaccccacagccccgccttatgattctctgctcgtgtttgactatgaaggaagcggttccgaagctgctagtctgagctccctgaactcctcagagtcagacaaagaccaggactatgactacttgaacgaatggggcaatcgcttcaagaagctggctgacatgtacggaggcggcgaggacgactaggggactcgagagaggcgggccccagacccatgtgctgggaaatgcagaaatcacgttgctggtggtttttcagctcccttcccttgagatgagtttctggggaaaaaaaagagactggttagtgatgcagttagtatagctttatactctctccactttatagctctaataagtttgtgttagaaaagtttcgacttatttcttaaagcttttttttttttcccatcactctttacatggtggtgatgtccaaaagatacccaaattttaatattccagaagaacaactttagcatcagaaggttcacccagcaccttgcagattttcttaaggaattttgtctcacttttaaaaagaaggggagaagtcagctactctagttctgttgttttgtgtatataattttttaaaaaaaatttgtgtgcttctgctcattactacactggtgtgtccctctgccttttttttttttttaagacagggtctcattctatcggccaggctggagtgcagtggtgcaatcacagctcactgcagccttgtcctcccaggctcaagctatccttgcacctcagcctcccaagtagctgggaccacaggcatgcaccactacgcatgactaattttttaaatatttgagacggggtctccctgtgttacccaggctggtctcaaactcctgggctcaagtgatcctcccatcttggcctcccagagtattgggattacagacatgagccactgcacctgcccagctccccaactccctgccattttttaagagacagtttcgctccatcgcccaggcctgggatgcagtgatgtgatcatagctcactgtaacctcaaactctggggctcaagcagttctcccaccagcctcctttttatttttttgtacagatggggtcttgctatgttgcccaagctggtcttaaactcctggcctcaagcaatccttctgccttggccccccaaagtgctgggattgtgggcatgagctgctgtgcccagcctccatgttttaatatcaactctcactcctgaattcagttgctttgcccaagataggagttctctgatgcagaaattattgggctcttttagggtaagaagtttgtgtctttgtctggccacatcttgactaggtattgtctactctgaagacctttaatggcttccctctttcatctcctgagtatgtaacttgcaatgggcagctatccagtgacttgttctgagtaagtgtgttcattaatgtttatttagctctgaagcaagagtgatatactccaggacttagaatagtgcctaaagtgctgcagccaaagacagagcggaactatgaaaagtgggcttggagatggcaggagagcttgtcattgagcctggcaatttagcaaactgatgctgaggatgattgaggtgggtctacctcatctctgaaaattctggaaggaatggaggagtctcaacatgtgtttctgacacaagatccgtggtttgtactcaaagcccagaatccccaagtgcctgcttttgatgatgtctacagaaaatgctggctgagctgaacacatttgcccaattccaggtgtgcacagaaaaccgagaatattcaaaattccaaatttttttcttaggagcaagaagaaaatgtggccctaaagggggttagttgaggggtagggggtagtgaggatcttgatttggatctctttttatttaaatgtgaatttcaacttttgacaatcaaagaaaagacttttgttgaaatagctttactgtttctcaagtgttttggagaaaaaaatcaaccctgcaatcactttttggaattgtcttgatttttcggcagttcaagctatatcgaatatagttctgtgtagagaatgtcactgtagttttgagtgtatacatgtgtgggtgctgataattgtgtattttctttgggggtggaaaaggaaaacaattcaagctgagaaaagtattctcaaagatgcatttttataaattttattaaacaattttgttaaaccatt

SEQ ID NO: 313820 - DNA, 4972 bp, Homo sapiens
agtggcgtcggaactgcaaagcacctgtgagcttgcggaagtcagttcagactccagcccgctccagcccggcccgacccgaccgcacccggcgcctgccctcgctcggcgtccccggccagccatgggcccttggagccgcagcctctcggcgctgctgctgctgctgcaggtctcctcttggctctgccaggagccggagccctgccaccctggctttgacgccgagagctacacgttcacggtgccccggcgccacctggagagaggccgcgtcctgggcagagtgaattttgaagattgcaccggtcgacaaaggacagcctatttttccctcgacacccgattcaaagtgggcacagatggtgtgattacagtcaaaaggcctctacggtttcataacccacagatccatttcttggtctacgcctgggactccacctacagaaagttttccaccaaagtcacgctgaatacagtggggcaccaccaccgccccccgccccatcaggcctccgtttctggaatccaagcagaattgctcacatttcccaactcctctcctggcctcagaagacagaagagagactgggttattcctcccatcagctgcccagaaaatgaaaaaggcccatttcctaaaaacctggttcagatcaaatccaacaaagacaaagaaggcaaggttttctacagcatcactggccaaggagctgacacaccccctgttggtgtctttattattgaaagagaaacaggatggctgaaggtgacagagcctctggatagagaacgcattgccacatacactctcttctctcacgctgtgtcatccaacgggaatgcagttgaggatccaatggagattttgatcacggtaaccgatcagaatgacaacaagcccgaattcacccaggaggtctttaaggggtctgtcatggaaggtgctcttccaggaacctctgtgatggaggtcacagccacagacgcggacgatgatgtgaacacctacaatgccgccatcgcttacaccatcctcagccaagatcctgagctccctgacaaaaatatgttcaccattaacaggaacacaggagtcatcagtgtggtcaccactgggctggaccgagagagtttccctacgtataccctggtggttcaagctgctgaccttcaaggtgaggggttaagcacaacagcaacagctgtgatcacagtcactgacaccaacgataatcctccgatcttcaatcccaccacgtacaagggtcaggtgcctgagaacgaggctaacgtcgtaatcaccacactgaaagtgactgatgctgatgcccccaataccccagcgtgggaggctgtatacaccatattgaatgatgatggtggacaatttgtcgtcaccacaaatccagtgaacaacgatggcattttgaaaacagcaaagggcttggattttgaggccaagcagcagtacattctacacgtagcagtgacgaatgtggtaccttttgaggtctctctcaccacctccacagccaccgtcaccgtggatgtgctggatgtgaatgaagcccccatctttgtgcctcctgaaaagagagtggaagtgtccgaggactttggcgtgggccaggaaatcacatcctacactgcccaggagccagacacatttatggaacagaaaataacatatcggatttggagagacactgccaactggctggagattaatccggacactggtgccatttccactcgggctgagctggacagggaggattttgagcacgtgaagaacagcacgtacacagccctaatcatagctacagacaatggttctccagttgctactggaacagggacacttctgctgatcctgtctgatgtgaatgacaacgcccccataccagaacctcgaactatattcttctgtgagaggaatccaaagcctcaggtcataaacatcattgatgcagaccttcctcccaatacatctcccttcacagcagaactaacacacggggcgagtgccaactggaccattcagtacaacgacccaacccaagaatctatcattttgaagccaaagatggccttagaggtgggtgactacaaaatcaatctcaagctcatggataaccagaataaagaccaagtgaccaccttagaggtcagcgtgtgtgactgtgaaggggccgccggcgtctgtaggaaggcacagcctgtcgaagcaggattgcaaattcctgccattctggggattcttggaggaattcttgctttgctaattctgattctgctgctcttgctgtttcttcggaggagagcggtggtcaaagagcccttactgcccccagaggatgacacccgggacaacgtttattactatgatgaagaaggaggcggagaagaggaccaggactttgacttgagccagctgcacaggggcctggacgctcggcctgaagtgactcgtaacgacgttgcaccaaccctcatgagtgtcccccggtatcttccccgccctgccaatcccgatgaaattggaaattttattgatgaaaatctgaaagcggctgatactgaccccacagccccgccttatgattctctgctcgtgtttgactatgaaggaagcggttccgaagctgctagtctgagctccctgaactcctcagagtcagacaaagaccaggactatgactacttgaacgaatggggcaatcgcttcaagaagctggctgacatgtacggaggcggcgaggacgactaggggactcgagagaggcgggccccagacccatgtgctgggaaatgcagaaatcacgttgctggtggtttttcagctcccttcccttgagatgagtttctggggaaaaaaaagagactggttagtgatgcagttagtatagctttatactctctccactttatagctctaataagtttgtgttagaaaagtttcgacttatttcttaaagcttttttttttttcccatcactctttacatggtggtgatgtccaaaagatacccaaattttaatattccagaagaacaactttagcatcagaaggttcacccagcaccttgcagattttcttaaggaattttgtctcacttttaaaaagaaggggagaagtcagctactctagttctgttgttttgtgtatataattttttaaaaaaaatttgtgtgcttctgctcattactacactggtgtgtccctctgccttttttttttttttaagacagggtctcattctatcggccaggctggagtgcagtggtgcaatcacagctcactgcagccttgtcctcccaggctcaagctatccttgcacctcagcctcccaagtagctgggaccacaggcatgcaccactacgcatgactaattttttaaatatttgagacggggtctccctgtgttacccaggctggtctcaaactcctgggctcaagtgatcctcccatcttggcctcccagagtattgggattacagacatgagccactgcacctgcccagctccccaactccctgccattttttaagagacagtttcgctccatcgcccaggcctgggatgcagtgatgtgatcatagctcactgtaacctcaaactctggggctcaagcagttctcccaccagcctcctttttatttttttgtacagatggggtcttgctatgttgcccaagctggtcttaaactcctggcctcaagcaatccttctgccttggccccccaaagtgctgggattgtgggcatgagctgctgtgcccagcctccatgttttaatatcaactctcactcctgaattcagttgctttgcccaagataggagttctctgatgcagaaattattgggctcttttagggtaagaagtttgtgtctttgtctggccacatcttgactaggtattgtctactctgaagacctttaatggcttccctctttcatctcctgagtatgtaacttgcaatgggcagctatccagtgacttgttctgagtaagtgtgttcattaatgtttatttagctctgaagcaagagtgatatactccaggacttagaatagtgcctaaagtgctgcagccaaagacagagcggaactatgaaaagtgggcttggagatggcaggagagcttgtcattgagcctggcaatttagcaaactgatgctgaggatgattgaggtgggtctacctcatctctgaaaattctggaaggaatggaggagtctcaacatgtgtttctgacacaagatccgtggtttgtactcaaagcccagaatccccaagtgcctgcttttgatgatgtctacagaaaatgctggctgagctgaacacatttgcccaattccaggtgtgcacagaaaaccgagaatattcaaaattccaaatttttttcttaggagcaagaagaaaatgtggccctaaagggggttagttgaggggtagggggtagtgaggatcttgatttggatctctttttatttaaatgtgaatttcaacttttgacaatcaaagaaaagacttttgttgaaatagctttactgtttctcaagtgttttggagaaaaaaatcaaccctgcaatcactttttggaattgtcttgatttttcggcagttcaagctatatcgaatatagttctgtgtagagaatgtcactgtagttttgagtgtatacatgtgtgggtgctgataattgtgtattttctttgggggtggaaaaggaaaacaattcaagctgagaaaagtattctcaaagatgcatttttataaattttattaaacaattttgttaaaccattaaaaaaaacaaaaaacacaaaaaaaaattgtgggggggggcgggctgagaaaggtttttaacccattgggtggggggggggggccgaggtttggtgaccgggcaaaagggtgtcaagggaacgggggagacgggggggggttccccaaaaaaaggg

SEQ ID NO: 313821 - DNA, 3837 bp, Homo sapiens
ctgactctttggtcgcattcagtattgcctcctgctggttcttatccctgttcccttttcttcaagccaggtatgaactcacctatttttgtaaagctggaatctcactgtttcacccaggctgcagtgctgtggtaccagtcatagctcactgtagcctcaaactcctggactcaagtgattctcctgcctcagccttgtgaggggttaagcacaacagcaacagctgtgatcacagtcactgacaccaacgataatcctccgatcttcaatcccaccacgtacaagggtcaggtgcctgagaacgaggctaacgtcgtaatcaccacactgaaagtgactgatgctgatgcccccaataccccagcgtgggaggctgtatacaccatattgaatgatgatggtggacaatttgtcgtcaccacaaatccagtgaacaacgatggcattttgaaaacagcaaagggcttggattttgaggccaagcagcagtacattctacacgtagcagtgacgaatgtggtaccttttgaggtctctctcaccacctccacagccaccgtcaccgtggatgtgctggatgtgaatgaagcccccatctttgtgcctcctgaaaagagagtggaagtgtccgaggactttggcgtgggccaggaaatcacatcctacactgcccaggagccagacacatttatggaacagaaaataacatatcggatttggagagacactgccaactggctggagattaatccggacactggtgccatttccactcgggctgagctggacagggaggattttgagcacgtgaagaacagcacgtacacagccctaatcatagctacagacaatggttctccagttgctactggaacagggacacttctgctgatcctgtctgatgtgaatgacaacgcccccataccagaacctcgaactatattcttctgtgagaggaatccaaagcctcaggtcataaacatcattgatgcagaccttcctcccaatacatctcccttcacagcagaactaacacacggggcgagtgccaactggaccattcagtacaacgacccaacccaagaatctatcattttgaagccaaagatggccttagaggtgggtgactacaaaatcaatctcaagctcatggataaccagaataaagaccaagtgaccaccttagaggtcagcgtgtgtgactgtgaaggggccgccggcgtctgtaggaaggcacagcctgtcgaagcaggattgcaaattcctgccattctggggattcttggaggaattcttgctttgctaattctgattctgctgctcttgctgtttcttcggaggagagcggtggtcaaagagcccttactgcccccagaggatgacacccgggacaacgtttattactatgatgaagaaggaggcggagaagaggaccaggactttgacttgagccagctgcacaggggcctggacgctcggcctgaagtgactcgtaacgacgttgcaccaaccctcatgagtgtcccccggtatcttccccgccctgccaatcccgatgaaattggaaattttattgatgaaaatctgaaagcggctgatactgaccccacagccccgccttatgattctctgctcgtgtttgactatgaaggaagcggttccgaagctgctagtctgagctccctgaactcctcagagtcagacaaagaccaggactatgactacttgaacgaatggggcaatcgcttcaagaagctggctgacatgtacggaggcggcgaggacgactaggggactcgagagaggcgggccccagacccatgtgctgggaaatgcagaaatcacgttgctggtggtttttcagctcccttcccttgagatgagtttctggggaaaaaaaagagactggttagtgatgcagttagtatagctttatactctctccactttatagctctaataagtttgtgttagaaaagtttcgacttatttcttaaagcttttttttttttcccatcactctttacatggtggtgatgtccaaaagatacccaaattttaatattccagaagaacaactttagcatcagaaggttcacccagcaccttgcagattttcttaaggaattttgtctcacttttaaaaagaaggggagaagtcagctactctagttctgttgttttgtgtatataattttttaaaaaaaatttgtgtgcttctgctcattactacactggtgtgtccctctgccttttttttttttttaagacagggtctcattctatcggccaggctggagtgcagtggtgcaatcacagctcactgcagccttgtcctcccaggctcaagctatccttgcacctcagcctcccaagtagctgggaccacaggcatgcaccactacgcatgactaattttttaaatatttgagacggggtctccctgtgttacccaggctggtctcaaactcctgggctcaagtgatcctcccatcttggcctcccagagtattgggattacagacatgagccactgcacctgcccagctccccaactccctgccattttttaagagacagtttcgctccatcgcccaggcctgggatgcagtgatgtgatcatagctcactgtaacctcaaactctggggctcaagcagttctcccaccagcctcctttttatttttttgtacagatggggtcttgctatgttgcccaagctggtcttaaactcctggcctcaagcaatccttctgccttggccccccaaagtgctgggattgtgggcatgagctgctgtgcccagcctccatgttttaatatcaactctcactcctgaattcagttgctttgcccaagataggagttctctgatgcagaaattattgggctcttttagggtaagaagtttgtgtctttgtctggccacatcttgactaggtattgtctactctgaagacctttaatggcttccctctttcatctcctgagtatgtaacttgcaatgggcagctatccagtgacttgttctgagtaagtgtgttcattaatgtttatttagctctgaagcaagagtgatatactccaggacttagaatagtgcctaaagtgctgcagccaaagacagagcggaactatgaaaagtgggcttggagatggcaggagagcttgtcattgagcctggcaatttagcaaactgatgctgaggatgattgaggtgggtctacctcatctctgaaaattctggaaggaatggaggagtctcaacatgtgtttctgacacaagatccgtggtttgtactcaaagcccagaatccccaagtgcctgcttttgatgatgtctacagaaaatgctggctgagctgaacacatttgcccaattccaggtgtgcacagaaaaccgagaatattcaaaattccaaatttttttcttaggagcaagaagaaaatgtggccctaaagggggttagttgaggggtagggggtagtgaggatcttgatttggatctctttttatttaaatgtgaatttcaacttttgacaatcaaagaaaagacttttgttgaaatagctttactgtttctcaagtgttttggagaaaaaaatcaaccctgcaatcactttttggaattgtcttgatttttcggcagttcaagctatatcgaatatagttctgtgtagagaatgtcactgtagttttgagtgtatacatgtgtgggtgctgataattgtgtattttctttgggggtggaaaaggaaaacaattcaagctgagaaaagtattctcaaagatgcatttttataaattttattaaacaattttgttaaaccatt

SEQ ID NO: 313822 - DNA, 2825 bp, Homo sapiens
tctttgtaccagaagctggtgcctttcagacctttgcctgtgtcatatgttactgtcccattggctaagcaagtcacacaacaaagccccagatcgatggatgtatacttttctcacaagctggggttgggagggagtgaatatttgccaaacagtgatctaatcatcatgtcctatgaaaattagtaaggcacacagcctatatctggatccacacatgctactcacaatcctttgggccatgtttttttccagtgctatttgggagacttttagcttgaaaactgtcattttgcattaaactggtaaagatcatacagttggcagtgaaggcatcatccaaccataatctataaactgaacatagccctgtgtgtatgactatttctttcctactcttcattgtacttcaacctttttctccaaaggactttgacttgagccagctgcacaggggcctggacgctcggcctgaagtgactcgtaacgacgttgcaccaaccctcatgagtgtcccccggtatcttccccgccctgccaatcccgatgaaattggaaattttattgatgaaaatctgaaagcggctgatactgaccccacagccccgccttatgattctctgctcgtgtttgactatgaaggaagcggttccgaagctgctagtctgagctccctgaactcctcagagtcagacaaagaccaggactatgactacttgaacgaatggggcaatcgcttcaagaagctggctgacatgtacggaggcggcgaggacgactaggggactcgagagaggcgggccccagacccatgtgctgggaaatgcagaaatcacgttgctggtggtttttcagctcccttcccttgagatgagtttctggggaaaaaaaagagactggttagtgatgcagttagtatagctttatactctctccactttatagctctaataagtttgtgttagaaaagtttcgacttatttcttaaagcttttttttttttcccatcactctttacatggtggtgatgtccaaaagatacccaaattttaatattccagaagaacaactttagcatcagaaggttcacccagcaccttgcagattttcttaaggaattttgtctcacttttaaaaagaaggggagaagtcagctactctagttctgttgttttgtgtatataattttttaaaaaaaatttgtgtgcttctgctcattactacactggtgtgtccctctgccttttttttttttttaagacagggtctcattctatcggccaggctggagtgcagtggtgcaatcacagctcactgcagccttgtcctcccaggctcaagctatccttgcacctcagcctcccaagtagctgggaccacaggcatgcaccactacgcatgactaattttttaaatatttgagacggggtctccctgtgttacccaggctggtctcaaactcctgggctcaagtgatcctcccatcttggcctcccagagtattgggattacagacatgagccactgcacctgcccagctccccaactccctgccattttttaagagacagtttcgctccatcgcccaggcctgggatgcagtgatgtgatcatagctcactgtaacctcaaactctggggctcaagcagttctcccaccagcctcctttttatttttttgtacagatggggtcttgctatgttgcccaagctggtcttaaactcctggcctcaagcaatccttctgccttggccccccaaagtgctgggattgtgggcatgagctgctgtgcccagcctccatgttttaatatcaactctcactcctgaattcagttgctttgcccaagataggagttctctgatgcagaaattattgggctcttttagggtaagaagtttgtgtctttgtctggccacatcttgactaggtattgtctactctgaagacctttaatggcttccctctttcatctcctgagtatgtaacttgcaatgggcagctatccagtgacttgttctgagtaagtgtgttcattaatgtttatttagctctgaagcaagagtgatatactccaggacttagaatagtgcctaaagtgctgcagccaaagacagagcggaactatgaaaagtgggcttggagatggcaggagagcttgtcattgagcctggcaatttagcaaactgatgctgaggatgattgaggtgggtctacctcatctctgaaaattctggaaggaatggaggagtctcaacatgtgtttctgacacaagatccgtggtttgtactcaaagcccagaatccccaagtgcctgcttttgatgatgtctacagaaaatgctggctgagctgaacacatttgcccaattccaggtgtgcacagaaaaccgagaatattcaaaattccaaatttttttcttaggagcaagaagaaaatgtggccctaaagggggttagttgaggggtagggggtagtgaggatcttgatttggatctctttttatttaaatgtgaatttcaacttttgacaatcaaagaaaagacttttgttgaaatagctttactgtttctcaagtgttttggagaaaaaaatcaaccctgcaatcactttttggaattgtcttgatttttcggcagttcaagctatatcgaatatagttctgtgtagagaatgtcactgtagttttgagtgtatacatgtgtgggtgctgataattgtgtattttctttgggggtggaaaaggaaaacaattcaagctgagaaaagtattctcaaagatgcatttttataaattttattaaacaattttgttaaaccatt

SEQ ID NO: 313823 - DNA, 2508 bp, Homo sapiens
agtggcgtcggaactgcaaagcacctgtgagcttgcggaagtcagttcagactccagcccgctccagcccggcccgacccgaccgcacccggcgcctgccctcgctcggcgtccccggccagccatgggcccttggagccgcagcctctcggcgctgctgctgctgctgcaggtctcctcttggctctgccaggagccggagccctgccaccctggctttgacgccgagagctacacgttcacggtgccccggcgccacctggagagaggccgcgtcctgggcagagtgaattttgaagattgcaccggtcgacaaaggacagcctatttttccctcgacacccgattcaaagtgggcacagatggtgtgattacagtcaaaaggcctctacggtttcataacccacagatccatttcttggtctacgcctgggactccacctacagaaagttttccaccaaagtcacgctgaatacagtggggcaccaccaccgccccccgccccatcaggcctccgtttctggaatccaagcagaattgctcacatttcccaactcctctcctggcctcagaagacagaagagagactgggttattcctcccatcagctgcccagaaaatgaaaaaggcccatttcctaaaaacctggttcagatcaaatccaacaaagacaaagaaggcaaggttttctacagcatcactggccaaggagctgacacaccccctgttggtgtctttattattgaaagagaaacaggatggctgaaggtgacagagcctctggatagagaacgcattgccacatacactctcttctctcacgctgtgtcatccaacgggaatgcagttgaggatccaatggagattttgatcacggtaaccgatcagaatgacaacaagcccgaattcacccaggaggtctttaaggggtctgtcatggaaggtgctcttccaggaacctctgtgatggaggtcacagccacagacgcggacgatgatgtgaacacctacaatgccgccatcgcttacaccatcctcagccaagatcctgagctccctgacaaaaatatgttcaccattaacaggaacacaggagtcatcagtgtggtcaccactgggctggaccgagagagtttccctacgtataccctggtggttcaagctgctgaccttcaaggtgaggggttaagcacaacagcaacagctgtgatcacagtcactgacaccaacgataatcctccgatcttcaatcccaccacgtacaagggtcaggtgcctgagaacgaggctaacgtcgtaatcaccacactgaaagtgactgatgctgatgcccccaataccccagcgtgggaggctgtatacaccatattgaatgatgatggtggacaatttgtcgtcaccacaaatccagtgaacaacgatggcattttgaaaacagcaaagggcttggattttgaggccaagcagcagtacattctacacgtagcagtgacgaatgtggtaccttttgaggtctctctcaccacctccacagccaccgtcaccgtggatgtgctggatgtgaatgaagcccccatctttgtgcctcctgaaaagagagtggaagtgtccgaggactttggcgtgggccaggaaatcacatcctacactgcccaggagccagacacatttatggaacagaaaataacatatcggatttggagagacactgccaactggctggagattaatccggacactggtgccatttccactcgggctgagctggacagggaggattttgagcacgtgaagaacagcacgtacacagccctaatcatagctacagacaatggttctccagttgctactggaacagggacacttctgctgatcctgtctgatgtgaatgacaacgcccccataccagaacctcgaactatattcttctgtgagaggaatccaaagcctcaggtcataaacatcattgatgcagaccttcctcccaatacatctcccttcacagcagaactaacacacggggcgagtgccaactggaccattcagtacaacgacccaacccaagaatctatcattttgaagccaaagatggccttagaggtgggtgactacaaaatcaatctcaagctcatggataaccagaataaagaccaagtgaccaccttagaggtcagcgtgtgtgactgtgaaggggccgccggcgtctgtaggaaggcacagcctgtcgaagcaggattgcaaattcctgccattctggggattcttggaggaattcttgctttgctaattctgattctgctgctcttgctgtttcttcggaggagagcggtggtcaaagagcccttactgcccccagaggatgacacccgggacaacgtttattactatgatgaagaaggaggcggagaagaggaccagtcacgatcgactgtgagccaacggcaccagggggcatggacgcatcgcgcgcgagatcgactctagacgatcttgcatactggcttcag

SEQ ID NO: 313824 - DNA, 1182 bp, Homo sapiens
agtggcgtcggaactgcaaagcacctgtgagcttgcggaagtcagttcagactccagcccgctccagcccggcccgacccgaccgcacccggcgcctgccctcgctcggcgtccccggccagccatgggcccttggagccgcagcctctcggcgctgctgctgctgctgcaggtctcctcttggctctgccaggagccggagccctgccaccctggctttgacgccgagagctacacgttcacggtgccccggcgccacctggagagaggccgcgtcctgggcagagtgaattttgaagattgcaccggtcgacaaaggacagcctatttttccctcgacacccgattcaaagtgggcacagatggtgtgattacagtcaaaaggcctctacggtttcataacccacagatccatttcttggtctacgcctgggactccacctacagaaagttttccaccaaagtcacgctgaatacagtggggcaccaccaccgccccccgccccatcaggcctccgtttctggaatccaagcagaattgctcacatttcccaactcctctcctggcctcagaagacagaagagagactgggttattcctcccatcagctgcccagaaaatgaaaaaggcccatttcctaaaaacctggttcagatcaaatccaacaaagacaaagaaggcaaggttttctacagcatcactggccaaggagctgacacaccccctgttggtgtctttattattgaaagagaaacaggatggctgaaggtgacagagcctctggatagagaacgcattgccacatacactctcttctctcacgctgtgtcatccaacgggaatgcagttgaggatccaatggagattttgatcacggtaaccgatcagaatgacaacaagcccgaattcacccaggaggtctttaaggggtctgtcatggaaggtgctcttccaggaacctctgtgatggaggtcacagccacagacgcggacgatgatgtgaacacctacaatgccgccatcgcttacaccatcctcagccaagatcctgagctccctgacaaaaatatgttcaccattaacaggaacacaggagtcatcagtgtggtcaccactgggctggaccgagagagtttccctacgtatacctgatgggacgatggcggtaccggctgattatg

SEQ ID NO: 313825 - DNA, 557 bp, Homo sapiens
  misc_feature (456)..(456): n is a, c, g, or t
ttcgtgccgattcggcacgagaagagaaggaaaaccctgtctttagcaccctttaaaagaactgtgccccccttctcaaccgtggcagctcccgctggctcctatgccctgccctaaagggctcttgagcctctgggaatgggaggggccaagagaaggaaaaccctgtctttagcaccctttaaaagaactgtgccccccttctcagtgctgcctttgcatgggcctggcccggctcgcattcgtcagtgactccaaccctcctgcttgctgtacttgggatgaaacgaccccacaggtcaggtggagggtggggcgtgggcatcagccaggattgccgttacagtctttttctcaggagctacaaagatctcttcctgttactaaatggtcgcaccccggtgtgcgaaaaactcgtgccgaatccctgcagccgggggattcatattctaaacngccgccacgcgtggactccacttttgtccctttatgaaggttaattcgacttgggtatcatgtcatactgttcctgtttaaattgttaccgtcccaatccc

SEQ ID NO: 313826 - DNA, 655 bp, Homo sapiens
cgggcggaagtagccgtcgcatcgcggatcgcgaaacgccgcggagctgaggcagttccgctggctagtgtgtacgcggcgagcttctcccggcgccgcccgctcggctcccatagcgcccgcgacagcggtccggacgccgcccgaacatggactccgccggccaaggtacctgccgggcccggccccttcgccgcagatgggcccaggctgcccgttgttctccgtctcccggggtcgcgtctgcgactctctgtcctctcggtctcggttcacccaccccgcggcccctcttcagctcccggggccactgacctcgaagcttatgatggtcgtggtgtgttttttgcccgcggcccagaccgcttcctgggctctctccagccgccctcctggtctcccctgggaccgttccgaggtgtggttccctggcgcccgccgttgctcccgtagtttgggttctgtcgctcccagcaggtctcgcttatgccgcccaccccgtgccctggcggggccctcgggttcacgctgtctggccctggacccagtccgaggtgttgagggcggctcccgagcagagaaggggtcttcgcgttcagcagagctccccttgggcagcaactctgctcggagctcagcctgcttaggggttgcc

SEQ ID NO: 313827 - DNA, 2405 bp, Homo sapiens
cgggcggaagtagccgtcgcatcgcggatcgcgaaacgccgcggagctgaggcagttccgctggctagtgtgtacgcggcgagcttctcccggcgccgcccgctcggctcccatagcgcccgcgacagcggtccggacgccgcccgaacatggactccgccggccaagatatcaacctgaattctcctaacaaaggtctgctgtctgactccatgacggatgttcctgtcgacacaggtgtggctgcccggactcctgctgttgagggtctgacagaggctgaggaggaggagctcagggctgagcttaccaaggtggaagaggaaattgtcactctgcgccaggtcctggcagccaaggagaggcactgtggagagctcaagaggaggctgggcctctccaccctgggggagctgaaacagaacctgtccaggagctggcatgacgtgcaggtctctagcgcctatgtgaaaacttctgagaaacttggagagtggaatgagaaagtgacccagtcagacctctacaagaagactcaggaaactctttcacaggcaggacagaagacttcagctgccctgtccacagtgggctctgccatcagcaggaagcttggagacatgagcagctactccatccgccactcaataagtatgccagccatgaggaactctgcgaccttcaagtcgtttgaggaccgagttgggaccataaagtctaaggttgtgggtgacagagagaacggcagtgacaacctcccttcctcagcggggagtggtgacaagcccctgtcggatcccgcacctttctaagcctgtggttgcttcacccgctgcagagcacacgcaacccagcctcagcatcacagccgcagctctgttcagcggagcagccagccagggcggatgagcagagccggccctgaggacagtcctgcccatccacgcggagatgtggctgccgcgtttgcatgaatttgaagaacacaggcttgtacacagatgttttacactcacgtttgtagatgaaacagatcactgtgctgtccttcctaggggtgcaggaagtggacagggcggagggtttgaaagaatattgagccaaagcccaggctccctttgggaatcatgttagcccatcagaatgttgaaggattgaagagttctaagcataaaataagtggcattttctgacttcttcctcctcctccttccctgactcacagaaggaatgcaatcacccagcaagtcctacctgttacgcaattttttatctcaaaatgccgaacgagaaaactgtccattttctgagacccccagaaaggaaactgaccctcagcagctgcctgattgttacgcgaatctagctttaacggaagcaaattcattattttttaaatgcagtggacttttcaaaaagtttaaattaggcaaagcagctttagcctcatagaatattatttctttggactcaagctgaaatacaagccttacattgccttatgctttatttctttctaatttttatatgtatatagatgagggttccttaatggttgtgagcattgtgtggaattttacacctggcctgcgtggcagcctcttccagttgaggtgttttatgtcacgcacactccatcccagtgtacaaaacctgcttctcttctcaaccgtggcagctcccgctggctcctatgccctgccctaaagggctcttgagcctctgggaatgggaggggccaagagaaggaaaaccctgtctttagcaccctttaaaagaactgtgccccccttctcagtgctgcctttgcatgggcctggcccggctcgcattcgtcagtgactccaaccctcctgcttgctgtacttgggatgaaacgaccccacaggtcaggtggagggtggggcgtgggcatcagccaggattgccgttacagtctttttctcaggagctacaaagatctcttcctgttactaaatggtcgcaccccagcagcctctctcgcacaccggggccctgcatgtcagatggcgtggtctgcagggggagctctgtgccttagtggctcttggcaggacactgagggcctgcctgtggtgtgcccggctctgccactcccgggaggggaagggctgctcagctcaaggtgtcctgttcggtagagcaagtgtcctctgacagccgtgtccccggacagttcagacacccttggggatggcactccacacacgacagagatgcaggggccagggaagcccagcgctcggtgcccttcgtccagggttaaaatcggcctgtggggtgtggtgagaaggcaggttgtgcgggtgttgaccgatgtatcttttccttaaagttattataataatgggtaatttgtcaataaagcattcctttgggggaaa

SEQ ID NO: 313828 - DNA, 2345 bp, Homo sapiens
cgggcggaagtagccgtcgcatcgcggatcgcgaaacgccgcggagctgaggcagttccgctggctagtgtgtacgcggcgagcttctcccggcgccgcccgctcggctcccatagcgcccgcgacagcggtccggacgccgcccgaacatggactccgccggccaagatatcaacctgaattctcctaacaaaggtctgctgtctgactccatgacggatgttcctgtcgacacaggtgtggctgcccggactcctgctgttgagggtctgacagaggctgaggaggaggagctcagggctgagcttaccaaggtggaagaggaaattgtcactctgcgccaggtcctggcagccaaggagaggcactgtggagagctcaagaggaggctgggcctctccaccctgggggagctgaaacagaacctgtccaggagctggcatgacgtgcaggtctctagcgcctacaagaagactcaggaaactctttcacaggcaggacagaagacttcagctgccctgtccacagtgggctctgccatcagcaggaagcttggagacatgagcagctactccatccgccactcaataagtatgccagccatgaggaactctgcgaccttcaagtcgtttgaggaccgagttgggaccataaagtctaaggttgtgggtgacagagagaacggcagtgacaacctcccttcctcagcggggagtggtgacaagcccctgtcggatcccgcacctttctaagcctgtggttgcttcacccgctgcagagcacacgcaacccagcctcagcatcacagccgcagctctgttcagcggagcagccagccagggcggatgagcagagccggccctgaggacagtcctgcccatccacgcggagatgtggctgccgcgtttgcatgaatttgaagaacacaggcttgtacacagatgttttacactcacgtttgtagatgaaacagatcactgtgctgtccttcctaggggtgcaggaagtggacagggcggagggtttgaaagaatattgagccaaagcccaggctccctttgggaatcatgttagcccatcagaatgttgaaggattgaagagttctaagcataaaataagtggcattttctgacttcttcctcctcctccttccctgactcacagaaggaatgcaatcacccagcaagtcctacctgttacgcaattttttatctcaaaatgccgaacgagaaaactgtccattttctgagacccccagaaaggaaactgaccctcagcagctgcctgattgttacgcgaatctagctttaacggaagcaaattcattattttttaaatgcagtggacttttcaaaaagtttaaattaggcaaagcagctttagcctcatagaatattatttctttggactcaagctgaaatacaagccttacattgccttatgctttatttctttctaatttttatatgtatatagatgagggttccttaatggttgtgagcattgtgtggaattttacacctggcctgcgtggcagcctcttccagttgaggtgttttatgtcacgcacactccatcccagtgtacaaaacctgcttctcttctcaaccgtggcagctcccgctggctcctatgccctgccctaaagggctcttgagcctctgggaatgggaggggccaagagaaggaaaaccctgtctttagcaccctttaaaagaactgtgccccccttctcagtgctgcctttgcatgggcctggcccggctcgcattcgtcagtgactccaaccctcctgcttgctgtacttgggatgaaacgaccccacaggtcaggtggagggtggggcgtgggcatcagccaggattgccgttacagtctttttctcaggagctacaaagatctcttcctgttactaaatggtcgcaccccagcagcctctctcgcacaccggggccctgcatgtcagatggcgtggtctgcagggggagctctgtgccttagtggctcttggcaggacactgagggcctgcctgtggtgtgcccggctctgccactcccgggaggggaagggctgctcagctcaaggtgtcctgttcggtagagcaagtgtcctctgacagccgtgtccccggacagttcagacacccttggggatggcactccacacacgacagagatgcaggggccagggaagcccagcgctcggtgcccttcgtccagggttaaaatcggcctgtggggtgtggtgagaaggcaggttgtgcgggtgttgaccgatgtatcttttccttaaagttattataataatgggtaatttgtcaataaagcattcctttgggggaaa

SEQ ID NO: 313829 - DNA, 2372 bp, Homo sapiens
cgggcggaagtagccgtcgcatcgcggatcgcgaaacgccgcggagctgaggcagttccgctggctagtgtgtacgcggcgagcttctcccggcgccgcccgctcggctcccatagcgcccgcgacagcggtccggacgccgcccgaacatggactccgccggccaagatatcaacctgaattctcctaacaaaggtctgctgtctgactccatgacggatgttcctgtcgacacaggtgtggctgcccggactcctgctgttgagggtctgacagaggctgaggaggaggagctcagggctgagcttaccaaggtggaagaggaaattgtcactctgcgccaggtcctggcagccaaggagaggcactgtggagagctcaagaggaggctgggcctctccaccctgggggagctgaaacagaacctgtccaggagctggcatgacgtgcaggtctctagcgcctacaagaagactcaggaaactctttcacaggcaggacagaagacttcagctgccctgtccacagtgggctctgccatcagcaggaagcttggagacatgagggctcatccattttcacactcctttagcagctactccatccgccactcaataagtatgccagccatgaggaactctgcgaccttcaagtcgtttgaggaccgagttgggaccataaagtctaaggttgtgggtgacagagagaacggcagtgacaacctcccttcctcagcggggagtggtgacaagcccctgtcggatcccgcacctttctaagcctgtggttgcttcacccgctgcagagcacacgcaacccagcctcagcatcacagccgcagctctgttcagcggagcagccagccagggcggatgagcagagccggccctgaggacagtcctgcccatccacgcggagatgtggctgccgcgtttgcatgaatttgaagaacacaggcttgtacacagatgttttacactcacgtttgtagatgaaacagatcactgtgctgtccttcctaggggtgcaggaagtggacagggcggagggtttgaaagaatattgagccaaagcccaggctccctttgggaatcatgttagcccatcagaatgttgaaggattgaagagttctaagcataaaataagtggcattttctgacttcttcctcctcctccttccctgactcacagaaggaatgcaatcacccagcaagtcctacctgttacgcaattttttatctcaaaatgccgaacgagaaaactgtccattttctgagacccccagaaaggaaactgaccctcagcagctgcctgattgttacgcgaatctagctttaacggaagcaaattcattattttttaaatgcagtggacttttcaaaaagtttaaattaggcaaagcagctttagcctcatagaatattatttctttggactcaagctgaaatacaagccttacattgccttatgctttatttctttctaatttttatatgtatatagatgagggttccttaatggttgtgagcattgtgtggaattttacacctggcctgcgtggcagcctcttccagttgaggtgttttatgtcacgcacactccatcccagtgtacaaaacctgcttctcttctcaaccgtggcagctcccgctggctcctatgccctgccctaaagggctcttgagcctctgggaatgggaggggccaagagaaggaaaaccctgtctttagcaccctttaaaagaactgtgccccccttctcagtgctgcctttgcatgggcctggcccggctcgcattcgtcagtgactccaaccctcctgcttgctgtacttgggatgaaacgaccccacaggtcaggtggagggtggggcgtgggcatcagccaggattgccgttacagtctttttctcaggagctacaaagatctcttcctgttactaaatggtcgcaccccagcagcctctctcgcacaccggggccctgcatgtcagatggcgtggtctgcagggggagctctgtgccttagtggctcttggcaggacactgagggcctgcctgtggtgtgcccggctctgccactcccgggaggggaagggctgctcagctcaaggtgtcctgttcggtagagcaagtgtcctctgacagccgtgtccccggacagttcagacacccttggggatggcactccacacacgacagagatgcaggggccagggaagcccagcgctcggtgcccttcgtccagggttaaaatcggcctgtggggtgtggtgagaaggcaggttgtgcgggtgttgaccgatgtatcttttccttaaagttattataataatgggtaatttgtcaataaagcattcctttgggggaaa

SEQ ID NO: 313830 - DNA, 2432 bp, Homo sapiens
cgggcggaagtagccgtcgcatcgcggatcgcgaaacgccgcggagctgaggcagttccgctggctagtgtgtacgcggcgagcttctcccggcgccgcccgctcggctcccatagcgcccgcgacagcggtccggacgccgcccgaacatggactccgccggccaagatatcaacctgaattctcctaacaaaggtctgctgtctgactccatgacggatgttcctgtcgacacaggtgtggctgcccggactcctgctgttgagggtctgacagaggctgaggaggaggagctcagggctgagcttaccaaggtggaagaggaaattgtcactctgcgccaggtcctggcagccaaggagaggcactgtggagagctcaagaggaggctgggcctctccaccctgggggagctgaaacagaacctgtccaggagctggcatgacgtgcaggtctctagcgcctatgtgaaaacttctgagaaacttggagagtggaatgagaaagtgacccagtcagacctctacaagaagactcaggaaactctttcacaggcaggacagaagacttcagctgccctgtccacagtgggctctgccatcagcaggaagcttggagacatgagggctcatccattttcacactcctttagcagctactccatccgccactcaataagtatgccagccatgaggaactctgcgaccttcaagtcgtttgaggaccgagttgggaccataaagtctaaggttgtgggtgacagagagaacggcagtgacaacctcccttcctcagcggggagtggtgacaagcccctgtcggatcccgcacctttctaagcctgtggttgcttcacccgctgcagagcacacgcaacccagcctcagcatcacagccgcagctctgttcagcggagcagccagccagggcggatgagcagagccggccctgaggacagtcctgcccatccacgcggagatgtggctgccgcgtttgcatgaatttgaagaacacaggcttgtacacagatgttttacactcacgtttgtagatgaaacagatcactgtgctgtccttcctaggggtgcaggaagtggacagggcggagggtttgaaagaatattgagccaaagcccaggctccctttgggaatcatgttagcccatcagaatgttgaaggattgaagagttctaagcataaaataagtggcattttctgacttcttcctcctcctccttccctgactcacagaaggaatgcaatcacccagcaagtcctacctgttacgcaattttttatctcaaaatgccgaacgagaaaactgtccattttctgagacccccagaaaggaaactgaccctcagcagctgcctgattgttacgcgaatctagctttaacggaagcaaattcattattttttaaatgcagtggacttttcaaaaagtttaaattaggcaaagcagctttagcctcatagaatattatttctttggactcaagctgaaatacaagccttacattgccttatgctttatttctttctaatttttatatgtatatagatgagggttccttaatggttgtgagcattgtgtggaattttacacctggcctgcgtggcagcctcttccagttgaggtgttttatgtcacgcacactccatcccagtgtacaaaacctgcttctcttctcaaccgtggcagctcccgctggctcctatgccctgccctaaagggctcttgagcctctgggaatgggaggggccaagagaaggaaaaccctgtctttagcaccctttaaaagaactgtgccccccttctcagtgctgcctttgcatgggcctggcccggctcgcattcgtcagtgactccaaccctcctgcttgctgtacttgggatgaaacgaccccacaggtcaggtggagggtggggcgtgggcatcagccaggattgccgttacagtctttttctcaggagctacaaagatctcttcctgttactaaatggtcgcaccccagcagcctctctcgcacaccggggccctgcatgtcagatggcgtggtctgcagggggagctctgtgccttagtggctcttggcaggacactgagggcctgcctgtggtgtgcccggctctgccactcccgggaggggaagggctgctcagctcaaggtgtcctgttcggtagagcaagtgtcctctgacagccgtgtccccggacagttcagacacccttggggatggcactccacacacgacagagatgcaggggccagggaagcccagcgctcggtgcccttcgtccagggttaaaatcggcctgtggggtgtggtgagaaggcaggttgtgcgggtgttgaccgatgtatcttttccttaaagttattataataatgggtaatttgtcaataaagcattcctttgggggaaa

SEQ ID NO: 313831 - DNA, 2842 bp, Homo sapiens
  misc_feature (2369)..(2370): n is a, c, g, or t
  misc_feature (2372)..(2372): n is a, c, g, or t
cgggcggaagtagccgtcgcatcgcggatcgcgaaacgccgcggagctgaggcagttccgctggctagtgtgtacgcggcgagcttctcccggcgccgcccgctcggctcccatagcgcccgcgacagcggtccggacgccgcccgaacatggactccgccggccaagatatcaacctgaattctcctaacaaaggtctgctgtctgactccatgacggatgttcctgtcgacacaggtgtggctgcccggactcctgctgttgagggtctgacagaggctgaggaggaggagctcagggctgagcttaccaaggtggaagaggaaattgtcactctgcgccaggtcctggcagccaaggagaggcactgtggagagctcaagaggaggctgggcctctccaccctgggggagctgaaacagaacctgtccaggagctggcatgacgtgcaggtctctagcgcctatgtgaaaacttctgagaaacttggagagtggaatgagaaagtgacccagtcagacctctacaagaagactcaggaaactctttcacaggcaggacagaagacttcagctgccctgtccacagtgggctctgccatcagcaggaagcttggagacatgaggaactctgcgaccttcaagtcgtttgaggaccgagttgggaccataaagtctaaggttgtgggtgacagagagaacggcagtgacaacctcccttcctcagcggggagtggtgacaagcccctgtcggatcccgcacctttctaagcctgtggttgcttcacccgctgcagagcacacgcaacccagcctcagcatcacagccgcagctctgttcagcggagcagccagccagggcggatgagcagagccggccctgaggacagtcctgcccatccacgcggagatgtggctgccgcgtttgcatgaatttgaagaacacaggcttgtacacagatgttttacactcacgtttgtagatgaaacagatcactgtgctgtccttcctaggggtgcaggaagtggacagggcggagggtttgaaagaatattgagccaaagcccaggctccctttgggaatcatgttagcccatcagaatgttgaaggattgaagagttctaagcataaaataagtggcattttctgacttcttcctcctcctccttccctgactcacagaaggaatgcaatcacccagcaagtcctacctgttacgcaattttttatctcaaaatgccgaacgagaaaactgtccattttctgagacccccagaaaggaaactgaccctcagcagctgcctgattgttacgcgaatctagctttaacggaagcaaattcattattttttaaatgcagtggacttttcaaaaagtttaaattaggcaaagcagctttagcctcatagaatattatttctttggactcaagctgaaatacaagccttacattgccttatgctttatttctttctaatttttatatgtatatagatgagggttccttaatggttgtgagcattgtgtggaattttacacctggcctgcgtggcagcctcttccagttgaggtgttttatgtcacgcacactccatcccagtgtacaaaacctgcttctcttctcaaccgtggcagctcccgctggctcctatgccctgccctaaagggctcttgagcctctgggaatgggaggggccaagagaaggaaaaccctgtctttagcaccctttaaaagaactgtgccccccttctcagtgctgcctttgcatgggcctggcccggctcgcattcgtcagtgactccaaccctcctgcttgctgtacttgggatgaaacgaccccacaggtcaggtggagggtggggcgtgggcatcagccaggattgccgttacagtctttttctcaggagctacaaagatctcttcctgttactaaatggtcgcaccccagcagcctctctcgcacaccggggccctgcatgtcagatggcgtggtctgcagggggagctctgtgccttagtggctcttggcaggacactgagggcctgcctgtggtgtgcccggctctgccactcccgggaggggaagggctgctcagctcaaggtgtcctgttcggtagagcaagtgtcctctgacagccgtgtccccggacagttcagacacccttggggatggcactccacacacgacagagatgcaggggccagggaagcccagcgctcggtgcccttcgtccagggttaaaatcggcctgtggggtgtggtgagaaggcaggttgtgcgggtgttgaccgatgtatcttttccttaaagttattataataatgggtaatttgtcaataaagcattcctttgggggaaaaaaaannanaaaaaaaaaaaaaaaaaaaaaaaaaaaaaaagtcaagaagaaaaagaaaggggcggggcggcgcgggcaacgaagaattaccctccgggggagggcccgccacataattatggcgccccccagtgtttggttgggtagcacagcggggcgcccatattaaggcggcgcggtattatatgaagagcgagacagagcggggggggcgcgctcagtttaaaaaccaacggggacggttggtgcgggggaaacaaattgggctatccgcggggagttcttgtgggggaagggagagacccccactcctgcgggggggggggagactattgggggccaaacatcactccagagagatattagaacacctgcaggggggaaacattcaacattggaggcttgttgagggtgtcacacccacatctattggctggggcgcgagaaaattttgctcagaagattatttgaaactttag

SEQ ID NO: 313832 - DNA, 2610 bp, Homo sapiens
cgggcggaagtagccgtcgcatcgcggatcgcgaaacgccgcggagctgaggcagttccgctggctagtgtgtacgcggcgagcttctcccggcgccgcccgctcggctcccatagcgcccgcgacagcggtccggacgccgcccgaacatggactccgccggccaagatatcaacctgaattctcctaacaaaggtctgctgtctgactccatgacggatgttcctgtcgacacaggtgtggctgcccggactcctgctgttgagggtctgacagaggctgaggaggaggagctcagggctgagcttaccaaggtggaagaggaaattgtcactctgcgccaggtcctggcagccaaggagaggcactgtggagagctcaagaggaggctgggcctctccaccctgggggagctgaaacagaacctgtccaggagctggcatgacgtgcaggtctctagcgcctatgtgaaaacttctgagaaacttggagagtggaatgagaaagtgacccagtcagacctctacaagaagactcaggaaactctttcacaggcaggacagaagacttcagctgccctgtccacagtgggctctgccatcagcaggaagcttggagacatgaggaactctgcgaccttcaagtcgtttgaggaccgagttgggaccataaagtctaaggttgtgggtgacagagagaacggcagtgacaacctcccttcctcagcggggagtggtgacaagcccctgtcggatcccgcacctttctaagcctgtggttgcttcacccgctgcagagcacacgcaacccagcctcagcatcacagccgcagctctgttcagcggagcagccagccagggcggatgagcagagccggccctgaggacagtcctgcccatccacgcggagatgtggctgccgcgtttgcatgaatttgaagaacacaggcttgtacacagatgttttacactcacgtttgtagatgaaacagatcactgtgctgtccttcctaggggtgcaggaagtggacagggcggagggtttgaaagaatattgagccaaagcccaggctccctttgggaatcatgttagcccatcagaatgttgaaggattgaagagttctaagcataaaataagtggcattttctgacttcttcctcctcctccttccctgactcacagaaggaatgcaatcacccagcaagtcctacctgttacgcaattttttatctcaaaatgccgaacgagaaaactgtccattttctgagacccccagaaaggaaactgaccctcagcagctgcctgattgttacgcgaatctagctttaacggaagcaaattcattattttttaaatgcagtggacttttcaaaaagtttaaattaggcaaagcagctttagcctcatagaatattatttctttggactcaagctgaaatacaagccttacattgccttatgctttatttctttctaatttttatatgtatatagatgagggttccttaatggttgtgagcattgtgtggaattttacacctggcctgcgtggcagcctcttccagttgaggtgttttatgtcacgcacactccatcccagtgtacaaaacctgcttctcttctcaaccgtggcagctcccgctggctcctatgccctgccctaaagggctcttgagcctctgggaatgggaggggccaagagaaggaaaaccctgtctttagcaccctttaaaagaactgtgccccccttctcagtgctgcctttgcatgggcctggcccggctcgcattcgtcagtgactccaaccctcctgcttgctgtacttgggatgaaacgaccccacaggtcaggtggagggtggggcgtgggcatcagccaggattgccgttacagtctttttctcaggagctacaaagatctcttcctgttactaaatggtcgcaccccagcagcctctctcgcacaccggggccctgcatgtcagatggcgtggtctgcagggggagctctgtgccttagtggctcttggcaggacactgagggcctgcctgtggtgtgcccggctctgccactcccgggaggggaagggctgctcagctcaaggtgtcctgttcggtagagcaagtgtcctctgacagccgtgtccccggacagttcagacacccttggggatggcactccacacacgacagagatgcaggggccagggaagcccagcgctcggtgcccttcgtccagggttaaaatcggcctgtggggtgtggtgagaaggcaggttgtgcgggtgttgaccgatgtatcttttccttaaagttattataataatgggtaatttgtcaataaagcattcctttgggggaaaaaaaaaacaagaaacaaaaaaagaggagaccacaaaaaaaataccagaagagccaactagagaacacaagacaagagcgaaagaggacccctaacgaagaccgaaaaaagccaacaagcacgaaaataaaagcacaaggaaaagcgacaggaactcgaagaccaaaacgagggagaaaaggaaacacaaaagagagccaggaaaacaacgcaagggacaagaacaggacgacacacaagaaaaacgg

SEQ ID NO: 313833 - DNA, 2535 bp, Homo sapiens
gagccccctctcgatacttgcaggcaatgaatccgtttttctatagagcccttccatgtttaacgcaaggaaagctcctaggggtgtccctgtaggggatagcagagaggggccgacagccccccaactgcacagacttttcataacctcaatacgagagcccggggtatccctgtaggggacagcagagaggggccgacagccccccaactgcgcagacttttcataacctcagtacgagagcccaggtgtccctgtaggggatagcagagaggggccgacagccccccaactgcacagacttttcataacctcagtacgagagcccggggtatccctgtaggggacagcagagaggggccgacagccccccaactgcgcagacttttcataacctcagtacgagagcccggggtgtccctgtaggggacagcagagaggggccgacagccccccaactgcacagacttttcataacctcagtacgagagcccgggatgtccctgtagggtatgacagagaggggccgacatctccccagctgcacagtcaaggggtttccagttgccttgtgtgacgtctggacctgtaccctgtggttgttgggcatggccgacctcacttttgacctggggagtctccggaatgacctggctgtctcacagttttgccatgagatcttgggatgttgttagggaccctttggaggctggccctaaccctgaggcccttccgagttaggagagcagcacaaccctctcctcttgacaccgacactcttccctctctctttaaaggaactctgcgaccttcaagtcgtttgaggaccgagttgggaccataaagtctaaggttgtgggtgacagagagaacggcagtgacaacctcccttcctcagcggggagtggtgacaagcccctgtcggatcccgcacctttctaagcctgtggttgcttcacccgctgcagagcacacgcaacccagcctcagcatcacagccgcagctctgttcagcggagcagccagccagggcggatgagcagagccggccctgaggacagtcctgcccatccacgcggagatgtggctgccgcgtttgcatgaatttgaagaacacaggcttgtacacagatgttttacactcacgtttgtagatgaaacagatcactgtgctgtccttcctaggggtgcaggaagtggacagggcggagggtttgaaagaatattgagccaaagcccaggctccctttgggaatcatgttagcccatcagaatgttgaaggattgaagagttctaagcataaaataagtggcattttctgacttcttcctcctcctccttccctgactcacagaaggaatgcaatcacccagcaagtcctacctgttacgcaattttttatctcaaaatgccgaacgagaaaactgtccattttctgagacccccagaaaggaaactgaccctcagcagctgcctgattgttacgcgaatctagctttaacggaagcaaattcattattttttaaatgcagtggacttttcaaaaagtttaaattaggcaaagcagctttagcctcatagaatattatttctttggactcaagctgaaatacaagccttacattgccttatgctttatttctttctaatttttatatgtatatagatgagggttccttaatggttgtgagcattgtgtggaattttacacctggcctgcgtggcagcctcttccagttgaggtgttttatgtcacgcacactccatcccagtgtacaaaacctgcttctcttctcaaccgtggcagctcccgctggctcctatgccctgccctaaagggctcttgagcctctgggaatgggaggggccaagagaaggaaaaccctgtctttagcaccctttaaaagaactgtgccccccttctcagtgctgcctttgcatgggcctggcccggctcgcattcgtcagtgactccaaccctcctgcttgctgtacttgggatgaaacgaccccacaggtcaggtggagggtggggcgtgggcatcagccaggattgccgttacagtctttttctcaggagctacaaagatctcttcctgttactaaatggtcgcaccccagcagcctctctcgcacaccggggccctgcatgtcagatggcgtggtctgcagggggagctctgtgccttagtggctcttggcaggacactgagggcctgcctgtggtgtgcccggctctgccactcccgggaggggaagggctgctcagctcaaggtgtcctgttcggtagagcaagtgtcctctgacagccgtgtccccggacagttcagacacccttggggatggcactccacacacgacagagatgcaggggccagggaagcccagcgctcggtgcccttcgtccagggttaaaatcggcctgtggggtgtggtgagaaggcaggttgtgcgggtgttgaccgatgtatcttttccttaaagttattataataatgggtaatttgtcaataaagcattcctttgggggaaa

SEQ ID NO: 313834 - DNA, 2264 bp, Homo sapiens
cgggcggaagtagccgtcgcatcgcggatcgcgaaacgccgcggagctgaggcagttccgctggctagtgtgtacgcggcgagcttctcccggcgccgcccgctcggctcccatagcgcccgcgacagcggtccggacgccgcccgaacatggactccgccggccaagatatcaacctgaattctcctaacaaaggtctgctgtctgactccatgacggatgttcctgtcgacacaggtgtggctgcccggactcctgctgttgagggtctgacagaggctgaggaggaggagctcagggctgagcttaccaaggtggaagaggaaattgtcactctgcgccaggtcctggcagccaaggagaggcactgtggagagctcaagaggaggctgggcctctccaccctgggggagctgaaacagaacctgtccaggagctggcatgacgtgcaggtctctagcgcctatgtgaaaacttctgagaaacttggagagtggaatgagaaagtgacccagtcagacctctacaagaagactcaggaaactctttcacaggcaggacagaagacttcagctgccctgtccacagtgggctctgccatcagcaggaagcttggagacatgaggaactctgcgaccttcaagtcgtttgaggaccgagttgggaccataaagtctaaggttgtgggtgacagagagaacggcagtgacaacctcccttcctcagcggggagtggtgacaagcccctgtcggatcccgcacctttctaagcctgtggttgcttcacccgctgcagagcacacgcaacccagcctcagcatcacagccgcagctctgttcagcggagcagccagccagggcggatgagcagagccggccctgaggacagtcctgcccatccacgcggagatgtggctgccgcgtttgcatgaatttgaagaacacaggcttgtacacagatgttttacactcacgtttgtagatgaaacagatcactgtgctgtccttcctaggggtgcaggaagtggacagggcggagggtttgaaagaatattgagccaaagcccaggctccctttgggaatcatgttagcccatcagaatgttgaaggattgaagagttctaagcataaaataagtggcattttctgacttcttcctcctcctccttccctgactcacagaaggaatgcaatcacccagcaagtcctacctgttacgcaattttttatctcaaaatgccgaacgagaaaactgtccattttctgagacccccagaaaggaaactgaccctcagcagctgcctgattgttacgcgaatctagctttaacggaagcaaattcattattttttaaatgcagtggacttttcaaaaagtttaaattaggcaaagcagctttagcctcatagaatattatttctttggactcaagctgaaatacaagccttacattgccttatgctttatttctttctaatttttatatgtatatagatgagggttccttaatggttgtgagcattgtgtggaattttacacctggcctgcgtggcagcctcttccagttgaggtgttttatgtcacgcacactccatcccagtgtacaaaacctgcttctcttctcaaccgtggcagctcccgctggctcctatgccctgccctaaagggctcttgagcctctgggaatgggaggggccaagagaaggaaaaccctgtctttagcaccctttaaaagaactgtgccccccttctcagtgctgcctttgcatgggcctggcccggctcgcattcgtcagtgactccaaccctcctgcttgctgtacttgggatgaaacgaccccacaggtcaggtggagggtggggcgtgggcatcagccaggattgccgttacagtctttttctcaggactctgtgccttagtggctcttggcaggacactgagggcctgcctgtggtgtgcccggctctgccactcccgggaggggaagggctgctcagctcaaggtgtcctgttcggtagagcaagtgtcctctgacagccgtgtccccggacagttcagacacccttggggatggcactccacacacgacagagatgcaggggccagggaagcccagcgctcggtgcccttcgtccagggttaaaatcggcctgtggggtgtggtgagaaggcaggttgtgcgggtgttgaccgatgtatcttttccttaaagttattataataatgggtaatttgtcaataaagcattcctttgggggaaa

SEQ ID NO: 313835 - DNA, 1635 bp, Homo sapiens
cgggcggaagtagccgtcgcatcgcggatcgcgaaacgccgcggagctgaggcagttccgctggctagtgtgtacgcggcgagcttctcccggcgccgcccgctcggctcccatagcgcccgcgacagcggtccggacgccgcccgaacatggactccgccggccaagatatcaacctgaattctcctaacaaaggtctgctgtctgactccatgacggatgttcctgtcgacacaggtgtggctgcccggactcctgctgttgagggtctgacagaggctgaggaggaggagctcagggctgagcttaccaaggtggaagaggaaattgtcactctgcgccaggtcctggcagccaaggagaggcactgtggagagctcaagaggaggctgggcctctccaccctgggggagctgaaacagaacctgtccaggagctggcatgacgtgcaggtctctagcgcctatgtgaaaacttctgagaaacttggagagtggaatgagaaagtgacccagtcagacctctacaagaagactcaggaaactctttcacaggcaggacagaagacttcagctgccctgtccacagtgggctctgccatcagcaggaagcttggagacatgaggaactctgcgaccttcaagtcgtttgaggaccgagttgggaccataaagtctaaggttgtgggtgacagagagaacggcagtgacaacctcccttcctcagcggggagtggtgacaagcccctgtcggatcccgcacctttctaagcctgtggttgcttcacccgctgcagagcacacgcaacccagcctcagcatcacagccgcagctctgttcagcggagcagccagccagggcggatgagcagagccggccctgaggacagtcctgcccatccacgcggagatgtggctgccgcgtttgcatgaatttgaagaacacaggcttgtacacagatgttttacactcacgtttgtagatgaaacagatcactgtgctgtccttcctaggggtgcaggaagtggacagggcggagggtttgaaagaatattgagccaaagcccaggctccctttgggaatcatgttagcccatcagaatgttgaaggattgaagagttctaagcataaaataagtggcattttctgacttcttcctcctcctccttccctgactcacagaaggaatgcaatcacccagcaagtcctacctgttacgcaattttttatctcaaaatgccgaacgagaaaactgtccattttctgagacccccagaaaggaaactgaccctcagcagctgcctgattgttacgcgaatctagctttaacggaagcaaattcattattttttaaatgcagtggacttttcaaaaagtttaaattaggcaaagcagctttagcctcatagaatattatttctttggactcaagctgaaatacaagccttacattgccttatgctttatttctttctaatttttatatgtatatagatgagggttcttgggcagacgataccgctgtccattttctgagtacccccagaaaggaaaaatgagcctcaagcaagctgcctgattgtttacgcgaaattctaagcttttaaaccggaaagccaaaatttgccatttta

SEQ ID NO: 313836 - DNA, 815 bp, Homo sapiens
ttcgtgccgattcggcacgagaagagaaggaaaaccctgtctttagcaccctttaaaagaactgtgccccccttctcaaccgtggcagctcccgctggctcctatgccctgccctaaagggctcttgagcctctgggaatgggaggggccaagagaaggaaaaccctgtctttagcaccctttaaaagaactgtgccccccttctcagtgctgcctttgcatgggcctggcccggctcgcattcgtcagtgactccaaccctcctgcttgctgtacttgggatgaaacgaccccacaggtcaggtggagggtggggcgtgggcatcagccaggattgccgttacagtctttttctcaggagctacaaagatctcttcctgttactaaatggtcgcaccccagcagcctctctcgcacaccggggccctgcatgtcagatggcgtggtctgcagggggagctctgtgccttagtggctcttggcaggacactgagggcctgcctgtggtgtgcccggctctgccactcccgggaggggaagggctgctcagctcaaggtgtcctgttcggtagagcaagtgtcctctgacagccgtgtccccggacagttcagacacccttggggatggcactccacacacgacagagatgcaggggccagggaagcccagcgctcggtgcccttcgtccagggttaaaatcggcctgtggggtgtggtgagaaggcaggttgtgcgggtgttgaccgatgtatcttttccttaaagttattataataatgggtaatttgtcaataaagcattcctttgggggaaa

SEQ ID NO: 313837 - DNA, 711 bp, Homo sapiens
cgggcggaagtagccgtcgcatcgcggatcgcgaaacgccgcggagctgaggcagttccgctggctagtgtgtacgcggcgagcttctcccggcgccgcccgctcggctcccatagcgcccgcgacagcggtccggacgccgcccgaacatggactccgccggccaagatatcaacctgaattctcctaacaaaggtctgctgtctgactccatgacggatgttcctgtcgacacaggtgtggctgcccggactcctgctgttgagggtctgacagaggctgaggaggaggagctcagggctgagcttaccaaggtggaagaggaaattgtcactctgcgccaggtcctggcagccaaggagaggcactgtggagagctcaagaggaggctgggcctctccaccctgggggagctgaaacagaacctgtccaggagctggcatgacgtgcaggtctctagcgcctatgtgaaaacttctgagaaacttggagagtggaatgagaaagtgacccagtcagacctctacaagaagactcaggaaactctttcacaggcaggacagaagacttcagctgccctgtccacagtgggctctgccatcagcaggaagcttggagacatgaggaactctgcgaccttcaagtcgtttgaggaccgagttgggaccataaaggtaattgtacctggactgtttgatggtcttggcaagg

SEQ ID NO: 313838 - DNA, 315 bp, Homo sapiens
agctggtccctctctgtcttccctggaacttcacctgcagtttgatgcctgagttaaaattgttcttctaaataattcactgtagactttctgtttttagctatgtgaaaacttctgagaaacttggagagtggaatgagaaagtgacccagtcagacctgtgagtgcctgtatcatcagcacctcctccttcctcctctccgcctcctgacactcagtcggggaagggggctgtgcacacttggcacaaagcttgttttggtatttgctggctattttttcttcctataacttttcttctctcaggtaaactat

SEQ ID NO: 313839 - DNA, 2363 bp, Homo sapiens
cgggcggaagtagccgtcgcatcgcggatcgcgaaacgccgcggagctgaggcagttccgctggctagtgtgtacgcggcgagcttctcccggcgccgcccgctcggctcccatagcgcccgcgacagcggtccggacgccgcccgaacatggactccgccggccaagatatcaacctgaattctcctaacaaaggtctgctgtctgactccatgacggatgttcctgtcgacacaggtgtggctgcccggactcctgctgttgagggtctgacagaggctgaggaggaggagctcagggctgagcttaccaaggtggaagaggaaattgtcactctgcgccaggtcctggcagccaaggagaggcactgtggagagctcaagaggaggctgggcctctccaccctgggggagctgaaacagaacctgtccaggagctggcatgacgtgcaggtctctagcgcctatgtgaaaacttctgagaaacttggagagtggaatgagaaagtgacccagtcagacctctacaagaagactcaggaaactctttcacaggcaggacagaagacttcagctgccctgtccacagtgggctctgccatcagcaggaagcttggagacatgaggaactctgcgaccttcaagtcgtttgaggaccgagttgggaccataaagtctaaggttgtgggtgacagagagaacggcagtgacaacctcccttcctcagcggggagtggtgacaagcccctgtcggatcccgcacctttctaagcctgtggttgcttcacccgctgcagagcacacgcaacccagcctcagcatcacagccgcagctctgttcagcggagcagccagccagggcggatgagcagagccggccctgaggacagtcctgcccatccacgcggagatgtggctgccgcgtttgcatgaatttgaagaacacaggcttgtacacagatgttttacactcacgtttgtagatgaaacagatcactgtgctgtccttcctaggggtgcaggaagtggacagggcggagggtttgaaagaatattgagccaaagcccaggctccctttgggaatcatgttagcccatcagaatgttgaaggattgaagagttctaagcataaaataagtggcattttctgacttcttcctcctcctccttccctgactcacagaaggaatgcaatcacccagcaagtcctacctgttacgcaattttttatctcaaaatgccgaacgagaaaactgtccattttctgagacccccagaaaggaaactgaccctcagcagctgcctgattgttacgcgaatctagctttaacggaagcaaattcattattttttaaatgcagtggacttttcaaaaagtttaaattaggcaaagcagctttagcctcatagaatattatttctttggactcaagctgaaatacaagccttacattgccttatgctttatttctttctaatttttatatgtatatagatgagggttccttaatggttgtgagcattgtgtggaattttacacctggcctgcgtggcagcctcttccagttgaggtgttttatgtcacgcacactccatcccagtgtacaaaacctgcttctcttctcaaccgtggcagctcccgctggctcctatgccctgccctaaagggctcttgagcctctgggaatgggaggggccaagagaaggaaaaccctgtctttagcaccctttaaaagaactgtgccccccttctcagtgctgcctttgcatgggcctggcccggctcgcattcgtcagtgactccaaccctcctgcttgctgtacttgggatgaaacgaccccacaggtcaggtggagggtggggcgtgggcatcagccaggattgccgttacagtctttttctcaggagctacaaagatctcttcctgttactaaatggtcgcaccccagcagcctctctcgcacaccggggccctgcatgtcagatggcgtggtctgcagggggagctctgtgccttagtggctcttggcaggacactgagggcctgcctgtggtgtgcccggctctgccactcccgggaggggaagggctgctcagctcaaggtgtcctgttcggtagagcaagtgtcctctgacagccgtgtccccggacagttcagacacccttggggatggcactccacacacgacagagatgcaggggccagggaagcccagcgctcggtgcccttcgtccagggttaaaatcggcctgtggggtgtggtgagaaggcaggttgtgcgggtgttgaccgatgtatcttttccttaaagttattataataatgggtaatttgtcaataaagcattcctttgggggaaa

SEQ ID NO: 313840 - DNA, 2303 bp, Homo sapiens
cgggcggaagtagccgtcgcatcgcggatcgcgaaacgccgcggagctgaggcagttccgctggctagtgtgtacgcggcgagcttctcccggcgccgcccgctcggctcccatagcgcccgcgacagcggtccggacgccgcccgaacatggactccgccggccaagatatcaacctgaattctcctaacaaaggtctgctgtctgactccatgacggatgttcctgtcgacacaggtgtggctgcccggactcctgctgttgagggtctgacagaggctgaggaggaggagctcagggctgagcttaccaaggtggaagaggaaattgtcactctgcgccaggtcctggcagccaaggagaggcactgtggagagctcaagaggaggctgggcctctccaccctgggggagctgaaacagaacctgtccaggagctggcatgacgtgcaggtctctagcgcctacaagaagactcaggaaactctttcacaggcaggacagaagacttcagctgccctgtccacagtgggctctgccatcagcaggaagcttggagacatgaggaactctgcgaccttcaagtcgtttgaggaccgagttgggaccataaagtctaaggttgtgggtgacagagagaacggcagtgacaacctcccttcctcagcggggagtggtgacaagcccctgtcggatcccgcacctttctaagcctgtggttgcttcacccgctgcagagcacacgcaacccagcctcagcatcacagccgcagctctgttcagcggagcagccagccagggcggatgagcagagccggccctgaggacagtcctgcccatccacgcggagatgtggctgccgcgtttgcatgaatttgaagaacacaggcttgtacacagatgttttacactcacgtttgtagatgaaacagatcactgtgctgtccttcctaggggtgcaggaagtggacagggcggagggtttgaaagaatattgagccaaagcccaggctccctttgggaatcatgttagcccatcagaatgttgaaggattgaagagttctaagcataaaataagtggcattttctgacttcttcctcctcctccttccctgactcacagaaggaatgcaatcacccagcaagtcctacctgttacgcaattttttatctcaaaatgccgaacgagaaaactgtccattttctgagacccccagaaaggaaactgaccctcagcagctgcctgattgttacgcgaatctagctttaacggaagcaaattcattattttttaaatgcagtggacttttcaaaaagtttaaattaggcaaagcagctttagcctcatagaatattatttctttggactcaagctgaaatacaagccttacattgccttatgctttatttctttctaatttttatatgtatatagatgagggttccttaatggttgtgagcattgtgtggaattttacacctggcctgcgtggcagcctcttccagttgaggtgttttatgtcacgcacactccatcccagtgtacaaaacctgcttctcttctcaaccgtggcagctcccgctggctcctatgccctgccctaaagggctcttgagcctctgggaatgggaggggccaagagaaggaaaaccctgtctttagcaccctttaaaagaactgtgccccccttctcagtgctgcctttgcatgggcctggcccggctcgcattcgtcagtgactccaaccctcctgcttgctgtacttgggatgaaacgaccccacaggtcaggtggagggtggggcgtgggcatcagccaggattgccgttacagtctttttctcaggagctacaaagatctcttcctgttactaaatggtcgcaccccagcagcctctctcgcacaccggggccctgcatgtcagatggcgtggtctgcagggggagctctgtgccttagtggctcttggcaggacactgagggcctgcctgtggtgtgcccggctctgccactcccgggaggggaagggctgctcagctcaaggtgtcctgttcggtagagcaagtgtcctctgacagccgtgtccccggacagttcagacacccttggggatggcactccacacacgacagagatgcaggggccagggaagcccagcgctcggtgcccttcgtccagggttaaaatcggcctgtggggtgtggtgagaaggcaggttgtgcgggtgttgaccgatgtatcttttccttaaagttattataataatgggtaatttgtcaataaagcattcctttgggggaaa

SEQ ID NO: 313841 - DNA, 2606 bp, Homo sapiens
  misc_feature (2381)..(2382): n is a, c, g, or t
  misc_feature (2389)..(2389): n is a, c, g, or t
cgggcggaagtagccgtcgcatcgcggatcgcgaaacgccgcggagctgaggcagttccgctggctagtgtgtacgcggcgagcttctcccggcgccgcccgctcggctcccatagcgcccgcgacagcggtccggacgccgcccgaacatggactccgccggccaagatatcaacctgaattctcctaacaaaggtctgctgtctgactccatgacggatgttcctgtcgacacaggtgtggctgcccggactcctgctgttgagggtctgacagaggctgaggaggaggagctcagggctgagcttaccaaggtggaagaggaaattgtcactctgcgccaggtcctggcagccaaggagaggcactgtggagagctcaagaggaggctgggcctctccaccctgggggagctgaaacagaacctgtccaggagctggcatgacgtgcaggtctctagcgcctatgtgaaaacttctgagaaacttggagagtggaatgagaaagtgacccagtcagacctctacaagaagactcaggaaactctttcacaggcaggacagaagacttcagctgccctgtccacagtgggctctgccatcagcaggaagcttggagacatgaggaactctgcgaccttcaagtcgtttgaggaccgagttgggaccataaagtctaaggttgtgggtgacagagagaacggcagtgacaacctcccttcctcagcggggagtggtgacaagcccctgtcggatcccgcacctttctaagcctgtggttgcttcacccgctgcagagcacacgcaacccagcctcagcatcacagccgcagctctgttcagcggagcagccagccagggcggatgagcagagccggccctgaggacagtcctgcccatccacgcggagatgtggctgccgcgtttgcatgaatttgaagaacacaggcttgtacacagatgttttacactcacgtttgtagatgaaacagatcactgtgctgtccttcctaggggtgcaggaagtggacagggcggagggtttgaaagaatattgagccaaagcccaggctccctttgggaatcatgttagcccatcagaatgttgaaggattgaagagttctaagcataaaataagtggcattttctgacttcttcctcctcctccttccctgactcacagaaggaatgcaatcacccagcaagtcctacctgttacgcaattttttatctcaaaatgccgaacgagaaaactgtccattttctgagacccccagaaaggaaactgaccctcagcagctgcctgattgttacgcgaatctagctttaacggaagcaaattcattattttttaaatgcagtggacttttcaaaaagtttaaattaggcaaagcagctttagcctcatagaatattatttctttggactcaagctgaaatacaagccttacattgccttatgctttatttctttctaatttttatatgtatatagatgagggttccttaatggttgtgagcattgtgtggaattttacacctggcctgcgtggcagcctcttccagttgaggtgttttatgtcacgcacactccatcccagtgtacaaaacctgcttctcttctcaaccgtggcagctcccgctggctcctatgccctgccctaaagggctcttgagcctctgggaatgggaggggccaagagaaggaaaaccctgtctttagcaccctttaaaagaactgtgccccccttctcagtgctgcctttgcatgggcctggcccggctcgcattcgtcagtgactccaaccctcctgcttgctgtacttgggatgaaacgaccccacaggtcaggtggagggtggggcgtgggcatcagccaggattgccgttacagtctttttctcaggagctacaaagatctcttcctgttactaaatggtcgcaccccagcagcctctctcgcacaccggggccctgcatgtcagatggcgtggtctgcagggggagctctgtgccttagtggctcttggcaggacactgagggcctgcctgtggtgtgcccggctctgccactcccgggaggggaagggctgctcagctcaaggtgtcctgttcggtagagcaagtgtcctctgacagccgtgtccccggacagttcagacacccttggggatggcactccacacacgacagagatgcaggggccagggaagcccagcgctcggtgcccttcgtccagggttaaaatcggcctgtggggtgtggtgagaaggcaggttgtgcgggtgttgaccgatgtatcttttccttaaagttattataataatgggtaatttgtcaataaagcattcctttgggggaaacaacaaaacaacacaaanncaacaanaaaaacaaaaaacgcgcgcctttgcgggggcgaacaacgtactaacgccaggccatagtgtccagcccctttttaacgggaaccgcgcccatgggaggaaacgaaccggcgttcagagcaacgaacgagagaaacagaaagagaccactaaaaggaaaacacaaccacacaaaatgaaaaaagcgaaccccccacgcaaaaaacacacgtatgcccc

SEQ ID NO: 313842 - DNA, 2811 bp, Homo sapiens
cgggcggaagtagccgtcgcatcgcggatcgcgaaacgccgcggagctgaggcagttccgctggctagtgtgtacgcggcgagcttctcccggcgccgcccgctcggctcccatagcgcccgcgacagcggtccggacgccgcccgaacatggactccgccggccaagatatcaacctgaattctcctaacaaaggtctgctgtctgactccatgacggatgttcctgtcgacacaggtgtggctgcccggactcctgctgttgagggtctgacagaggctgaggaggaggagctcagggctgagcttaccaaggtggaagaggaaattgtcactctgcgccaggtcctggcagccaaggagaggcactgtggagagctcaagaggaggctgggcctctccaccctgggggagctgaaacagaacctgtccaggagctggcatgacgtgcaggtctctagcgcctatgtgaaaacttctgagaaacttggagagtggaatgagaaagtgacccagtcagacctctacaagaagactcaggaaactctttcacaggcaggacagaagacttcagctgccctgtccacagtgggctctgccatcagcaggaagcttggagacatgaggaactctgcgaccttcaagtcgtttgaggaccgagttgggaccataaagtctaaggttgtgggtgacagagagaacggcagtgacaacctcccttcctcagcggggagtggtgacaagcccctgtcggatcccgcacctttctaagcctgtggttgcttcacccgctgcagagcacacgcaacccagcctcagcatcacagccgcagctctgttcagcggagcagccagccagggcggatgagcagagccggccctgaggacagtcctgcccatccacgcggagatgtggctgccgcgtttgcatgaatttgaagaacacaggcttgtacacagatgttttacactcacgtttgtagatgaaacagatcactgtgctgtccttcctaggggtgcaggaagtggacagggcggagggtttgaaagaatattgagccaaagcccaggctccctttgggaatcatgttagcccatcagaatgttgaaggattgaagagttctaagcataaaataagtggcattttctgacttcttcctcctcctccttccctgactcacagaaggaatgcaatcacccagcaagtcctacctgttacgcaattttttatctcaaaatgccgaacgagaaaactgtccattttctgagacccccagaaaggaaactgaccctcagcagctgcctgattgttacgcgaatctagctttaacggaagcaaattcattattttttaaatgcagtggacttttcaaaaagtttaaattaggcaaagcagctttagcctcatagaatattatttctttggactcaagctgaaatacaagccttacattgccttatgctttatttctttctaatttttatatgtatatagatgagggttccttaatggttgtgagcattgtgtggaattttacacctggcctgcgtggcagcctcttccagttgaggtgttttatgtcacgcacactccatcccagtgtacaaaacctgcttctcttctcaaccgtggcagctcccgctggctcctatgccctgccctaaagggctcttgagcctctgggaatgggaggggccaagagaaggaaaaccctgtctttagcaccctttaaaagaactgtgccccccttctcagtgctgcctttgcatgggcctggcccggctcgcattcgtcagtgactccaaccctcctgcttgctgtacttgggatgaaacgaccccacaggtcaggtggagggtggggcgtgggcatcagccaggattgccgttacagtctttttctcaggagctacaaagatctcttcctgttactaaatggtcgcaccccagcagcctctctcgcacaccggggccctgcatgtcagatggcgtggtctgcagggggagctctgtgccttagtggctcttggcaggacactgagggcctgcctgtggtgtgcccggctctgccactcccgggaggggaagggctgctcagctcaaggtgtcctgttcggtagagcaagtgtcctctgacagccgtgtccccggacagttcagacacccttggggatggcactccacacacgacagagatgcaggggccagggaagcccagcgctcggtgcccttcgtccagggttaaaatcggcctgtggggtgtggtgagaaggcaggttgtgcgggtgttgaccgatgtatcttttccttaaagttattataataatgggtaatttgtcaataaagcattcctttgggggaaaatacagcagagaaacacgggggcggtcggaattaaattggccaaagttcatgagtgaaagacatggtgttgcacggtccatttgtagcggcaaagggaaatcacacgaagcgatagtaagggccctctgggacagtggtccccccgcgggaaaaggcgcccagtggaacccgggcaaatgtgtggcagaccggaagaaaaccggcacaaccggtgggagaaacaggcgcgccggggtatccaagaacgggggaacaccgggccatccgcgactgatgcgtgacgtgggaacacacacgggggtggagcgaagagcaagcagccacacacaaggacgcggcacgcgagtaagcataagccgacgcaggcggcaccaccgagcaacattgcgtgagtgctgcgacagcgacagaaggaacaaccgcccgaatggtgagaggacgatcgcc

SEQ ID NO: 313843 - DNA, 2465 bp, Homo sapiens
cgggcggaagtagccgtcgcatcgcggatcgcgaaacgccgcggagctgaggcagttccgctggctagtgtgtacgcggcgagcttctcccggcgccgcccgctcggctcccatagcgcccgcgacagcggtccggacgccgcccgaacatggactccgccggccaagatatcaacctgaattctcctaacaaaggtctgctgtctgactccatgacggatgttcctgtcgacacaggtgtggctgcccggactcctgctgttgagggtctgacagaggctgaggaggaggagctcagggctgagcttaccaaggtggaagaggaaattgtcactctgcgccaggtcctggcagccaaggagaggcactgtggagagctcaagaggaggctgggcctctccaccctgggggagctgaaacagaacctgtccaggagctggcatgacgtgcaggtctctagcgcctatgtgaaaacttctgagaaacttggagagtggaatgagaaagtgacccagtcagacctctacaagaagactcaggaaactctttcacaggcaggacagaagacttcagctgccctgtccacagtgggctctgccatcagcaggaagcttggagacatgaggaactctgcgaccttcaagtcgtttgaggaccgagttgggaccataaagtctaaggttgtgggtgacagagagaacggcagtgacaacctcccttcctcagcggggagtggtgacaagcccctgtcggatcccgcacctttctaagcctgtggttgcttcacccgctgcagagcacacgcaacccagcctcagcatcacagccgcagctctgttcagcggagcagccagccagggcggatgagcagagccggccctgaggacagtcctgcccatccacgcggagatgtggctgccgcgtttgcatgaatttgaagaacacaggcttgtacacagatgttttacactcacgtttgtagatgaaacagatcactgtgctgtccttcctaggggtgcaggaagtggacagggcggagggtttgaaagaatattgagccaaagcccaggctccctttgggaatcatgttagcccatcagaatgttgaaggattgaagagttctaagcataaaataagtggcattttctgacttcttcctcctcctccttccctgactcacagaaggaatgcaatcacccagcaagtcctacctgttacgcaattttttatctcaaaatgccgaacgagaaaactgtccattttctgagacccccagaaaggaaactgaccctcagcagctgcctgattgttacgcgaatctagctttaacggaagcaaattcattattttttaaatgcagtggacttttcaaaaagtttaaattaggcaaagcagctttagcctcatagaatattatttctttggactcaagctgaaatacaagccttacattgccttatgctttatttctttctaatttttatatgtatatagatgagggttccttaatggttgtgagcattgtgtggaattttacacctggcctgcgtggcagcctcttccagttgaggtgttttatgtcacgcacactccatcccagtgtacaaaacctgcttctcttctcaaccgtggcagctcccgctggctcctatgccctgccctaaagggctcttgagcctctgggaatgggaggggccaagagaaggaaaaccctgtctttagcaccctttaaaagaactgtgccccccttctcagtgctgcctttgcatgggcctggcccggctcgcattcgtcagtgactccaaccctcctgcttgctgtacttgggatgaaacgaccccacaggtcaggtggagggtggggcgtgggcatcagccaggattgccgttacagtctttttctcaggagctacaaagatctcttcctgttactaaatggtcgcaccccagcagcctctctcgcacaccggggccctgcatgtcagatggcgtggtctgcagggggagctctgtgccttagtggctcttggcaggacactgagggcctgcctgtggtgtgcccggctctgccactcccgggaggggaagggctgctcagctcaaggtgtcctgttcggtagagcaagtgtcctctgacagccgtgtccccggacagttcagacacccttggggatggcactccacacacgacagagatgcaggggccagggaagcccagcgctcggtgcccttcgtccagggttaaaatcggcctgtggggtgtggtgagaaggcaggttgtgcgggtgttgaccgatgtatcttttccttaaagttattataataatgggtaatttgtcaataaagcattcctttgggggaaacaccaccgccacccacaaaagaggaaacacaagacgaaaaacagacaaacgcttatttacaaacacaaaaaaaagggggggcgcgcggcaggaaattaaaag

SEQ ID NO: 313844 - DNA, 2089 bp, Homo sapiens
tactactactaaattcgcggccgcgtcgaccaaaagcccaagcctggtctcctcacagcttcctatggcagtgctctccccgctcccagtgctatgcgctgggcaacttggggtgccccccgtgaggccaagggaggaccctggggtcgagtttcctttgggggcattgtgtggaggggcaggcagctcgctccaactgctgggagtgggggaatcccagctctgcccatccctgccaagttggggttgtgtgtggatcttggtgttaactcttgcttccttctctgcttctgccatgcttccaagcagcagctactccatccgccactcaataagtatgccagccatgaggaactctgcgaccttcaagtcgtttgaggaccgagttgggaccataaagtctaaggttgtgggtgacagagagaacggcagtgacaacctcccttcctcagcggggagtggtgacaagcccctgtcggatcccgcacctttctaagcctgtggttgcttcacccgctgcagagcacacgcaacccagcctcagcatcacagccgcagctctgttcagcggagcagccagccagggcggatgagcagagccggccctgaggacagtcctgcccatccacgcggagatgtggctgccgcgtttgcatgaatttgaagaacacaggcttgtacacagatgttttacactcacgtttgtagatgaaacagatcactgtgctgtccttcctaggggtgcaggaagtggacagggcggagggtttgaaagaatattgagccaaagcccaggctccctttgggaatcatgttagcccatcagaatgttgaaggattgaagagttctaagcataaaataagtggcattttctgacttcttcctcctcctccttccctgactcacagaaggaatgcaatcacccagcaagtcctacctgttacgcaattttttatctcaaaatgccgaacgagaaaactgtccattttctgagacccccagaaaggaaactgaccctcagcagctgcctgattgttacgcgaatctagctttaacggaagcaaattcattattttttaaatgcagtggacttttcaaaaagtttaaattaggcaaagcagctttagcctcatagaatattatttctttggactcaagctgaaatacaagccttacattgccttatgctttatttctttctaatttttatatgtatatagatgagggttccttaatggttgtgagcattgtgtggaattttacacctggcctgcgtggcagcctcttccagttgaggtgttttatgtcacgcacactccatcccagtgtacaaaacctgcttctcttctcaaccgtggcagctcccgctggctcctatgccctgccctaaagggctcttgagcctctgggaatgggaggggccaagagaaggaaaaccctgtctttagcaccctttaaaagaactgtgccccccttctcagtgctgcctttgcatgggcctggcccggctcgcattcgtcagtgactccaaccctcctgcttgctgtacttgggatgaaacgaccccacaggtcaggtggagggtggggcgtgggcatcagccaggattgccgttacagtctttttctcaggagctacaaagatctcttcctgttactaaatggtcgcaccccagcagcctctctcgcacaccggggccctgcatgtcagatggcgtggtctgcagggggagctctgtgccttagtggctcttggcaggacactgagggcctgcctgtggtgtgcccggctctgccactcccgggaggggaagggctgctcagctcaaggtgtcctgttcggtagagcaagtgtcctctgacagccgtgtccccggacagttcagacacccttggggatggcactccacacacgacagagatgcaggggccagggaagcccagcgctcggtgcccttcgtccagggttaaaatcggcctgtggggtgtggtgagaaggcaggttgtgcgggtgttgaccgatgtatcttttccttaaagttattataataatgggtaatttgtcaataaagcattcctttgggggaaa

SEQ ID NO: 313845 - DNA, 2316 bp, Homo sapiens
cgggcggaagtagccgtcgcatcgcggatcgcgaaacgccgcggagctgaggcagttccgctggctagtgtgtacgcggcgagcttctcccggcgccgcccgctcggctcccatagcgcccgcgacagcggtccggacgccgcccgaacatggactccgccggccaagatatcaacctgaattctcctaacaaaggtctgctgtctgactccatgacggatgttcctgtcgacacaggtgtggctgcccggactcctgctgttgagggtctgacagaggctgaggaggaggagctcagggctgagcttaccaaggtggaagaggaaattgtcactctgcgccaggtcctggcagccaaggagaggcactgtggagagctcaagaggaggctgggcctctccaccctgggggagctgaaacagaacctgtccaggagctggcatgacgtgcaggtctctagcgcctatgtgaaaacttctgagaaacttggagagtggaatgagaaagtgacccagtcagacctctacaagaagactcaggaaactctttcacaggcaggacagaagacttcagctgccctgtccacagtgggctctgccatcagcaggaagcttggagacatgaggaactctgcgaccttcaagtcgtttgaggaccgagttgggaccataaagtctaaggttgtgggtgacagagagaacggcagtgacaacctcccttcctcagcggggagtggtgacaagcccctgtcggatcccgcacctttctaagcctgtggttgcttcacccgctgcagagcacacgcaacccagcctcagcatcacagccgcagctctgttcagcggagcagccagccagggcggatgagcagagccggccctgaggacagtcctgcccatccacgcggagatgtggctgccgcgtttgcatgaatttgaagaacacaggcttgtacacagatgttttacactcacgtttgtagatgaaacagatcactgtgctgtccttcctaggggtgcaggaagtggacagggcggagggtttgaaagaatattgagccaaagcccaggctccctttgggaatcatgttagcccatcagaatgttgaaggattgaagagttctaagcataaaataagtggcattttctgacttcttcctcctcctccttccctgactcacagaaggaatgcaatcacccagcaagtcctacctgttacgcaattttttatctcaaaatgccgaacgagaaaactgtccattttctgagacccccagaaaggaaactgaccctcagcagctgcctgattgttacgcgaatctagctttaacggaagcaaattcattattttttaaatgcagtggacttttcaaaaagtttaaattaggcaaagcagctttagcctcatagaatattatttctttggactcaagctgaaatacaagccttacattgccttatgctttatttctttctaatttttatatgtatatagatgagggttccttaatggttgtgagcattgtgtggaattttacacctggcctgcgtggcagcctcttccagttgaggtgttttatgtcacgcacactccatcccagtgtacaaaacctgcttctcttctcaaccgtggcagctcccgctggctcctatgccctgccctaaagggctcttgagcctctgggaatgggaggggccaagagaaggaaaaccctgtctttagcaccctttaaaagaactgtgccccccttctcagtgctgcctttgcatgggcctggcccggctcgcattcgtcagtgactccaaccctcctgcttgctgtacttgggatgaaacgaccccacaggtcaggtggagggtggggcgtgggcatcagccaggattgccgttacagtctttttctcaggagctacaaagatctcttcctgttactaaatggtcgcaccccagcagcctctctcgcacaccggggccctgcatgtcagatggcgtggtctgcagggggagctctgtgccttagtggctcttggcaggacactgagggcctgcctgtggtgtgcccggctctgccactcccgggaggggaagggctgctcagctcaaggtgtcctgttcggtagagcaagtgtcctctgacagccgtgtccccggacagttcagacacccttggggatggcactccacacacgacagagatgcaggggccaggattgccgttacagtctgtttctcaggagctacaaagatctcttcctgttactaaatagtcgcaccccagcagcctctctcgcacaccgggcactgcatgtcagatgg

SEQ ID NO: 313846 - DNA, 1975 bp, Homo sapiens
cgggcggaagtagccgtcgcatcgcggatcgcgaaacgccgcggagctgaggcagttccgctggctagtgtgtacgcggcgagcttctcccggcgccgcccgctcggctcccatagcgcccgcgacagcggtccggacgccgcccgaacatggactccgccggccaagatatcaacctgaattctcctaacaaaggtctgctgtctgactccatgacggatgttcctgtcgacacaggtgtggctgcccggactcctgctgttgagggtctgacagaggctgaggaggaggagctcagggctgagcttaccaaggtggaagaggaaattgtcactctgcgccaggtcctggcagccaaggagaggcactgtggagagctcaagaggaggctgggcctctccaccctgggggagctgaaacagaacctgtccaggagctggcatgacgtgcaggtctctagcgcctatgtgaaaacttctgagaaacttggagagtggaatgagaaagtgacccagtcagacctctacaagaagactcaggaaactctttcacaggcaggacagaagacttcagctgccctgtccacagtgggctctgccatcagcaggaagcttggagacatgaggaactctgcgaccttcaagtcgtttgaggaccgagttgggaccataaagtctaaggttgtgggtgacagagagaacggcagtgacaacctcccttcctcagcggggagtggtgacaagcccctgtcggatcccgcacctttctaagcctgtggttgcttcacccgctgcagagcacacgcaacccagcctcagcatcacagccgcagctctgttcagcggagcagccagccagggcggatgagcagagccggccctgaggacagtcctgcccatccacgcggagatgtggctgccgcgtttgcatgaatttgaagaacacaggcttgtacacagatgttttacactcacgtttgtagatgaaacagatcactgtgctgtccttcctaggggtgcaggaagtggacagggcggagggtttgaaagaatattgagccaaagcccaggctccctttgggaatcatgttagcccatcagaatgttgaaggattgaagagttctaagcataaaataagtggcattttctgacttcttcctcctcctccttccctgactcacagaaggaatgcaatcacccagcaagtcctacctgttacgcaattttttatctcaaaatgccgaacgagaaaactgtccattttctgagacccccagaaaggaaactgaccctcagcagctgcctgattgttacgcgaatctagctttaacggaagcaaattcattattttttaaatgcagtggacttttcaaaaagtttaaattaggcaaagcagctttagcctcatagaatattatttctttggactcaagctgaaatacaagccttacattgccttatgctttatttctttctaatttttatatgtatatagatgagggttccttaatggttgtgagcattgtgtggaattttacacctggcctgcgtggcagcctcttccagttgaggtgttttatgtcacgcacactccatcccagtgtacaaaacctgcttctcttctcaaccgtggcagctcccgctggctcctatgccctgccctaaagggctcttgagcctctgggaatgggaggggccaagagaaggaaaaccctgtctttagcaccctttaaaagaactgtgccccccttctcagtgctgcctttgcatgggcctggcccggctcgcattcgtcagtgactccaaccctcctgcttgctgtacttgggatgaaacgaccccttcgtccagggttaaaatcggcctgtggggtgtggtgagaaggcaggttgtgcgggtgttgaccgatgtatcttttccttaaagttattataataatgggtaatttgtcaataaagcattcctttgggggaaa

SEQ ID NO: 313847 - DNA, 822 bp, Homo sapiens
cgggcggaagtagccgtcgcatcgcggatcgcgaaacgccgcggagctgaggcagttccgctggctagtgtgtacgcggcgagcttctcccggcgccgcccgctcggctcccatagcgcccgcgacagcggtccggacgccgcccgaacatggactccgccggccaagatatcaacctgaattctcctaacaaaggtctgctgtctgactccatgacggatgttcctgtcgacacaggtgtggctgcccggactcctgctgttgagggtctgacagaggctgaggaggaggagctcagggctgagcttaccaaggtggaagaggaaattgtcactctgcgccaggtcctggcagccaaggagaggcactgtggagagctcaagaggaggctgggcctctccaccctgggggagctgaaacagaacctgtccaggagctggcatgacgtgcaggtctctagcgcctatgtgaaaacttctgagaaacttggagagtggaatgagaaagtgacccagtcagacctctacaagaagactcaggaaactctttcacaggcaggacagaagacttcagctgccctgtccacagtgggctctgccatcagcaggaagcttggagacatgagaactcttcgacacatcaagtccattgacaaccgagcaggcaccatgatctattagatgtggatgctcacatgagagcacctatgtgacaacctcccgtgccacagcgaggattggatacaaacactcactcagatccgacatctacaaaaacactcaggtagtcatccacagcagaccacacacaacccagacacag

SEQ ID NO: 313848 - DNA, 4645 bp, Homo sapiens
ttgttggctggtgtgtgggtgtcaaactgagccagacgcggcggtggcggcggctccgcgggctacggtcgctcccgcctctcgagcgctgccggtggccgcagcggcgcacccacgccggcccggaggagcagagtgttcatttctgtgtcgggcacagtgctaagtgctgggtgctcactggtgatgaggcagatgaaggttaccaaacttgtggacaggagcctcatatcagagacgtggacctcactgtagcctggtcatggcttccagcttttcgaatctgaggctccaaaggaggaaatgaccattcagggatcttactccagcttgattacggagactgaaccttcatagggtgcgcacttaccaaggacaggaaggtttctctgtttgaagggctttaaacttataacaaagaaaataaaaatgacgacttcgtctatcagacggcagatgaaaaacatcgtgaacaattactcagaggcagaaatcaaagtccgggaagccacctccaatgacccgtggggcccgtccagttctctgatgaccgagattgccgacctgacctacaacgtggtggccttctcggagatcatgagcatggtgtggaagcggctgaatgaccatggcaagaactggcggcatgtgtacaaggcgctgaccctgctggactacctcatcaagacaggctccgaacgtgtggcccagcagtgccgggagaacatcttcgccatccagaccctgaaggacttccagtacattgaccgagatggcaaggaccagggcatcaatgtgcgtgagaagtcaaagcaactggtggctctcctcaaggacgaggaacggttgaaggctgagagggcccaggctctcaaaaccaaagagcgcatggcccaggttgccactggcatgggcagcaaccagatcacctttgggcgaggctccagccagcccaacctctccaccagccactcggagcaggagtatggcaaggccgggggctccccggcctcctaccatggctccacctccccgcgagtgtcctccgagctggagcaagcccggccccagactagtggagaagaggagcttcagctgcagctggcacttgccatgagcagagaagtggctgagcaggaagaacgcctcaggcggggtgatgacctcagattacagatggccctggaagaaagccgaagggacacagttaaaattccaaaaaagaaagagcatggctctctcccacagcagactacgctgttggatttaatggatgctctccccagctcgggccccgcggcccagaaagcagagccctggggcccgtcagcctccactaaccagaccaacccctggggcgggccagcggctcctgcgagtacttcagacccctggccatcgtttggtaccaagccagctgcctccattgacccatggggggtgcccactggagccaccgcacaatctgtccccaagaactcggacccctgggcagcttcacagcagcctgcctccagtgctgggaaaagagcttctgacgcgtggggcgcagtctccaccaccaagcccgtgtctgtctctgggtcctttgagctcttcagtaatctgaatggtacaattaaagatgacttttctgaatttgacaaccttcggacttcaaaaaaaacagccgaatctgtgacctctctgccatcccaaaacaatggaactaccagccctgacccctttgagtctcaacccctgactgtcgcctcaagcaagcccagcagtgcccggaaaacacctgagtccttcctgggccccaacgcggccctggtgaacctggactcactggtgaccaggcctgccccaccagcccagtccctcaaccctttcctggcaccaggtgctcccgccacctcggcccctgttaaccctttccaggtgaaccagccccagccgctgacactgaaccagcttcgggggagcccagtcctggggaccagcacatcctttgggcctggcccaggagtggagtccatggctgtggcctcgatgacctccgcggccccacagccagctctgggggccactggttcctctctgacaccactgggccctgcaatgatgaacatggtgggcagtgtgggtatacccccatcagcagcccaggccactggcacaaccaaccctttccttctctagtgcctgggcctgggacccacccagagcacctgtgctggaggatgccgagcagggactctcgtctgtgggacgggatccaagagtttggggattaggggtattagggcttttcagctccagcttcctgatgaaagggctgtctttacagccccaaccctcagaccctcgccttccaaggcaggcccctcagcctggcctgctctcaccacctcctccaaagcactgaggtcctggcagggctcctctgaggccttggacgaggacgtggagtcatcagtgttgcccttgcccctaacctcagcccgagggtctccaggatgttgcctggcccaggacttgggacagtggccttgtctttgtcctccccaccccccagccctagggacaccccaggcagtcctgggtgtggacacgatgaagcaccggctccataagacaccttttggggaagtggttgtgcatattttatttttctttgactcgtgtgagttcaaagtaaacaccaccaccgtggacaactcttgaattaaatccactagagcgagctttaaaactaatctgagcataacccccaacgtggctctatgcttgtgtacctttgcacatattttgtttagtacagtttcatatttgagtttgcagaattatctaatagtctttttttggctaatatttttataacgtggttcttatttaactgtctagttttgatagaatttaccaggtctggctgaatgaagatgttggcacgtgtcattttagtggtttaaatcctcttatttatggttttaactctaagaaaattttaaaaggaagagatgtttggatgacaaaaaaatgccttattgaaaaactaaagcaaattctttataggaagaaaatatgggaatttgattacacatagatgatgatgtttatttaaaaaaaaaacaacagcaacaaaaaatcctagcctccagttgccttttcctttctttagctcctgtttttggtgaattactaaactgattgactttcagcctttttggctagatcctgagaggctatttttcttacgaatataccaacatcctgaaagttaaagaaaaaaatctaatgtatgaatgtgactcaccaatttttatcaactaattccttttttttattaaaggcatgcagggattaacaggacttctgtttacaatggaaatctgaaatggaagaaacatctttaaccttgtgtgtctgtgatctcctctgtcttaatccacgctcaggctaaagatggggataatgtggaaatggcagttgtcccgagggcgtggggtggggggtgcttctgtgcccacgggtccctgggcaacagtccctaggctaagacaggggtggggggctaagggaccagggctggccctgatccacctacctgctaactccagatattatttttaagttggagacctaaaaataattctcttgtattttggagatgaagaaaaaagtcattcacctgggagggatttttaacaaacatgcactaatattacctccctcttccaaactcctactgtcctcacctcacccaccactgtaaaagtattacgtcgtgcattaaagaccagaaaagacttgcttttacccagggaggggacattcccccaatcctgtgtctgggcagcttgcctggtggatgtttctggccctttttccaccatgggaatttctcacctctagctctaagggcagctgaccacctgccagcccctctctggttccagaagattacccttcgcaccggcacaggagagatcttaaatggtctctgggctgctgggacatgcaggctctgagtggggactgcacccactcatgctgttcctgaggctgccctctccagtcccaggagccgtgtctagagttcctgaccagccaccttctgccagaactgcaggcctgcggctgggtcttaggctcccgctgccatttgggtaagccggtggctggtctcgtctgccgggggaagggtggggaggtgcaatgggatgggaggcaggatgcttgcccagaaaggtgctttccttcagacggtgcagggcctgggccagccttacaggtcagtagactagactcgactacttggggtcagtgattcttttgtaacgagtctttcatgatgtgactttgaggccccaacatgacagccactgggccaccgggacccaagaagacagccccctgccccatcttctggcacaggccatcccgagtgcatgtccctgttgcccactgcactgatcatgaagccaccggccactgccacgcatgttgcacctgtgccatcgtgctccctcctgatgggcaccgtggtggaggaagtcacccagctgtttctcagtcccagaggccggtggctggttttgaacttgtgttgactgttgatacttatttactgtataaatataatttatcatttgtaccatga

SEQ ID NO: 313849 - DNA, 4774 bp, Homo sapiens
ttgttggctggtgtgtgggtgtcaaactgagccagacgcggcggtggcggcggctccgcgggctacggtcgctcccgcctctcgagcgctgccggtggccgcagcggcgcacccacgccggcccggaggagcaggaggagcagagggtctcactctatcgcccaggctggagtgcagtggcgcaatcttggctcactacaacctccacctctcgggctcaagcagttctcgtgcctcagcctcctgagtaagctgggattacgagtgttcatttctgtgtcgggcacagtgctaagtgctgggtgctcactggtgatgaggcagatgaaggttaccaaacttgtggacaggagcctcatatcagagacgtggacctcactgtagcctggtcatggcttccagcttttcgaatctgaggctccaaaggaggaaatgaccattcagggatcttactccagcttgattacggagactgaaccttcatagggtgcgcacttaccaaggacaggaaggtttctctgtttgaagggctttaaacttataacaaagaaaataaaaatgacgacttcgtctatcagacggcagatgaaaaacatcgtgaacaattactcagaggcagaaatcaaagtccgggaagccacctccaatgacccgtggggcccgtccagttctctgatgaccgagattgccgacctgacctacaacgtggtggccttctcggagatcatgagcatggtgtggaagcggctgaatgaccatggcaagaactggcggcatgtgtacaaggcgctgaccctgctggactacctcatcaagacaggctccgaacgtgtggcccagcagtgccgggagaacatcttcgccatccagaccctgaaggacttccagtacattgaccgagatggcaaggaccagggcatcaatgtgcgtgagaagtcaaagcaactggtggctctcctcaaggacgaggaacggttgaaggctgagagggcccaggctctcaaaaccaaagagcgcatggcccaggttgccactggcatgggcagcaaccagatcacctttgggcgaggctccagccagcccaacctctccaccagccactcggagcaggagtatggcaaggccgggggctccccggcctcctaccatggctccacctccccgcgagtgtcctccgagctggagcaagcccggccccagactagtggagaagaggagcttcagctgcagctggcacttgccatgagcagagaagtggctgagcaggaagaacgcctcaggcggggtgatgacctcagattacagatggccctggaagaaagccgaagggacacagttaaaattccaaaaaagaaagagcatggctctctcccacagcagactacgctgttggatttaatggatgctctccccagctcgggccccgcggcccagaaagcagagccctggggcccgtcagcctccactaaccagaccaacccctggggcgggccagcggctcctgcgagtacttcagacccctggccatcgtttggtaccaagccagctgcctccattgacccatggggggtgcccactggagccaccgcacaatctgtccccaagaactcggacccctgggcagcttcacagcagcctgcctccagtgctgggaaaagagcttctgacgcgtggggcgcagtctccaccaccaagcccgtgtctgtctctgggtcctttgagctcttcagtaatctgaatggtacaattaaagatgacttttctgaatttgacaaccttcggacttcaaaaaaaacagccgaatctgtgacctctctgccatcccaaaacaatggaactaccagccctgacccctttgagtctcaacccctgactgtcgcctcaagcaagcccagcagtgcccggaaaacacctgagtccttcctgggccccaacgcggccctggtgaacctggactcactggtgaccaggcctgccccaccagcccagtccctcaaccctttcctggcaccaggtgctcccgccacctcggcccctgttaaccctttccaggtgaaccagccccagccgctgacactgaaccagcttcgggggagcccagtcctggggaccagcacatcctttgggcctggcccaggagtggagtccatggctgtggcctcgatgacctccgcggccccacagccagctctgggggccactggttcctctctgacaccactgggccctgcaatgatgaacatggtgggcagtgtgggtatacccccatcagcagcccaggccactggcacaaccaaccctttccttctctagtgcctgggcctgggacccacccagagcacctgtgctggaggatgccgagcagggactctcgtctgtgggacgggatccaagagtttggggattaggggtattagggcttttcagctccagcttcctgatgaaagggctgtctttacagccccaaccctcagaccctcgccttccaaggcaggcccctcagcctggcctgctctcaccacctcctccaaagcactgaggtcctggcagggctcctctgaggccttggacgaggacgtggagtcatcagtgttgcccttgcccctaacctcagcccgagggtctccaggatgttgcctggcccaggacttgggacagtggccttgtctttgtcctccccaccccccagccctagggacaccccaggcagtcctgggtgtggacacgatgaagcaccggctccataagacaccttttggggaagtggttgtgcatattttatttttctttgactcgtgtgagttcaaagtaaacaccaccaccgtggacaactcttgaattaaatccactagagcgagctttaaaactaatctgagcataacccccaacgtggctctatgcttgtgtacctttgcacatattttgtttagtacagtttcatatttgagtttgcagaattatctaatagtctttttttggctaatatttttataacgtggttcttatttaactgtctagttttgatagaatttaccaggtctggctgaatgaagatgttggcacgtgtcattttagtggtttaaatcctcttatttatggttttaactctaagaaaattttaaaaggaagagatgtttggatgacaaaaaaatgccttattgaaaaactaaagcaaattctttataggaagaaaatatgggaatttgattacacatagatgatgatgtttatttaaaaaaaaaacaacagcaacaaaaaatcctagcctccagttgccttttcctttctttagctcctgtttttggtgaattactaaactgattgactttcagcctttttggctagatcctgagaggctatttttcttacgaatataccaacatcctgaaagttaaagaaaaaaatctaatgtatgaatgtgactcaccaatttttatcaactaattccttttttttattaaaggcatgcagggattaacaggacttctgtttacaatggaaatctgaaatggaagaaacatctttaaccttgtgtgtctgtgatctcctctgtcttaatccacgctcaggctaaagatggggataatgtggaaatggcagttgtcccgagggcgtggggtggggggtgcttctgtgcccacgggtccctgggcaacagtccctaggctaagacaggggtggggggctaagggaccagggctggccctgatccacctacctgctaactccagatattatttttaagttggagacctaaaaataattctcttgtattttggagatgaagaaaaaagtcattcacctgggagggatttttaacaaacatgcactaatattacctccctcttccaaactcctactgtcctcacctcacccaccactgtaaaagtattacgtcgtgcattaaagaccagaaaagacttgcttttacccagggaggggacattcccccaatcctgtgtctgggcagcttgcctggtggatgtttctggccctttttccaccatgggaatttctcacctctagctctaagggcagctgaccacctgccagcccctctctggttccagaagattacccttcgcaccggcacaggagagatcttaaatggtctctgggctgctgggacatgcaggctctgagtggggactgcacccactcatgctgttcctgaggctgccctctccagtcccaggagccgtgtctagagttcctgaccagccaccttctgccagaactgcaggcctgcggctgggtcttaggctcccgctgccatttgggtaagccggtggctggtctcgtctgccgggggaagggtggggaggtgcaatgggatgggaggcaggatgcttgcccagaaaggtgctttccttcagacggtgcagggcctgggccagccttacaggtcagtagactagactcgactacttggggtcagtgattcttttgtaacgagtctttcatgatgtgactttgaggccccaacatgacagccactgggccaccgggacccaagaagacagccccctgccccatcttctggcacaggccatcccgagtgcatgtccctgttgcccactgcactgatcatgaagccaccggccactgccacgcatgttgcacctgtgccatcgtgctccctcctgatgggcaccgtggtggaggaagtcacccagctgtttctcagtcccagaggccggtggctggttttgaacttgtgttgactgttgatacttatttactgtataaatataatttatcatttgtaccatga

SEQ ID NO: 313850 - DNA, 4551 bp, Homo sapiens
ttgttggctggtgtgtgggtgtcaaactgagccagacgcggcggtggcggcggctccgcgggctacggtcgctcccgcctctcgagcgctgccggtggccgcagcggcgcacccacgccggcccggaggagcagagtgttcatttctgtgtcgggcacagtgctaagtgctgggtgctcactggtgatgaggcagatgaaggttaccaaacttgtggacaggagcctcatatcagagacgtggacctcactgtagcctggtcatggcttccagcttttcgaatctgaggctccaaaggaggaaatgaccattcagggatcttactccagcttgattacggagactgaaccttcatagggtgcgcacttaccaaggacaggaaggtttctctgtttgaagggctttaaacttataacaaagaaaataaaaatgacgacttcgtctatcagacggcagatgaaaaacatcgtgaacaattactcagaggcagaaatcaaagtccgggaagccacctccaatgacccgtggggcccgtccagttctctgatgaccgagattgccgacctgacctacaacgtggtggccttctcggagatcatgagcatggtgtggaagcggctgaatgaccatggcaagaactggcggcatgtgtacaaggcgctgaccctgctggactacctcatcaagacaggctccgaacgtgtggcccagcagtgccgggagaacatcttcgccatccagaccctgaaggacttccagtacattgaccgagatggcaaggaccagggcatcaatgtgcgtgagaagtcaaagcaactggtggctctcctcaaggacgaggaacggttgaaggctgagagggcccaggctctcaaaaccaaagagcgcatggcccaggttgccactggcatgggcagcaaccagatcacctttgggcgaggctccagccagcccaacctctccaccagccactcggagcaggagtatggcaaggccgggggctccccggcctcctaccatggctccacctccccgcgagtgtcctccgagctggagcaagcccggccccagactagtggagaagaggagcttcagctgcagctggcacttgccatgagcagagaagtggctgagcaggaagaacgcctcaggcggggtgatgacctcagattacagatggccctggaagaaagccgaagggacacagttaaaattccaaaaaagaaagagcatggctctctcccacagcagactacgctgttggatttaatggatgctctccccagctcgggccccgcggcccagaaagcagagccctggggcccgtcagcctccactaaccagaccaacccctggggcgggccagcggctcctgcgagtacttcagacccctggccatcgtttggtaccaagccagctgcctccattgacccatggggggtgcccactggagccaccgcacaatctgtccccaagaactcggacccctgggcagcttcacagcagcctgcctccagtgctgggaaaagagcttctgacgcgtggggcgcagtctccaccaccaagcccgtgtctgtctctgggtcctttgagctcttcagtaatctgaatggtacaattaaagatgacttttctgaatttgacaaccttcggacttcaaaaaaaacagccgaatctgtgacctctctgccatcccaaaacaatggaactaccagccctgacccctttgagtctcaacccctgactgtcgcctcaagcaagcccagcagtgcccggaaaacacctgagtccttcctgggccccaacgcggccctggtgaacctggactcactggtgaccaggcctgccccaccagcccagtccctcaaccctttcctggcaccaggtgctcccgccacctcggcccctgttaaccctttccaggtgaaccagccccagccgctgacactgaaccagcttcgggggagcccagtcctggggaccagcacatcctttgggcctggcccaggagtggagtccatggctgtggcctcgatgacctccgcggccccacagccagctctgggggccactggttcctctctgacaccactgggccctgcaatgatgaacatggtgggcagtgtgggtatacccccatcagcagcccaggccactggcacaaccaaccctttccttctctagtgcctgggcctgggacccacccagagcacctgtgctggaggatgccgagcagggactctcgtctgtgggacgggatccaagagtttggggattaggggtattagggcttttcagctccagcttcctgatgaaagggctgtctttacagccccaaccctcagaccctcgccttccaaggcaggcccctcagcctggcctgctctcaccacctcctccaaagcactgaggtcctggcagggctcctctgaggccttggacgaggacgtggagtcatcagtgttgcccttgcccctaacctcagcccgagggtctccaggatgttgcctggcccaggacttgggacagtggccttgtctttgtcctccccaccccccagccctagggacaccccaggcagtcctgggtgtggacacgatgaagcaccggctccataagacaccttttggggaagtggttgtgcatattttatttttctttgactcgtgtgagttcaaagtaaacaccaccaccgtggacaactcttgaattaaatccactagagcgagctttaaaactaatctgagcataacccccaacgtggctctatgcttgtgtacctttgcacatattttgtttagtacagtttcatatttgagtttgcagaattatctaatagtctttttttggctaatatttttataacgtggttcttatttaactgtctagttttgatagaatttaccaggtctggctgaatgaagatgttggcacgtgtcattttagtggtttaaatcctcttatttatggttttaactctaagaaaattttaaaaggaagagatgtttggatgacaaaaaaatgccttattgaaaaactaaagcaaattctttataggaagaaaatatgggaatttgattacacatagatgatgatgtttatttaaaaaaaaaacaacagcaacaaaaaatcctagcctccagttgccttttcctttctttagctcctgtttttggtgaattactaaactgattgactttcagcctttttggctagatcctgagaggctatttttcttacgaatataccaacatcctgaaagttaaagaaaaaaatctaatgtatgaatgtgactcaccaatttttatcaactaattccttttttttattaaaggcatgcagggattaacaggacttctgtttacaatggaaatctgaaatggaagaaacatctttaaccttgtgtgtctgtgatctcctctgtcttaatccacgctcaggctaaagatggggataatgtggaaatggcagttgtcccgagggcgtggggtggggggtgcttctgtgcccacgggtccctgggcaacagtccctaggctaagacaggggtggggggctaagggaccagggctggccctgatccacctacctgctaactccagatattatttttaagttggagacctaaaaataattctcttgtattttggagatgaagaaaaaagtcattcacctgggagggatttttaacaaacatgcactaatattacctccctcttccaaactcctactgtcctcacctcacccaccactgtaaaagtattacgtcgtgcattaaagaccagaaaagacttgcttttacccagggaggggacattcccccaatcctgtgtctgggcagcttgcctggtggatgtttctggccctttttccaccatgggaatttctcacctctagctctaagggcagctgaccacctgccagcccctctctggttccagaagattacccttcgcaccggcacaggagagatcttaaatggtctctgggctgctgggacatgcaggctctgagtggggactgcacccactcatgctgttcctgaggctgccctctccagtcccaggagccgtgtctagagttcctgaccagccaccttctgccagaactgcaggcctgcggctgggtcttaggctcccgtgctttccttcagacggtgcagggcctgggccagccttacaggtcagtagactagactcgactacttggggtcagtgattcttttgtaacgagtctttcatgatgtgactttgaggccccaacatgacagccactgggccaccgggacccaagaagacagccccctgccccatcttctggcacaggccatcccgagtgcatgtccctgttgcccactgcactgatcatgaagccaccggccactgccacgcatgttgcacctgtgccatcgtgctccctcctgatgggcaccgtggtggaggaagtcacccagctgtttctcagtcccagaggccggtggctggttttgaacttgtgttgactgttgatacttatttactgtataaatataatttatcatttgtaccatga

SEQ ID NO: 313851 - DNA, 4485 bp, Homo sapiens
ttgttggctggtgtgtgggtgtcaaactgagccagacgcggcggtggcggcggctccgcgggctacggtcgctcccgcctctcgagcgctgccggtggccgcagcggcgcacccacgccggcccggaggagcagagtgttcatttctgtgtcgggcacagtgctaagtgctgggtgctcactggtgatgaggcagatgaaggttaccaaacttgtggacaggagcctcatatcagagacgtggacctcactgtagcctggtcatggcttccagcttttcgaatctgaggctccaaaggaggaaatgaccattcagggatcttactccagcttgattacggagactgaaccttcatagggtgcgcacttaccaaggacaggaaggtttctctgtttgaagggctttaaacttataacaaagaaaataaaaatgacgacttcgtctatcagacggcagatgaaaaacatcgtgaacaattactcagaggcagaaatcaaagtccgggaagccacctccaatgacccgtggggcccgtccagttctctgatgaccgagattgccgacctgacctacaacgtggtggccttctcggagatcatgagcatggtgtggaagcggctgaatgaccatggcaagaactggcggcatgtgtacaaggcgctgaccctgctggactacctcatcaagacaggctccgaacgtgtggcccagcagtgccgggagaacatcttcgccatccagaccctgaaggacttccagtacattgaccgagatggcaaggaccagggcatcaatgtgcgtgagaagtcaaagcaactggtggctctcctcaaggacgaggaacggttgaaggctgagagggcccaggctctcaaaaccaaagagcgcatggcccaggttgccactggcatgggcagcaaccagatcacctttgggcgaggctccagccagcccaacctctccaccagccactcggagcaggagtatggcaaggccgggggctccccggcctcctaccatggctccacctccccgcgagtgtcctccgagctggagcaagcccggccccagactagtggagaagaggagcttcagctgcagctggcacttgccatgagcagagaagtggctgagcaggaagaacgcctcaggcggggtgatgacctcagattacagatggccctggaagaaagccgaagggacacagttaaaattccaaaaaagaaagagcatggctctctcccacagcagactacgctgttggatttaatggatgctctccccagctcgggccccgcggcccagaaagcagagccctggggcccgtcagcctccactaaccagaccaacccctggggcgggccagcggctcctgcgagtacttcagacccctggccatcgtttggtaccaagccagctgcctccattgacccatggggggtgcccactggagccaccgcacaatctgtccccaagaactcggacccctgggcagcttcacagcagcctgcctccagtgctgggaaaagagcttctgacgcgtggggcgcagtctccaccaccaagcccgtgtctgtctctgggtcctttgagctcttcagtaatctgaatggtacaattaaagatgacttttctgaatttgacaaccttcggacttcaaaaaaaacagccgaatctgtgacctctctgccatcccaaaacaatggaactaccagccctgacccctttgagtctcaacccctgactgtcgcctcaagcaagcccagcagtgcccggaaaacacctgagtccttcctgggccccaacgcggccctggtgaacctggactcactggtgaccaggcctgccccaccagcccagtccctcaaccctttcctggcaccaggtgctcccgccacctcggcccctgttaaccctttccaggtgaaccagccccagccgctgacactgaaccagcttcgggggagcccagtcctggggaccagcacatcctttgggcctggcccaggagtggagtccatggctgtggcctcgatgacctccgcggccccacagccagctctgggggccactggttcctctctgacaccactgggccctgcaatgatgaacatggtgggcagtgtgggtatacccccatcagcagcccaggccactggcacaaccaaccctttccttctctagtgcctgggcctgggacccacccagagcacctgtgctggaggatgccgagcagggactctcgtctgtgggacgggatccaagagtttggggattaggggtattagggcttttcagctccagcttcctgatgaaagggctgtctttacagccccaaccctcagaccctcgccttccaaggcaggcccctcagcctggcctgctctcaccaccccccagccctagggacaccccaggcagtcctgggtgtggacacgatgaagcaccggctccataagacaccttttggggaagtggttgtgcatattttatttttctttgactcgtgtgagttcaaagtaaacaccaccaccgtggacaactcttgaattaaatccactagagcgagctttaaaactaatctgagcataacccccaacgtggctctatgcttgtgtacctttgcacatattttgtttagtacagtttcatatttgagtttgcagaattatctaatagtctttttttggctaatatttttataacgtggttcttatttaactgtctagttttgatagaatttaccaggtctggctgaatgaagatgttggcacgtgtcattttagtggtttaaatcctcttatttatggttttaactctaagaaaattttaaaaggaagagatgtttggatgacaaaaaaatgccttattgaaaaactaaagcaaattctttataggaagaaaatatgggaatttgattacacatagatgatgatgtttatttaaaaaaaaaacaacagcaacaaaaaatcctagcctccagttgccttttcctttctttagctcctgtttttggtgaattactaaactgattgactttcagcctttttggctagatcctgagaggctatttttcttacgaatataccaacatcctgaaagttaaagaaaaaaatctaatgtatgaatgtgactcaccaatttttatcaactaattccttttttttattaaaggcatgcagggattaacaggacttctgtttacaatggaaatctgaaatggaagaaacatctttaaccttgtgtgtctgtgatctcctctgtcttaatccacgctcaggctaaagatggggataatgtggaaatggcagttgtcccgagggcgtggggtggggggtgcttctgtgcccacgggtccctgggcaacagtccctaggctaagacaggggtggggggctaagggaccagggctggccctgatccacctacctgctaactccagatattatttttaagttggagacctaaaaataattctcttgtattttggagatgaagaaaaaagtcattcacctgggagggatttttaacaaacatgcactaatattacctccctcttccaaactcctactgtcctcacctcacccaccactgtaaaagtattacgtcgtgcattaaagaccagaaaagacttgcttttacccagggaggggacattcccccaatcctgtgtctgggcagcttgcctggtggatgtttctggccctttttccaccatgggaatttctcacctctagctctaagggcagctgaccacctgccagcccctctctggttccagaagattacccttcgcaccggcacaggagagatcttaaatggtctctgggctgctgggacatgcaggctctgagtggggactgcacccactcatgctgttcctgaggctgccctctccagtcccaggagccgtgtctagagttcctgaccagccaccttctgccagaactgcaggcctgcggctgggtcttaggctcccgctgccatttgggtaagccggtggctggtctcgtctgccgggggaagggtggggaggtgcaatgggatgggaggcaggatgcttgcccagaaaggtgctttccttcagacggtgcagggcctgggccagccttacaggtcagtagactagactcgactacttggggtcagtgattcttttgtaacgagtctttcatgatgtgactttgaggccccaacatgacagccactgggccaccgggacccaagaagacagccccctgccccatcttctggcacaggccatcccgagtgcatgtccctgttgcccactgcactgatcatgaagccaccggccactgccacgcatgttgcacctgtgccatcgtgctccctcctgatgggcaccgtggtggaggaagtcacccagctgtttctcagtcccagaggccggtggctggttttgaacttgtgttgactgttgatacttatttactgtataaatataatttatcatttgtaccatga

SEQ ID NO: 313852 - DNA, 4627 bp, Homo sapiens
ttgttggctggtgtgtgggtgtcaaactgagccagacgcggcggtggcggcggctccgcgggctacggtcgctcccgcctctcgagcgctgccggtggccgcagcggcgcacccacgccggcccggaggagcagagtgttcatttctgtgtcgggcacagtgctaagtgctgggtgctcactggtgatgaggcagatgaaggttaccaaacttgtggacaggagcctcatatcagagacgtggacctcactgtagcctggtcatggcttccagcttttcgaatctgaggctccaaaggaggaaatgaccattcagggatcttactccagcttgattacggagactgaaccttcatagggtgcgcacttaccaaggacaggaaggtttctctgtttgaagggctttaaacttataacaaagaaaataaaaatgacgacttcgtctatcagacggcagatgaaaaacatcgtgaacaattactcagaggcagaaatcaaagtccgggaagccacctccaatgacccgtggggcccgtccagttctctgatgaccgagattgccgacctgacctacaacgtggtggccttctcggagatcatgagcatggtgtggaagcggctgaatgaccatggcaagaactggcggcatgtgtacaaggcgctgaccctgctggactacctcatcaagacaggctccgaacgtgtggcccagcagtgccgggagaacatcttcgccatccagaccctgaaggacttccagtacattgaccgagatggcaaggaccagggcatcaatgtgcgtgagaagtcaaagcaactggtggctctcctcaaggacgaggaacggttgaaggctgagagggcccaggctctcaaaaccaaagagcgcatggcccaggttgccactggcatgggcagcaaccagatcacctttgggcgaggctccagccagcccaacctctccaccagccactcggagcaggagtatggcaaggccgggggctccccggcctcctaccatggctccacctccccgcgagtgtcctccgagctggagcaagcccggccccagactagtggagaagaggagcttcagctgcagctggcacttgccatgagcagagaagtggctgagcaggaagaacgcctcaggcggggtgatgacctcagattacagatggccctggaagaaagccgaagggacacagttaaaattccaaaaaagaaagagcagactacgctgttggatttaatggatgctctccccagctcgggccccgcggcccagaaagcagagccctggggcccgtcagcctccactaaccagaccaacccctggggcgggccagcggctcctgcgagtacttcagacccctggccatcgtttggtaccaagccagctgcctccattgacccatggggggtgcccactggagccaccgcacaatctgtccccaagaactcggacccctgggcagcttcacagcagcctgcctccagtgctgggaaaagagcttctgacgcgtggggcgcagtctccaccaccaagcccgtgtctgtctctgggtcctttgagctcttcagtaatctgaatggtacaattaaagatgacttttctgaatttgacaaccttcggacttcaaaaaaaacagccgaatctgtgacctctctgccatcccaaaacaatggaactaccagccctgacccctttgagtctcaacccctgactgtcgcctcaagcaagcccagcagtgcccggaaaacacctgagtccttcctgggccccaacgcggccctggtgaacctggactcactggtgaccaggcctgccccaccagcccagtccctcaaccctttcctggcaccaggtgctcccgccacctcggcccctgttaaccctttccaggtgaaccagccccagccgctgacactgaaccagcttcgggggagcccagtcctggggaccagcacatcctttgggcctggcccaggagtggagtccatggctgtggcctcgatgacctccgcggccccacagccagctctgggggccactggttcctctctgacaccactgggccctgcaatgatgaacatggtgggcagtgtgggtatacccccatcagcagcccaggccactggcacaaccaaccctttccttctctagtgcctgggcctgggacccacccagagcacctgtgctggaggatgccgagcagggactctcgtctgtgggacgggatccaagagtttggggattaggggtattagggcttttcagctccagcttcctgatgaaagggctgtctttacagccccaaccctcagaccctcgccttccaaggcaggcccctcagcctggcctgctctcaccacctcctccaaagcactgaggtcctggcagggctcctctgaggccttggacgaggacgtggagtcatcagtgttgcccttgcccctaacctcagcccgagggtctccaggatgttgcctggcccaggacttgggacagtggccttgtctttgtcctccccaccccccagccctagggacaccccaggcagtcctgggtgtggacacgatgaagcaccggctccataagacaccttttggggaagtggttgtgcatattttatttttctttgactcgtgtgagttcaaagtaaacaccaccaccgtggacaactcttgaattaaatccactagagcgagctttaaaactaatctgagcataacccccaacgtggctctatgcttgtgtacctttgcacatattttgtttagtacagtttcatatttgagtttgcagaattatctaatagtctttttttggctaatatttttataacgtggttcttatttaactgtctagttttgatagaatttaccaggtctggctgaatgaagatgttggcacgtgtcattttagtggtttaaatcctcttatttatggttttaactctaagaaaattttaaaaggaagagatgtttggatgacaaaaaaatgccttattgaaaaactaaagcaaattctttataggaagaaaatatgggaatttgattacacatagatgatgatgtttatttaaaaaaaaaacaacagcaacaaaaaatcctagcctccagttgccttttcctttctttagctcctgtttttggtgaattactaaactgattgactttcagcctttttggctagatcctgagaggctatttttcttacgaatataccaacatcctgaaagttaaagaaaaaaatctaatgtatgaatgtgactcaccaatttttatcaactaattccttttttttattaaaggcatgcagggattaacaggacttctgtttacaatggaaatctgaaatggaagaaacatctttaaccttgtgtgtctgtgatctcctctgtcttaatccacgctcaggctaaagatggggataatgtggaaatggcagttgtcccgagggcgtggggtggggggtgcttctgtgcccacgggtccctgggcaacagtccctaggctaagacaggggtggggggctaagggaccagggctggccctgatccacctacctgctaactccagatattatttttaagttggagacctaaaaataattctcttgtattttggagatgaagaaaaaagtcattcacctgggagggatttttaacaaacatgcactaatattacctccctcttccaaactcctactgtcctcacctcacccaccactgtaaaagtattacgtcgtgcattaaagaccagaaaagacttgcttttacccagggaggggacattcccccaatcctgtgtctgggcagcttgcctggtggatgtttctggccctttttccaccatgggaatttctcacctctagctctaagggcagctgaccacctgccagcccctctctggttccagaagattacccttcgcaccggcacaggagagatcttaaatggtctctgggctgctgggacatgcaggctctgagtggggactgcacccactcatgctgttcctgaggctgccctctccagtcccaggagccgtgtctagagttcctgaccagccaccttctgccagaactgcaggcctgcggctgggtcttaggctcccgctgccatttgggtaagccggtggctggtctcgtctgccgggggaagggtggggaggtgcaatgggatgggaggcaggatgcttgcccagaaaggtgctttccttcagacggtgcagggcctgggccagccttacaggtcagtagactagactcgactacttggggtcagtgattcttttgtaacgagtctttcatgatgtgactttgaggccccaacatgacagccactgggccaccgggacccaagaagacagccccctgccccatcttctggcacaggccatcccgagtgcatgtccctgttgcccactgcactgatcatgaagccaccggccactgccacgcatgttgcacctgtgccatcgtgctccctcctgatgggcaccgtggtggaggaagtcacccagctgtttctcagtcccagaggccggtggctggttttgaacttgtgttgactgttgatacttatttactgtataaatataatttatcatttgtaccatga

SEQ ID NO: 313853 - DNA, 3151 bp, Homo sapiens
ttgttggctggtgtgtgggtgtcaaactgagccagacgcggcggtggcggcggctccgcgggctacggtcgctcccgcctctcgagcgctgccggtggccgcagcggcgcacccacgccggcccggaggagcagagtgttcatttctgtgtcgggcacagtgctaagtgctgggtgctcactggtgatgaggcagatgaaggttaccaaacttgtggacaggagcctcatatcagagacgtggacctcactgtagcctggtcatggcttccagcttttcgaatctgaggctccaaaggaggaaatgaccattcagggatcttactccagcttgattacggagactgaaccttcatagggtgcgcacttaccaaggacaggaaggtttctctgtttgaagggctttaaacttataacaaagaaaataaaaatgacgacttcgtctatcagacggcagatgaaaaacatcgtgaacaattactcagaggcagaaatcaaagtccgggaagccacctccaatgacccgtggggcccgtccagttctctgatgaccgagattgccgacctgacctacaacgtggtggccttctcggagatcatgagcatggtgtggaagcggctgaatgaccatggcaagaactggcggcatgtgtacaaggcgctgaccctgctggactacctcatcaagacaggctccgaacgtgtggcccagcagtgccgggagaacatcttcgccatccagaccctgaaggacttccagtacattgaccgagatggcaaggaccagggcatcaatgtgcgtgagaagtcaaagcaactggtggctctcctcaaggacgaggaacggttgaaggctgagagggcccaggctctcaaaaccaaagagcgcatggcccaggttgccactggcatgggcagcaaccagatcacctttgggcgaggctccagccagcccaacctctccaccagccactcggagcaggagtatggcaaggccgggggctccccggcctcctaccatggctcgcctgaggcctcgctgtgcccccagcaccgcacaggggccccgctgggtcagagtgaggagctgcagccactgagccagcgccaccccttcctgccgcacctggggctggcctcccgcccaaatggcgactggtcccagccctgcctcacttgtgaccgcgcagcccgagccacctccccgcgagtgtcctccgagctggagcaagcccggccccagactagtggagaagaggagcttcagctgcagctggcacttgccatgagcagagaagtggctgagcaggaagaacgcctcaggcggggtgatgacctcagattacagatggccctggaagaaagccgaagggacacagttaaaattccaaaaaagaaagagcatggctctctcccacagcagactacgctgttggatttaatggatgctctccccagctcgggccccgcggcccagaaagcagagccctggggcccgtcagcctccactaaccagaccaacccctggggcgggccagcggctcctgcgagtacttcagacccctggccatcgtttggtaccaagccagctgcctccattgacccatggggggtgcccactggagccaccgcacaatctgtccccaagaactcggacccctgggcagcttcacagcagcctgcctccagtgctgggaaaagagcttctgacgcgtggggcgcagtctccaccaccaagcccgtgtctgtctctgggtcctttgagctcttcagtaatctgaatggtacaattaaagatgacttttctgaatttgacaaccttcggacttcaaaaaaaacaggcatgcagggattaacaggacttctgtttacaatggaaatctgaaatggaagaaacatctttaaccttgtgtgtctgtgatctcctctgtcttaatccacgctcaggctaaagatggggataatgtggaaatggcagttgtcccgagggcgtggggtggggggtgcttctgtgcccacgggtccctgggcaacagtccctaggctaagacaggggtggggggctaagggaccagggctggccctgatccacctacctgctaactccagatattatttttaagttggagacctaaaaataattctcttgtattttggagatgaagaaaaaagtcattcacctgggagggatttttaacaaacatgcactaatattacctccctcttccaaactcctactgtcctcacctcacccaccactgtaaaagtattacgtcgtgcattaaagaccagaaaagacttgcttttacccagggaggggacattcccccaatcctgtgtctgggcagcttgcctggtggatgtttctggccctttttccaccatgggaatttctcacctctagctctaagggcagctgaccacctgccagcccctctctggttccagaagattacccttcgcaccggcacaggagagatcttaaatggtctctgggctgctgggacatgcaggctctgagtggggactgcacccactcatgctgttcctgaggctgccctctccagtcccaggagccgtgtctagagttcctgaccagccaccttctgccagaactgcaggcctgcggctgggtcttaggctcccgctgccatttgggtaagccggtggctggtctcgtctgccgggggaagggtggggaggtgcaatgggatgggaggcaggatgcttgcccagaaaggtgctttccttcagacggtgcagggcctgggccagccttacaggtcagtagactagactcgactacttggggtcagtgattcttttgtaacgagtctttcatgatgtgactttgaggccccaacatgacagccactgggccaccgggacccaagaagacagccccctgccccatcttctggcacaggccatcccgagtgcatgtccctgttgcccactgcactgatcatgaagccaccggccactgccacgcatgttgcacctgtgccatcgtgctccctcctgatgggcaccgtggtggaggaagtcacccagctgtttctcagtcccagaggccggtggctggttttgaacttgtgttgactgttgatacttatttactgtataaatataatttatcatttgtaccatga

SEQ ID NO: 313854 - DNA, 330 bp, Homo sapiens
ccgcctctcgagcgctgccggtggccgcagcggcgcacccacgccggcccggaggagcatactttttatagagatggggtctcactctgttgcccagactggtctcaaactgcttatctcaagtgactgactgtctgcctcagctgcccaagtagcagggattacagacacaagccacagccgctggctctattcaggaacatcttagttccaagttttgggaattatggataaagctgctatataaacaggtgtgcaggtttttgtgtggacattttcaactcatttgggtagacaccaagaggcacgagttctgatcataccgaaagt

SEQ ID NO: 313855 - DNA, 4816 bp, Homo sapiens
ttgttggctggtgtgtgggtgtcaaactgagccagacgcggcggtggcggcggctccgcgggctacggtcgctcccgcctctcgagcgctgccggtggccgcagcggcgcacccacgccggcccggaggagcagagtgttcatttctgtgtcgggcacagtgctaagtgctgggtgctcactggtgatgaggcagatgaaggttaccaaacttgtggacaggagcctcatatcagagacgtggacctcactgtagcctggtcatggcttccagcttttcgaatctgaggctccaaaggaggaaatgaccattcagggatcttactccagcttgattacggagactgaaccttcatagggtgcgcacttaccaaggacaggaaggtttctctgtttgaagggctttaaacttataacaaagaaaataaaaatgacgacttcgtctatcagacggcagatgaaaaacatcgtgaacaattactcagaggcagaaatcaaagtccgggaagccacctccaatgacccgtggggcccgtccagttctctgatgaccgagattgccgacctgacctacaacgtggtggccttctcggagatcatgagcatggtgtggaagcggctgaatgaccatggcaagaactggcggcatgtgtacaaggcgctgaccctgctggactacctcatcaagacaggctccgaacgtgtggcccagcagtgccgggagaacatcttcgccatccagaccctgaaggacttccagtacattgaccgagatggcaaggaccagggcatcaatgtgcgtgagaagtcaaagcaactggtggctctcctcaaggacgaggaacggttgaaggctgagagggcccaggctctcaaaaccaaagagcgcatggcccaggttgccactggcatgggcagcaaccagatcacctttgggcgaggctccagccagcccaacctctccaccagccactcggagcaggagtatggcaaggccgggggctccccggcctcctaccatggctcgcctgaggcctcgctgtgcccccagcaccgcacaggggccccgctgggtcagagtgaggagctgcagccactgagccagcgccaccccttcctgccgcacctggggctggcctcccgcccaaatggcgactggtcccagccctgcctcacttgtgaccgcgcagcccgagccacctccccgcgagtgtcctccgagctggagcaagcccggccccagactagtggagaagaggagcttcagctgcagctggcacttgccatgagcagagaagtggctgagcaggaagaacgcctcaggcggggtgatgacctcagattacagatggccctggaagaaagccgaagggacacagttaaaattccaaaaaagaaagagcatggctctctcccacagcagactacgctgttggatttaatggatgctctccccagctcgggccccgcggcccagaaagcagagccctggggcccgtcagcctccactaaccagaccaacccctggggcgggccagcggctcctgcgagtacttcagacccctggccatcgtttggtaccaagccagctgcctccattgacccatggggggtgcccactggagccaccgcacaatctgtccccaagaactcggacccctgggcagcttcacagcagcctgcctccagtgctgggaaaagagcttctgacgcgtggggcgcagtctccaccaccaagcccgtgtctgtctctgggtcctttgagctcttcagtaatctgaatggtacaattaaagatgacttttctgaatttgacaaccttcggacttcaaaaaaaacagccgaatctgtgacctctctgccatcccaaaacaatggaactaccagccctgacccctttgagtctcaacccctgactgtcgcctcaagcaagcccagcagtgcccggaaaacacctgagtccttcctgggccccaacgcggccctggtgaacctggactcactggtgaccaggcctgccccaccagcccagtccctcaaccctttcctggcaccaggtgctcccgccacctcggcccctgttaaccctttccaggtgaaccagccccagccgctgacactgaaccagcttcgggggagcccagtcctggggaccagcacatcctttgggcctggcccaggagtggagtccatggctgtggcctcgatgacctccgcggccccacagccagctctgggggccactggttcctctctgacaccactgggccctgcaatgatgaacatggtgggcagtgtgggtatacccccatcagcagcccaggccactggcacaaccaaccctttccttctctagtgcctgggcctgggacccacccagagcacctgtgctggaggatgccgagcagggactctcgtctgtgggacgggatccaagagtttggggattaggggtattagggcttttcagctccagcttcctgatgaaagggctgtctttacagccccaaccctcagaccctcgccttccaaggcaggcccctcagcctggcctgctctcaccacctcctccaaagcactgaggtcctggcagggctcctctgaggccttggacgaggacgtggagtcatcagtgttgcccttgcccctaacctcagcccgagggtctccaggatgttgcctggcccaggacttgggacagtggccttgtctttgtcctccccaccccccagccctagggacaccccaggcagtcctgggtgtggacacgatgaagcaccggctccataagacaccttttggggaagtggttgtgcatattttatttttctttgactcgtgtgagttcaaagtaaacaccaccaccgtggacaactcttgaattaaatccactagagcgagctttaaaactaatctgagcataacccccaacgtggctctatgcttgtgtacctttgcacatattttgtttagtacagtttcatatttgagtttgcagaattatctaatagtctttttttggctaatatttttataacgtggttcttatttaactgtctagttttgatagaatttaccaggtctggctgaatgaagatgttggcacgtgtcattttagtggtttaaatcctcttatttatggttttaactctaagaaaattttaaaaggaagagatgtttggatgacaaaaaaatgccttattgaaaaactaaagcaaattctttataggaagaaaatatgggaatttgattacacatagatgatgatgtttatttaaaaaaaaaacaacagcaacaaaaaatcctagcctccagttgccttttcctttctttagctcctgtttttggtgaattactaaactgattgactttcagcctttttggctagatcctgagaggctatttttcttacgaatataccaacatcctgaaagttaaagaaaaaaatctaatgtatgaatgtgactcaccaatttttatcaactaattccttttttttattaaaggcatgcagggattaacaggacttctgtttacaatggaaatctgaaatggaagaaacatctttaaccttgtgtgtctgtgatctcctctgtcttaatccacgctcaggctaaagatggggataatgtggaaatggcagttgtcccgagggcgtggggtggggggtgcttctgtgcccacgggtccctgggcaacagtccctaggctaagacaggggtggggggctaagggaccagggctggccctgatccacctacctgctaactccagatattatttttaagttggagacctaaaaataattctcttgtattttggagatgaagaaaaaagtcattcacctgggagggatttttaacaaacatgcactaatattacctccctcttccaaactcctactgtcctcacctcacccaccactgtaaaagtattacgtcgtgcattaaagaccagaaaagacttgcttttacccagggaggggacattcccccaatcctgtgtctgggcagcttgcctggtggatgtttctggccctttttccaccatgggaatttctcacctctagctctaagggcagctgaccacctgccagcccctctctggttccagaagattacccttcgcaccggcacaggagagatcttaaatggtctctgggctgctgggacatgcaggctctgagtggggactgcacccactcatgctgttcctgaggctgccctctccagtcccaggagccgtgtctagagttcctgaccagccaccttctgccagaactgcaggcctgcggctgggtcttaggctcccgctgccatttgggtaagccggtggctggtctcgtctgccgggggaagggtggggaggtgcaatgggatgggaggcaggatgcttgcccagaaaggtgctttccttcagacggtgcagggcctgggccagccttacaggtcagtagactagactcgactacttggggtcagtgattcttttgtaacgagtctttcatgatgtgactttgaggccccaacatgacagccactgggccaccgggacccaagaagacagccccctgccccatcttctggcacaggccatcccgagtgcatgtccctgttgcccactgcactgatcatgaagccaccggccactgccacgcatgttgcacctgtgccatcgtgctccctcctgatgggcaccgtggtggaggaagtcacccagctgtttctcagtcccagaggccggtggctggttttgaacttgtgttgactgttgatacttatttactgtataaatataatttatcatttgtaccatga

SEQ ID NO: 313856 - DNA, 4591 bp, Homo sapiens
ttgttggctggtgtgtgggtgtcaaactgagccagacgcggcggtggcggcggctccgcgggctacggtcgctcccgcctctcgagcgctgccggtggccgcagcggcgcacccacgccggcccggaggagcagagtgttcatttctgtgtcgggcacagtgctaagtgctgggtgctcactggtgatgaggcagatgaaggttaccaaacttgtggacaggagcctcatatcagagacgtggacctcactgtagcctggtcatggcttccagcttttcgaatctgaggctccaaaggaggaaatgaccattcagggatcttactccagcttgattacggagactgaaccttcatagggtgcgcacttaccaaggacaggaaggtttctctgtttgaagggctttaaacttataacaaagaaaataaaaatgacgacttcgtctatcagacggcagatgaaaaacatcgtgaacaattactcagaggcagaaatcaaagtccgggaagccacctccaatgacccgtggggcccgtccagttctctgatgaccgagattgccgacctgacctacaacgtggtggccttctcggagatcatgagcatggtgtggaagcggctgaatgaccatggcaagaactggcggcatgtgtacaaggcgctgaccctgctggactacctcatcaagacaggctccgaacgtgtggcccagcagtgccgggagaacatcttcgccatccagaccctgaaggacttccagtacattgaccgagatggcaaggaccagggcatcaatgtgcgtgagaagtcaaagcaactggtggctctcctcaaggacgaggaacggttgaaggctgagagggcccaggctctcaaaaccaaagagcgcatggcccaggttgccactggcatgggcagcaaccagatcacctttgggcgaggctccagccagcccaacctctccaccagccactcggagcaggagtatggcaaggccgggggctccccggcctcctaccatggctccacctccccgcgagtgtcctccgagctggagcaagcccggccccagactagtggagaagaggagcttcagctgcagctggcacttgccatgagcagagaagtggctgagcaggaagaacgcctcaggcggggtgatgacctcagattacagatggccctggaagaaagccgaagggacacagttaaaattccaaaaaagaaagagcatggctctctcccacagcagactacgctgttggatttaatggatgctctccccagctcgggccccgcggcccagaaagcagagccctggggcccgtcagcctccactaaccagaccaacccctggggcgggccagcggctcctgcgagtacttcagacccctggccatcgtttggtaccaagccagctgcctccattgacccatggggggtgcccactggagccaccgcacaatctgtccccaagaactcggacccctgggcagcttcacagcagcctgcctccagtgctgggaaaagagcttctgacgcgtggggcgcagtctccaccaccaagcccgtgtctgtctctgggtcctttgagctcttcagtaatctgaatggtacaattaaagatgacttttctgaatttgacaaccttcggacttcaaaaaaaacagccgaatctgtgacctctctgccatcccaaaacaatggaactaccagccctgacccctttgagtctcaacccctgactgtcgcctcaagcaagcccagcagtgcccggaaaacacctgagtccttcctgggccccaacgcggccctggtgaacctggactcactggtgaccaggcctgccccaccagcccagtccctcaaccctttcctggcaccaggtgctcccgccacctcggcccctgttaaccctttccaggtgaaccagccccagccgctgacactgaaccagcttcgggggagcccagtcctggggaccagcacatcctttgggcctggcccaggagtggagtccatggctgtggcctcgatgacctccgcggccccacagccagctctgggggccactggttcctctctgacaccactgggccctgcaatgatgaacatggtgggcagtgtgggtatacccccatcagcagcccaggccactggcacaaccaaccctttccttctctagtgcctgggcctgggacccacccagagcacctgtgctggaggatgccgagcagggactctcgtctgtgggacgggatccaagagtttggggattaggggtattagggcttttcagctccagcttcctgatgaaagggctgtctttacagccccaaccctcagaccctcgccttccaaggcaggcccctcagcctggcctgctctcaccacctcctccaaagcactgaggtcctggcagggctcctctgaggccttggacgaggacgtggagtcatcagtgttgcccttgcccctaacctcagcccgagggtctccaggatgttgcctggcccaggacttgggacagtggccttgtctttgtcctccccaccccccagccctagggacaccccaggcagtcctgggtgtggacacgatgaagcaccggctccataagacaccttttggggaagtggttgtgcatattttatttttctttgactcgtgtgagttcaaagtaaacaccaccaccgtggacaactcttgaattaaatccactagagcgagctttaaaactaatctgagcataacccccaacgtggctctatgcttgtgtacctttgcacatattttgtttagtacagtttcatatttgagtttgcagaattatctaatagtctttttttggctaatatttttataacgtggttcttatttaactgtctagttttgatagaatttaccaggtctggctgaatgaagatgttggcacgtgtcattttagtggtttaaatcctcttatttatggttttaactctaagaaaattttaaaaggaagagatgtttggatgacaaaaaaatgccttattgaaaaactaaagcaaattctttataggaagaaaatatgggaatttgattacacatagatgatgatgtttatttaaaaaaaaaacaacagcaacaaaaaatcctagcctccagttgccttttcctttctttagctcctgtttttggtgaattactaaactgattgactttcagcctttttggctagatcctgagaggctatttttcttacgaatataccaacatcctgaaagttaaagaaaaaaatctaatgtatgaatgtgactcaccaatttttatcaactaattccttttttttattaaaggcatgcagggattaacaggacttctgtttacaatggaaatctgaaatggaagaaacatctttaaccttgtgtgtctgtgatctcctctgtcttaatccacgctcaggctaaagatggggataatgtggaaatggcagttgtcccgagggcgtggggtggggggtgcttctgtgcccacgggtccctgggcaacagtccctaggctaagacaggggtggggggctaagggaccagggctggccctgatccacctacctgctaactccagatattatttttaagttggagacctaaaaataattctcttgtattttggagatgaagaaaaaagtcattcacctgggagggatttttaacaaacatgcactaatattacctccctcttccaaactcctactgtcctcacctcacccaccactgtaaaagtattacgtcgtgcattaaagaccagagcttgcctggtggatgtttctggccctttttccaccatgggaatttctcacctctagctctaagggcagctgaccacctgccagcccctctctggttccagaagattacccttcgcaccggcacaggagagatcttaaatggtctctgggctgctgggacatgcaggctctgagtggggactgcacccactcatgctgttcctgaggctgccctctccagtcccaggagccgtgtctagagttcctgaccagccaccttctgccagaactgcaggcctgcggctgggtcttaggctcccgctgccatttgggtaagccggtggctggtctcgtctgccgggggaagggtggggaggtgcaatgggatgggaggcaggatgcttgcccagaaaggtgctttccttcagacggtgcagggcctgggccagccttacaggtcagtagactagactcgactacttggggtcagtgattcttttgtaacgagtctttcatgatgtgactttgaggccccaacatgacagccactgggccaccgggacccaagaagacagccccctgccccatcttctggcacaggccatcccgagtgcatgtccctgttgcccactgcactgatcatgaagccaccggccactgccacgcatgttgcacctgtgccatcgtgctccctcctgatgggcaccgtggtggaggaagtcacccagctgtttctcagtcccagaggccggtggctggttttgaacttgtgttgactgttgatacttatttactgtataaatataatttatcatttgtaccatga

SEQ ID NO: 313857 - DNA, 4815 bp, Homo sapiens
ttgttggctggtgtgtgggtgtcaaactgagccagacgcggcggtggcggcggctccgcgggctacggtcgctcccgcctctcgagcgctgccggtggccgcagcggcgcacccacgccggcccggaggagcagagtgttcatttctgtgtcgggcacagtgctaagtgctgggtgctcactggtgatgaggcagatgaaggttaccaaacttgtggacaggagcctcatatcagagacgtggacctcactgtagcctggtcatggcttccagcttttcgaatctgaggctccaaaggaggaaatgaccattcagggatcttactccagcttgattacggagactgaaccttcatagggtgcgcacttaccaaggacaggaaggtttctctgtttgaagggctttaaacttataacaaagaaaataaaaatgacgacttcgtctatcagacggcagatgaaaaacatcgtgaacaattactcagaggcagaaatcaaagtccgggaagccacctccaatgacccgtggggcccgtccagttctctgatgaccgagattgccgacctgacctacaacgtggtggccttctcggagatcatgagcatggtgtggaagcggctgaatgaccatggcaagaactggcggcatgtgtacaaggcgctgaccctgctggactacctcatcaagacaggctccgaacgtgtggcccagcagtgccgggagaacatcttcgccatccagaccctgaaggacttccagtacattgaccgagatggcaaggaccagggcatcaatgtgcgtgagaagtcaaagcaactggtggctctcctcaaggacgaggaacggttgaaggctgagagggcccaggctctcaaaaccaaagagcgcatggcccaggttgccactggcatgggcagcaaccagatcacctttgggcgaggctccagccagcccaacctctccaccagccactcggagcaggagtatggcaaggccgggggctccccggcctcctaccatggctccacctccccgcgagtgtcctccgagctggagcaagcccggccccagactagtggagaagaggagcttcagctgcagctggcacttgccatgagcagagaagtggctgagcaggaagaacgcctcaggcggggtgatgacctcagattacagatggccctggaagaaagccgaagggacacagttaaaattccaaaaaagaaagagcatggctctctcccacagcagactacgctgttggatttaatggatgctctccccagctcgggccccgcggcccagaaagcagagccctggggcccgtcagcctccactaaccagaccaacccctggggcgggccagcggctcctgcgagtacttcagacccctggccatcgtttggtaccaagccagctgcctccattgacccatggggggtgcccactggagccaccgcacaatctgtccccaagaactcggacccctgggcagcttcacagcagcctgcctccagtgctgggaaaagagcttctgacgcgtggggcgcagtctccaccaccaagcccgtgtctgtctctgggtcctttgagctcttcagtaatctgaatggtacaattaaagatgacttttctgaatttgacaaccttcggacttcaaaaaaaacagccgaatctgtgacctctctgccatcccaaaacaatggaactaccagccctgacccctttgagtctcaacccctgactgtcgcctcaagcaagcccagcagtgcccggaaaacacctgagtccttcctgggccccaacgcggccctggtgaacctggactcactggtgaccaggcctgccccaccagcccagtccctcaaccctttcctggcaccaggtgctcccgccacctcggcccctgttaaccctttccaggtgaaccagccccagccgctgacactgaaccagcttcgggggagcccagtcctggggaccagcacatcctttgggcctggcccaggagtggagtccatggctgtggcctcgatgacctccgcggccccacagccagctctgggggccactggttcctctctgacaccactgggccctgcaatgatgaacatggtgggcagtgtgggtatacccccatcagcagcccaggccactggcacaaccaaccctttccttctctagtgcctgggcctgggacccacccagagcacctgtgctggaggatgccgagcagggactctcgtctgtgggacgggatccaagagtttggggattaggggtattagggcttttcagctccagcttcctgatgaaagggctgtctttacagccccaaccctcagaccctcgccttccaaggcaggcccctcagcctggcctgctctcaccacctcctccaaagcactgaggtcctggcagggctcctctgaggccttggacgaggacgtggagtcatcagtgttgcccttgcccctaacctcagcccgagggtctccaggatgttgcctggcccaggacttgggacagtggccttgtctttgtcctccccaccccccagccctagggacaccccaggcagtcctgggtgtggacacgatgaagcaccggctccataagacaccttttggggaagtggttgtgcatattttatttttctttgactcgtgtgagttcaaagtaaacaccaccaccgtggacaactcttgaattaaatccactagagcgagctttaaaactaatctgagcataacccccaacgtggctctatgcttgtgtacctttgcacatattttgtttagtacagtttcatatttgagtttgcagaattatctaatagtctttttttggctaatatttttataacgtggttcttatttaactgtctagttttgatagaatttaccaggtctggctgaatgaagatgttggcacgtgtcattttagtggtttaaatcctcttatttatggttttaactctaagaaaattttaaaaggaagagatgtttggatgacaaaaaaatgccttattgaaaaactaaagcaaattctttataggaagaaaatatgggaatttgattacacatagatgatgatgtttatttaaaaaaaaaacaacagcaacaaaaaatcctagcctccagttgccttttcctttctttagctcctgtttttggtgaattactaaactgattgactttcagcctttttggctagatcctgagaggctatttttcttacgaatataccaacatcctgaaagttaaagaaaaaaatctaatgtatgaatgtgactcaccaatttttatcaactaattccttttttttattaaaggcatgcagggattaacaggacttctgtttacaatggaaatctgaaatggaagaaacatctttaaccttgtgtgtctgtgatctcctctgtcttaatccacgctcaggctaaagatggggataatgtggaaatggcagttgtcccgagggcgtggggtggggggtgcttctgtgcccacgggtccctgggcaacagtccctaggctaagacaggggtggggggctaagggaccagggctggccctgatccacctacctgctaactccagatattatttttaagttggagacctaaaaataattctcttgtattttggagatgaagaaaaaagtcattcacctgggagggatttttaacaaacatgcactaatattacctccctcttccaaactcctactgtcctcacctcacccaccactgtaaaagtattacgtcgtgcattaaagaccagaaaagacttgcttttacccagggaggggacattcccccaatcctgtgtctgggcagcttgcctggtggatgtttctggccctttttccaccatgggaatttctcacctctagctctaagggcagctgaccacctgccagcccctctctggttccagaagattacccttcgcaccggcacaggagagatcttaaatggtctctgggctgctgggacatgcaggctctgagtggggactgcacccactcatgctgttcctgaggctgccctctccagtcccaggagccgtgtctagagttcctgaccagccaccttctgccagaactgcaggcctgcggctgggtcttaggctcccgctgccatttgggtaagccggtggctggtctcgtctgccgggggaagggtggggaggtgcaatgggatgggaggcaggatgcttgcccagaaaggtgctttccttcagacggtgcagggcctgggccagccttacaggtcagtagactagactcgactacttggggtcagtgattcttttgtaacgagtctttcatgatgtgactttgaggccccaacatgacagccactgggccaccgggacccaagaagacagccccctgccccatcttctggcacaggccatcccgagtgcatgtccctgttgcccactgcactgatcatgaagccaccggccactgccacgcatgttgcacctgtgccatcgtgctccctcctgatgggcaccgtggtggaggaagtcacccagctgtttctcagtcccagaggccggtggctggttttgaacttgtgttgactgttgatacttatttactgtataaatataatttatcatttgtaccatgatgcggtttctggctgtgtccttctcccaccccatcttcatcagtcctgtgccactggagaggtgggagatgagggagccgattcttgtggagcttggtctgcagttattgaggccaccagcctggtcctagtgcccgcgtgagctgggcatttggttgcccctgaacctc

SEQ ID NO: 313858 - DNA, 4549 bp, Homo sapiens
ttgttggctggtgtgtgggtgtcaaactgagccagacgcggcggtggcggcggctccgcgggctacggtcgctcccgcctctcgagcgctgccggtggccgcagcggcgcacccacgccggcccggaggagcagagtgttcatttctgtgtcgggcacagtgctaagtgctgggtgctcactggtgatgaggcagatgaaggttaccaaacttgtggacaggagcctcatatcagagacgtggacctcactgtagcctggtcatggcttccagcttttcgaatctgaggctccaaaggaggaaatgaccattcagggatcttactccagcttgattacggagactgaaccttcatagggtgcgcacttaccaaggacaggaaggtttctctgtttgaagggctttaaacttataacaaagaaaataaaaatgacgacttcgtctatcagacggcagatgaaaaacatcgtgaacaattactcagaggcagaaatcaaagtccgggaagccacctccaatgacccgtggggcccgtccagttctctgatgaccgagattgccgacctgacctacaacgtggtggccttctcggagatcatgagcatggtgtggaagcggctgaatgaccatggcaagaactggcggcatgtgtacaaggcgctgaccctgctggactacctcatcaagacaggctccgaacgtgtggcccagcagtgccgggagaacatcttcgccatccagaccctgaaggacttccagtacattgaccgagatggcaaggaccagggcatcaatgtgcgtgagaagtcaaagcaactggtggctctcctcaaggacgaggaacggttgaaggctgagagggcccaggctctcaaaaccaaagagcgcatggcccaggttgccactggcatgggcagcaaccagatcacctttgggcgaggctccagccagcccaacctctccaccagccactcggagcaggagtatggcaaggccgggggctccccggcctcctaccatggctccacctccccgcgagtgtcctccgagctggagcaagcccggccccagactagtggagaagaggagcttcagctgcagctggcacttgccatgagcagagaagtggctgagcaggaagaacgcctcaggcggggtgatgacctcagattacagatggccctggaagaaagccgaagggacacagttaaaattccaaaaaagaaagagcatggctctctcccacagcagactacgctgttggatttaatggatgctctccccagctcgggccccgcggcccagaaagcagagccctggggcccgtcagcctccactaaccagaccaacccctggggcgggccagcggctcctgcgagtacttcagacccctggccatcgtttggtaccaagccagctgcctccattgacccatggggggtgcccactggagccaccgcacaatctgtccccaagaactcggacccctgggcagcttcacagcagcctgcctccagtgctgggaaaagagcttctgacgcgtggggcgcagtctccaccaccaagcccgtgtctgtctctgggtcctttgagctcttcagtaatctgaatggtacaattaaagatgacttttctgaatttgacaaccttcggacttcaaaaaaaacagccgaatctgtgacctctctgccatcccaaaacaatggaactaccagccctgacccctttgagtctcaacccctgactgtcgcctcaagcaagcccagcagtgcccggaaaacacctgagtccttcctgggccccaacgcggccctggtgaacctggactcactggtgaccaggcctgccccaccagcccagtccctcaaccctttcctggcaccaggtgctcccgccacctcggcccctgttaaccctttccaggtgaaccagccccagccgctgacactgaaccagcttcgggggagcccagtcctggggaccagcacatcctttgggcctggcccaggagtggagtccatggctgtggcctcgatgacctccgcggccccacagccagctctgggggccactggttcctctctgacaccactgggccctgcaatgatgaacatggtgggcagtgtgggtatacccccatcagcagcccaggccactggcacaaccaaccctttccttctctagtgcctgggcctgggacccacccagagcacctgtgctggaggatgccgagcagggactctcgtctgtgggacgggatccaagagtttggggattaggggtattagggcttttcagctccagcttcctgatgaaagggctgtctttacagccccaaccctcagaccctcgccttccaaggcaggcccctcagcctggcctgctctcaccacctcctccaaagcactgaggtcctggcagggctcctctgaggccttggacgaggacgtggagtcatcagtgttgcccttgcccctaacctcagcccgagggtctccaggatgttgcctggcccaggacttgggacagtggccttgtctttgtcctccccaccccccagccctagggacaccccaggcagtcctgggtgtggacacgatgaagcaccggctccataagacaccttttggggaagtggttgtgcatattttatttttctttgactcgtgtgagttcaaagtaaacaccaccaccgtggacaactcttgaattaaatccactagagcgagctttaaaactaatctgagcataacccccaacgtggctctatgcttgtgtacctttgcacatattttgtttagtacagtttcatatttgagtttgcagaattatctaatagtctttttttggctaatatttttataacgtggttcttatttaactgtctagttttgatagaatttaccaggtctggctgaatgaagatgttggcacgtgtcattttagtggtttaaatcctcttatttatggttttaactctaagaaaattttaaaaggaagagatgtttggatgacaaaaaaatgccttattgaaaaactaaagcaaattctttataggaagaaaatatgggaatttgattacacatagatgatgatgtttatttaaaaaaaaaacaacagcaacaaaaaatcctagcctccagttgccttttcctttctttagctcctgtttttggtgaattactaaactgattgactttcagcctttttggctagatcctgagaggctatttttcttacgaatataccaacatcctgaaagttaaagaaaaaaatctaatgtatgaatgtgactcaccaatttttatcaactaattccttttttttattaaaggcatgcagggattaacaggacttctgtttacaatggaaatctgaaatggaagaaacatctttaaccttgtgtgtctgtgatctcctctgtcttaatccacgctcaggctaaagatggggataatgtggaaatggcagttgtcccgagggcgtggggtggggggtgcttctgtgcccacgggtccctgggcaacagtccctaggctaagacaggggtggggggctaagggaccagggctggccctgatccacctacctgctaactccagatattatttttaagttggagacctaaaaataattctcttgtattttggagatgaagaaaaaagtcattcacctgggagggatttttaacaaacatgcactaatattacctccctcttccaaactcctactgtcctcacctcacccaccactgtaaaagtattacgtcgtgcattaaagaccagaaaagacttgcttttacccagggaggggacattcccccaatcctgtgtctgggcagcttgcctggtggatgtttctggccctttttccaccatgggaatttctcacctctagctctaagggcagctgaccacctgccagcccctctctggttccagaagattacccttcgcaccggcacaggagagatcttaaatggtctctgggctgctgggacatgcaggctctgagtggggactgcacccactcatgctgttcctgaggctgccctctccagtcccaggagccgtgtctagagttcctgaccagccaccttctgccagaactgcaggcctgcggctgggtcttaggctcccgctgccatttgggtaagccggtggctggtctcgtctgccgggggaagggtggggaggtgcaatgggatgggaggcaggatgcttgcccagaaaggtgctttccttcagacggtgcagggcctgggccagccttacaggtcagtagactagactcgactacttggggtcagtgattcttttgtaacgagtctttcatgatgtgactttgaggccccaacatgacagatgaagccaccggccactgccacgcatgttgcacctgtgccatcgtgctccctcctgatgggcaccgtggtggaggaagtcacccagctgtttctcagtcccagaggccggtggctggttttgaacttgtgttgactgttgatacttatttactgtataaatataatttatcatttgtaccatga

SEQ ID NO: 313859 - DNA, 3938 bp, Homo sapiens
ttgttggctggtgtgtgggtgtcaaactgagccagacgcggcggtggcggcggctccgcgggctacggtcgctcccgcctctcgagcgctgccggtggccgcagcggcgcacccacgccggcccggaggagcagagtgttcatttctgtgtcgggcacagtgctaagtgctgggtgctcactggtgatgaggcagatgaaggttaccaaacttgtggacaggagcctcatatcagagacgtggacctcactgtagcctggtcatggcttccagcttttcgaatctgaggctccaaaggaggaaatgaccattcagggatcttactccagcttgattacggagactgaaccttcatagggtgcgcacttaccaaggacaggaaggtttctctgtttgaagggctttaaacttataacaaagaaaataaaaatgacgacttcgtctatcagacggcagatgaaaaacatcgtgaacaattactcagaggcagaaatcaaagtccgggaagccacctccaatgacccgtggggcccgtccagttctctgatgaccgagattgccgacctgacctacaacgtggtggccttctcggagatcatgagcatggtgtggaagcggctgaatgaccatggcaagaactggcggcatgtgtacaaggcgctgaccctgctggactacctcatcaagacaggctccgaacgtgtggcccagcagtgccgggagaacatcttcgccatccagaccctgaaggacttccagtacattgaccgagatggcaaggaccagggcatcaatgtgcgtgagaagtcaaagcaactggtggctctcctcaaggacgaggaacggttgaaggctgagagggcccaggctctcaaaaccaaagagcgcatggcccaggttgccactggcatgggcagcaaccagatcacctttgggcgaggctccagccagcccaacctctccaccagccactcggagcaggagtatggcaaggccgggggctccccggcctcctaccatggctccacctccccgcgagtgtcctccgagctggagcaagcccggccccagactagtggagaagaggagcttcagctgcagctggcacttgccatgagcagagaagtggctgagcaggaagaacgcctcaggcggggtgatgacctcagattacagatggccctggaagaaagccgaagggacacagttaaaattccaaaaaagaaagagcatggctctctcccacagcagactacgctgttggatttaatggatgctctccccagctcgggccccgcggcccagaaagcagagccctggggcccgtcagcctccactaaccagaccaacccctggggcgggccagcggctcctgcgagtacttcagacccctggccatcgtttggtaccaagccagctgcctccattgacccatggggggtgcccactggagccaccgcacaatctgtccccaagaactcggacccctgggcagcttcacagcagcctgcctccagtgctgggaaaagagcttctgacgcgtggggcgcagtctccaccaccaagcccgtgtctgtctctgggtcctttgagctcttcagtaatctgaatggtacaattaaagatgacttttctgaatttgacaaccttcggacttcaaaaaaaacagccgaatctgtgacctctctgccatcccaaaacaatggaactaccagccctgacccctttgagtctcaacccctgactgtcgcctcaagcaagcccagcagtgcccggaaaacacctgagtccttcctgggccccaacgcggccctggtgaacctggactcactggtgaccaggcctgccccaccagcccagtccctcaaccctttcctggcaccaggtgctcccgccacctcggcccctgttaaccctttccaggtgaaccagccccagccgctgacactgaaccagcttcgggggagcccagtcctggggaccagcacatcctttgggcctggcccaggagtggagtccatggctgtggcctcgatgacctccgcggccccacagccagctctgggggccactggttcctctctgacaccactgggccctgcaatgatgaacatggtgggcagtgtgggtatacccccatcagcagcccaggccactggcacaaccaaccctttccttctctagtgcctgggcctgggacccacccagagcacctgtgctggaggatgccgagcagggactctcgtctgtgggacgggatccaagagtttggggattaggggtattagggcttttcagctccagcttcctgatgaaagggctgtctttacagccccaaccctcagaccctcgccttccaaggcaggcccctcagcctggcctgctctcaccacctcctccaaagcactgaggtcctggcagggctcctctgaggccttggacgaggacgtggagtcatcagtgttgcccttgcccctaacctcagcccgagggtctccaggatgttgcctggcccaggacttgggacagtggccttgtctttgtcctccccaccccccagccctagggacaccccaggcagtcctgggtgtggacacgatgaagcaccggctccataagacaccttttggggaagtggttgtgcatattttatttttctttgactcgtgtgagttcaaagtaaacaccaccaccgtggacaactcttgaattaaatccactagagcgagctttaaaactaatctgagcataacccccaacgtggctctatgcttgtgtacctttgcacatattttgtttagtacagtttcatatttgagtttgcagaattatctaatagtctttttttggctaatatttttataacgtggttcttatttaactgtctagttttgatagaatttaccaggtctggctgaatgaagatgttggcacgtgtcattttagtggtttaaatcctcttatttatggttttaactctaagaaaattttaaaaggaagagatgtttggatgacaaaaaaatgccttattgaaaaactaaagcaaattctttataggaagaaaatatgggaatttgattacacatagatgatgatgtttatttaaaaaaaaaacaacagcaacaaaaaatcctagcctccagttgccttttcctttctttagctcctgtttttggtgaattactaaactgattgactttcagcctttttggctagatcctgagaggctatttttcttacgaatataccaacatcctgaaagttaaagaaaaaaatctaatgtatgaatgtgactcaccaatttttatcaactaattccttttttttattaaaggcatgcagggattaacaggacttctgtttacaatggaaatctgaaatggaagaaacatctttaaccttgtgtgtctgtgatctcctctgtcttaatccacgctcaggctaaagatggggataatgtggaaatggcagttgtcccgagggcgtggggtggggggtgcttctgtgcccacgggtccctgggcaacagtccctaggctaagacaggggtggggggctaagggaccagggctggccctgatccacctacctgctaactccagatattatttttaagttggagacctaaaaataattctcttgtattttggagatgaagaaaaaagtcattcacctgggagggatttttaacaaacatgcactaatattacctccctcttccaaactcctactgtcctcacctcacccaccactatgaagccaccggccactgccacgcatgttgcacctgtgccatcgtgctccctcctgatgggcaccgtggtggaggaagtcacccagctgtttctcagtcccagaggccggtggctggttttgaacttgtgttgactgttgatacttatttactgtataaatataatttatcatttgtaccatga

SEQ ID NO: 313860 - DNA, 3542 bp, Homo sapiens
tgtgcgctggtacctccctccaaattgagggggcttccacctgggtgttgagagagaagactgccctgggcccacagcctgtgggtcctgtcctcacccctggggggctgggcaggctggcctccaggcactccttctggtgacttcctacagaccctcatccaagcaaccagacccagcttgatgcacctccaccactgccagcacccctttgccttttggggtgagggtgttagaagcagtagcaggtgggcatcccacaccctgtcctgggaggccaggctccctgtctcccctcccagcgtgctggtgaccccaggctgtcttgcctctttggctctcagaattctcctccatgaggtagggtaagcggggagaggcccctgttgccagcccatcctgagggtgtgcactgggcagtggagttgccatgaagtcctgtgagatgcccccagtcattggcttctgtgtccacccagggtcctttgagctcttcagtaatctgaatggtacaattaaagatgacttttctgaatttgacaaccttcggacttcaaaaaaaacagccgaatctgtgacctctctgccatcccaaaacaatggaactaccagccctgacccctttgagtctcaacccctgactgtcgcctcaagcaagcccagcagtgcccggaaaacacctgagtccttcctgggccccaacgcggccctggtgaacctggactcactggtgaccaggcctgccccaccagcccagtccctcaaccctttcctggcaccaggtgctcccgccacctcggcccctgttaaccctttccaggtgaaccagccccagccgctgacactgaaccagcttcgggggagcccagtcctggggaccagcacatcctttgggcctggcccaggagtggagtccatggctgtggcctcgatgacctccgcggccccacagccagctctgggggccactggttcctctctgacaccactgggccctgcaatgatgaacatggtgggcagtgtgggtatacccccatcagcagcccaggccactggcacaaccaaccctttccttctctagtgcctgggcctgggacccacccagagcacctgtgctggaggatgccgagcagggactctcgtctgtgggacgggatccaagagtttggggattaggggtattagggcttttcagctccagcttcctgatgaaagggctgtctttacagccccaaccctcagaccctcgccttccaaggcaggcccctcagcctggcctgctctcaccacctcctccaaagcactgaggtcctggcagggctcctctgaggccttggacgaggacgtggagtcatcagtgttgcccttgcccctaacctcagcccgagggtctccaggatgttgcctggcccaggacttgggacagtggccttgtctttgtcctccccaccccccagccctagggacaccccaggcagtcctgggtgtggacacgatgaagcaccggctccataagacaccttttggggaagtggttgtgcatattttatttttctttgactcgtgtgagttcaaagtaaacaccaccaccgtggacaactcttgaattaaatccactagagcgagctttaaaactaatctgagcataacccccaacgtggctctatgcttgtgtacctttgcacatattttgtttagtacagtttcatatttgagtttgcagaattatctaatagtctttttttggctaatatttttataacgtggttcttatttaactgtctagttttgatagaatttaccaggtctggctgaatgaagatgttggcacgtgtcattttagtggtttaaatcctcttatttatggttttaactctaagaaaattttaaaaggaagagatgtttggatgacaaaaaaatgccttattgaaaaactaaagcaaattctttataggaagaaaatatgggaatttgattacacatagatgatgatgtttatttaaaaaaaaaacaacagcaacaaaaaatcctagcctccagttgccttttcctttctttagctcctgtttttggtgaattactaaactgattgactttcagcctttttggctagatcctgagaggctatttttcttacgaatataccaacatcctgaaagttaaagaaaaaaatctaatgtatgaatgtgactcaccaatttttatcaactaattccttttttttattaaaggcatgcagggattaacaggacttctgtttacaatggaaatctgaaatggaagaaacatctttaaccttgtgtgtctgtgatctcctctgtcttaatccacgctcaggctaaagatggggataatgtggaaatggcagttgtcccgagggcgtggggtggggggtgcttctgtgcccacgggtccctgggcaacagtccctaggctaagacaggggtggggggctaagggaccagggctggccctgatccacctacctgctaactccagatattatttttaagttggagacctaaaaataattctcttgtattttggagatgaagaaaaaagtcattcacctgggagggatttttaacaaacatgcactaatattacctccctcttccaaactcctactgtcctcacctcacccaccactgtaaaagtattacgtcgtgcattaaagaccagaaaagacttgcttttacccagggaggggacattcccccaatcctgtgtctgggcagcttgcctggtggatgtttctggccctttttccaccatgggaatttctcacctctagctctaagggcagctgaccacctgccagcccctctctggttccagaagattacccttcgcaccggcacaggagagatcttaaatggtctctgggctgctgggacatgcaggctctgagtggggactgcacccactcatgctgttcctgaggctgccctctccagtcccaggagccgtgtctagagttcctgaccagccaccttctgccagaactgcaggcctgcggctgggtcttaggctcccgctgccatttgggtaagccggtggctggtctcgtctgccgggggaagggtggggaggtgcaatgggatgggaggcaggatgcttgcccagaaaggtgctttccttcagacggtgcagggcctgggccagccttacaggtcagtagactagactcgactacttggggtcagtgattcttttgtaacgagtctttcatgatgtgactttgaggccccaacatgacagccactgggccaccgggacccaagaagacagccccctgccccatcttctggcacaggccatcccgagtgcatgtccctgttgcccactgcactgatcatgaagccaccggccactgccacgcatgttgcacctgtgccatcgtgctccctcctgatgggcaccgtggtggaggaagtcacccagctgtttctcagtcccagaggccggtggctggttttgaacttgtgttgactgttgatacttatttactgtataaatataatttatcatttgtaccatga

SEQ ID NO: 313861 - DNA, 2382 bp, Homo sapiens
ttgttggctggtgtgtgggtgtcaaactgagccagacgcggcggtggcggcggctccgcgggctacggtcgctcccgcctctcgagcgctgccggtggccgcagcggcgcacccacgccggcccggaggagcagagtgttcatttctgtgtcgggcacagtgctaagtgctgggtgctcactggtgatgaggcagatgaaggttaccaaacttgtggacaggagcctcatatcagagacgtggacctcactgtagcctggtcatggcttccagcttttcgaatctgaggctccaaaggaggaaatgaccattcagggatcttactccagcttgattacggagactgaaccttcatagggtgcgcacttaccaaggacaggaaggtttctctgtttgaagggctttaaacttataacaaagaaaataaaaatgacgacttcgtctatcagacggcagatgaaaaacatcgtgaacaattactcagaggcagaaatcaaagtccgggaagccacctccaatgacccgtggggcccgtccagttctctgatgaccgagattgccgacctgacctacaacgtggtggccttctcggagatcatgagcatggtgtggaagcggctgaatgaccatggcaagaactggcggcatgtgtacaaggcgctgaccctgctggactacctcatcaagacaggctccgaacgtgtggcccagcagtgccgggagaacatcttcgccatccagaccctgaaggacttccagtacattgaccgagatggcaaggaccagggcatcaatgtgcgtgagaagtcaaagcaactggtggctctcctcaaggacgaggaacggttgaaggctgagagggcccaggctctcaaaaccaaagagcgcatggcccaggttgccactggcatgggcagcaaccagatcacctttgggcgaggctccagccagcccaacctctccaccagccactcggagcaggagtatggcaaggccgggggctccccggcctcctaccatggctccacctccccgcgagtgtcctccgagctggagcaagcccggccccagactagtggagaagaggagcttcagctgcagctggcacttgccatgagcagagaagtggctgagcaggaagaacgcctcaggcggggtgatgacctcagattacagatggccctggaagaaagccgaagggacacagttaaaattccaaaaaagaaagagcatggctctctcccacagcagactacgctgttggatttaatggatgctctccccagctcgggccccgcggcccagaaagcagagccctggggcccgtcagcctccactaaccagaccaacccctggggcgggccagcggctcctgcgagtacttcagacccctggccatcgtttggtaccaagccagctgcctccattgacccatggggggtgcccactggagccaccgcacaatctgtccccaagaactcggacccctgggcagcttcacagcagcctgcctccagtgctgggaaaagagcttctgacgcgtggggcgcagtctccaccaccaagcccgtgtctgtctctgggtcctttgagctcttcagtaatctgaatggtacaattaaagatgacttttctgaatttgacaaccttcggacttcaaaaaaaacaggtatgtacaggtgatgatggtttccataatcctccgtgcatttgaccagctgagttattgcagaaataataatcagctttcaaaacccttcagcttcctgcattttctttgtattttgatcttgggagcctgaagcttctaattctaagaattcatacatcaatagttaaaaatcacaaggtagagtcccccaggactatgtctccaggttaggatccccaaagcttcctgcagattccacagccccggcctcctcagctcagagtgggcctcacctctggcctgatccagcatttccattcaccctcctcctgccaatttccactcctcagagggcctccttttcccagacaaccacctttgggcatcagtggggccagcctctgccctgtgttgtcacctcccaggtgaccgctccagcccagcagacccacagtccagtctccagacctgttttccttccctgtgtgcctctgggatggaaggatatcaggtggatgcagtgggccaagtggccagtgggccaaggtgggcctggaggggtggagggagaaggcctgggatgcattcttcacacaccctgtttggactggggtgtgacagcctctgtccatctctgggccacatctcccagccacacatggcaacttctctctttttttctttcctgtcttggcttctgctgcttgcctcccccaatttccctaccacct

SEQ ID NO: 313862 - DNA, 607 bp, Homo sapiens
aaaaaattataacactatttagcatacatggcaagatctctgagctcattatatttaaatatttattatttggaacttttgcagtgtaggaaaaattgaagtgctattgatgttcgggtaacaaatttttaatgaaactttagaaatgattatagtgctgtttgtacttaggcaggtaggaagaaaattattttttaatactgatacttgttttgttttaataggtatcagcagatgttgcacacaaacttggtataccttgctacaatagcagattctaatcaaaatatgcagtctcttttaccagcagtgtgattcaagtaaggtgaaggaacacatgcttagagctgtggaacattttgaagattagcaggttgtattacatttgtaacatttactaaatttttagcataggtaactttgttatggttagaacaccaaggactacaaaaagccatacaaaaacctactgtcacttctgtcttctacctgctttttatgcaataaaagccaatataaatatataccttgctgttttctacacaagtagaacttgccgtgtaccctgttctgtaccttgttttttaattacagtaaaaaaaagaaa

SEQ ID NO: 313863 - DNA, 291 bp, Homo sapiens
cacgagagcgttagtgcgacagagggttatttaagcataatctgaaaacatctagcccaaaggtaagttgctattttcatcacagttgccaccgtgcctggccagaataggttttttctttcaacttgatcagtagaaaatggacatcaagtttgaacagataaatcatggacagccttattgtgattgaaatgcttgtaggttctgtgccaattttccaccactgtgtactttgttgctatttaaaactgtatcaactctaacggaagaataaattatttgtgattttaa

SEQ ID NO: 313864 - DNA, 568 bp, Homo sapiens
ataaaagtctgacctgttaaataaaaattgattgaggctatgtagtcttacattttatatattgtttgaaattaagttgcattttttttggtaacatcatatttgacattctgagcagagcccttgggtagcatgtgattagctgtttcttccacacgctttagtaaagatgataatattagtcttcaggttcagcaactgtcctggcaaagcatctgttaaggtacttctctgactaacatttggtcttacagagtttcctttttacaggtgtgattcaagtaaggtgaaggaacacatgcttagagctgtggaacattttgaagattagcaggttgtattacatttgtaacatttactaaatttttagcataggtaactttgttatggttagaacaccaaggactacaaaaagccatacaaaaacctactgtcacttctgtcttctacctgctttttatgcaataaaagccaatataaatatataccttgctgttttctacacaagtagaacttgccgtgtaccctgttctgtaccttgttttttaattacagtaaaaaaaagaaa

SEQ ID NO: 313865 - DNA, 3344 bp, Homo sapiens
cgagaggccggcgtctctcccccagtttgccgttcacccggagcgctcgggacttgccgatagtggtgacggcggcaacatgtctgtggctttcgcggccccgaggcagcgaggcaagggggagatcactcccgctgcgattcagaagatgttggatgacaataaccatcttattcagtgtataatggactctcagaataaaggaaagacctcagagtgttctcagtatcagcagatgttgcacacaaacttggtataccttgctacaatagcagattctaatcaaaatatgcagtctcttttaccagcaccacccacacagaatatgcctatgggtcctggagggatgaatcagagcggccctcccccacctccacgctctcacaacatgccttcagatggaatggtaggtgggggtcctcctgcaccgcacatgcagaaccagatgaacggccagatgcctgggcctaaccatatgcctatgcagggacctggacccaatcaactcaatatgacaaacagttccatgaatatgccttcaagtagccatggatccatgggaggttacaaccattctgtgccatcatcacagagcatgccagtacagaatcagatgacaatgagtcagggacaaccaatgggaaactatggtcccagaccaaatatgagtatgcagccaaaccaaggtccaatgatgcatcagcagcctccttctcagcaatacaatatgccacagggaggcggacagcattaccaaggacagcagccacctatgggaatgatgggtcaagttaaccaaggcaatcatatgatgggtcagagacagattcctccctatagacctcctcaacagggcccaccacagcagtactcaggccaggaagactattacggggaccaatacagtcatggtggacaaggtcctccagaaggcatgaaccagcaatattaccctgatggaaattcacagtatggccaacagcaagatgcataccagggaccacctccacaacagggatatccaccccagcagcagcagtacccagggcagcaaggttacccaggacagcagcagggctacggtccttcacagggtggtccaggtcctcagtatcctaactacccacagggacaaggtcagcagtatggaggatatagaccaacacagcctggaccaccacagccaccccagcagaggccttatggatatgaccagggacagtatggaaattaccagcagtgaaaaagtacttacattccagtagccagtatctattagcagccatattgtcacctcagcactgtggacacctccctgtgaagagatccttccattccatctagtttttggaaaaaccttgtggataagtggctgtttcatcagtaagcagcctttgtggtttagttataaaaggctttagtagctcaaaaatactcttgatttcacatttctactctagatggcaacattggacagaaaatgcaatgacataaccaatttgtaatgattttggaactgtgtttcaaatggactgttacagactgaaaggtgtgaacagctttgtatgtttatgaagggtaagggaatttaatacttttccacagatttttttgtaaggggaagagggaaatgtacactttttacagcagcaatattttgtatattatgtttatttcatgtggtgaatatgcaaggcggtacactacgcactggacagcatcagaaatcctctgttaatgtggactggagcatggtagatgcttgattgttttggtctcaaaatggtgtgctataaagataaaggtgaggggaagacaaagcacaccatatgtccactgttctgttctcatagaggaaattcaaatcccttttatctattagataatcaagggcactgtgatacagttttgagtaaaaagacattttttaaaagccttccagttttgtggattaaacctttttataaagatcatttataatactgttttaaaatgtgaggcaataagaattactttgtgttggatctgaggaggctttggtaaaacagtttcatctaaatgaaagtggtaatcctcttctaaaatagcaataactgaaaatgaaagtgttaattttaccttgtttgagttatcagggaacttagtaagtaatatcaaagcattttataaatgatatcaaagaagagtcaacattgatccagtcattttattttgtaatattgagggataattggttattaaactgaatagttcaggagactttacaaacctttgtttcaactttcttatctggaaataatatcatttataaagggacacttttatgtttttcccttttttatgttggttgatataacacaaagagatatttaggaaaatgcttattgatgaggtttattctatctgtttttaaagcaccgaggttgcattctagataaccttgtttattagcatggcatattttaatcattatttgagactgtcctgtgcctgattattttagctaaattcagggagattgcgtggggcaggaaagcatgcattgaaaaatttctaaccacggttatttaagcataatctgaaaacatctagcccaaaggtaagttgctattttcatcacagttgcctatgcccagggaataagatgtattctttataattgaattggtttttcccacgtctaactggaaacaaaacagaaggggcgtcataaatttgaataagcagaacatactgttctcaacatactgtaatcaaaaggaggaatttcagtgggtctctgtgtgtgtatgagagagagagtgtgtgtttgtgtgtttcaaggtcagaacaggtttttttgtttttgttttttgttctttgtttttttttttgagatggagtcttgctcttgtcgcccaggctggagtgcagtggcgcaatctcagctcactgcaacctccgcctcccaggttcaagcagttctcctgcctcagcctcctgagtagctgggatgacaggcacccgccaccacacccagctaatttttgtacttttagtagagacgaggtttcgccatgttggccaggctggtctcgaactcctgacctcaggtgatccacccgcctcggccttccaaagtgctgggattacaggcgtgagccaccgtgcctggccagaataggttttttctttcaacttgatcagtagaaaatggacatcaagtttgaacagataaatcatggacagccttattgtgattgaaatgcttgtaggttctgtgccaattttccaccactgtgtactttgttgctatttaaaactgtatcaactctaacggaagaataaattatttgtgattttaa

SEQ ID NO: 313866 - DNA, 3437 bp, Homo sapiens
cgagaggccggcgtctctcccccagtttgccgttcacccggagcgctcgggacttgccgatagtggtgacggcggcaacatgtctgtggctttcgcggccccgaggcagcgaggcaagggggagatcactcccgctgcgattcagaagatgttggatgacaataaccatcttattcagtgtataatggactctcagaataaaggaaagacctcagagtgttctcagtatcagcagatgttgcacacaaacttggtataccttgctacaatagcagattctaatcaaaatatgcagtctcttttaccagcaccacccacacagaatatgcctatgggtcctggagggatgaatcagagcggccctcccccacctccacgctctcacaacatgccttcagatggaatggtaggtgggggtcctcctgcaccgcacatgcagaaccagatgaacggccagatgcctgggcctaaccatatgcctatgcagggacctggacccaatcaactcaatatgacaaacagttccatgaatatgccttcaagtagccatggatccatgggaggttacaaccattctgtgccatcatcacagagcatgccagtacagaatcagatgacaatgagtcagggacaaccaatgggaaactatggtcccagaccaaatatgagtatgcagccaaaccaaggtccaatgatgcatcagcagcctccttctcagcaatacaatatgccacagggaggcggacagcattaccaaggacagcagccacctatgggaatgatgggtcaagttaaccaaggcaatcatatgatgggtcagagacagattcctccctatagacctcctcaacagggcccaccacagcagtactcaggccaggaagactattacggggaccaatacagtcatggtggacaaggtcctccagaaggcatgaaccagcaatattaccctgatggtcataatgattacggttatcagcaaccgtcgtatcctgaacaaggctacgataggccttatgaggattcctcacaacattactacgaaggaggaaattcacagtatggccaacagcaagatgcataccagggaccacctccacaacagggatatccaccccagcagcagcagtacccagggcagcaaggttacccaggacagcagcagggctacggtccttcacagggtggtccaggtcctcagtatcctaactacccacagggacaaggtcagcagtatggaggatatagaccaacacagcctggaccaccacagccaccccagcagaggccttatggatatgaccagggacagtatggaaattaccagcagtgaaaaagtacttacattccagtagccagtatctattagcagccatattgtcacctcagcactgtggacacctccctgtgaagagatccttccattccatctagtttttggaaaaaccttgtggataagtggctgtttcatcagtaagcagcctttgtggtttagttataaaaggctttagtagctcaaaaatactcttgatttcacatttctactctagatggcaacattggacagaaaatgcaatgacataaccaatttgtaatgattttggaactgtgtttcaaatggactgttacagactgaaaggtgtgaacagctttgtatgtttatgaagggtaagggaatttaatacttttccacagatttttttgtaaggggaagagggaaatgtacactttttacagcagcaatattttgtatattatgtttatttcatgtggtgaatatgcaaggcggtacactacgcactggacagcatcagaaatcctctgttaatgtggactggagcatggtagatgcttgattgttttggtctcaaaatggtgtgctataaagataaaggtgaggggaagacaaagcacaccatatgtccactgttctgttctcatagaggaaattcaaatcccttttatctattagataatcaagggcactgtgatacagttttgagtaaaaagacattttttaaaagccttccagttttgtggattaaacctttttataaagatcatttataatactgttttaaaatgtgaggcaataagaattactttgtgttggatctgaggaggctttggtaaaacagtttcatctaaatgaaagtggtaatcctcttctaaaatagcaataactgaaaatgaaagtgttaattttaccttgtttgagttatcagggaacttagtaagtaatatcaaagcattttataaatgatatcaaagaagagtcaacattgatccagtcattttattttgtaatattgagggataattggttattaaactgaatagttcaggagactttacaaacctttgtttcaactttcttatctggaaataatatcatttataaagggacacttttatgtttttcccttttttatgttggttgatataacacaaagagatatttaggaaaatgcttattgatgaggtttattctatctgtttttaaagcaccgaggttgcattctagataaccttgtttattagcatggcatattttaatcattatttgagactgtcctgtgcctgattattttagctaaattcagggagattgcgtggggcaggaaagcatgcattgaaaaatttctaaccacggttatttaagcataatctgaaaacatctagcccaaaggtaagttgctattttcatcacagttgcctatgcccagggaataagatgtattctttataattgaattggtttttcccacgtctaactggaaacaaaacagaaggggcgtcataaatttgaataagcagaacatactgttctcaacatactgtaatcaaaaggaggaatttcagtgggtctctgtgtgtgtatgagagagagagtgtgtgtttgtgtgtttcaaggtcagaacaggtttttttgtttttgttttttgttctttgtttttttttttgagatggagtcttgctcttgtcgcccaggctggagtgcagtggcgcaatctcagctcactgcaacctccgcctcccaggttcaagcagttctcctgcctcagcctcctgagtagctgggatgacaggcacccgccaccacacccagctaatttttgtacttttagtagagacgaggtttcgccatgttggccaggctggtctcgaactcctgacctcaggtgatccacccgcctcggccttccaaagtgctgggattacaggcgtgagccaccgtgcctggccagaataggttttttctttcaacttgatcagtagaaaatggacatcaagtttgaacagataaatcatggacagccttattgtgattgaaatgcttgtaggttctgtgccaattttccaccactgtgtactttgttgctatttaaaactgtatcaactctaacggaagaataaattatttgtgattttaa

SEQ ID NO: 313867 - DNA, 2763 bp, Homo sapiens
cgagaggccggcgtctctcccccagtttgccgttcacccggagcgctcgggacttgccgatagtggtgacggcggcaacatgtctgtggctttcgcggccccgaggcagcgaggcaagggggagatcactcccgctgcgattcagaagatgttggatgacaataaccatcttattcagtgtataatggactctcagaataaaggaaagacctcagagtgttctcagtatcagcagatgttgcacacaaacttggtataccttgctacaatagcagattctaatcaaaatatgcagtctcttttaccagcaccacccacacagaatatgcctatgggtcctggagggatgaatcagagcggccctcccccacctccacgctctcacaacatgccttcagatggaatggtaggtgggggtcctcctgcaccgcacatgcagaaccagatgaacggccagatgcctgggcctaaccatatgcctatgcagggacctggacccaatcaactcaatatgacaaacagttccatgaatatgccttcaagtagccatggatccatgggaggttacaaccattctgtgccatcatcacagagcatgccagtacagaatcagatgacaatgagtcagggacaaccaatgggaaactatggtcccagaccaaatatgagtatgcagccaaaccaaggtccaatgatgcatcagcagcctccttctcagcaatacaatatgccacagggaggcggacagcattaccaaggacagcagccacctatgggaatgatgggtcaagttaaccaaggcaatcatatgatgggtcagagacagattcctccctatagacctcctcaacagggcccaccacagcagtactcaggccaggaagactattacggggaccaatacagtcatggtggacaaggtcctccagaaggcatgaaccagcaatattaccctgatggtcataatgattacggttatcagcaaccgtcgtatcctgaacaaggctacgataggccttatgaggattcctcacaacattactacgaaggaggaaattcacagtatggccaacagcaagatgcataccagggaccacctccacaacagggatatccaccccagcagcagcagtacccagggcagcaaggttacccaggacagcagcagggctacggtccttcacagggtggtccaggtcctcagtatcctaactacccacagggacaaggtcagcagtatggaggatatagaccaacacagcctggaccaccacagccaccccagcagaggccttatggatatgaccagggacagtatggaaattaccagcagtgaaaaagtacttacattccagtagccagtatctattagcagccatattgtcacctcagcactgtggacacctccctgtgaagagatccttccattccatctagtttttggaaaaaccttgtggataagtggctgtttcatcagtaagcagcctttgtggtttagttataaaaggctttagtagctcaaaaatactcttgatttcacatttctactctagatggcaacattggacagaaaatgcaatgacataaccaatttgtaatgattttggaactgtgtttcaaatggactgttacagactgaaaggtgtgaacagctttgtatgtttatgaagggtaagggaatttaatacttttccacagatttttttgtaaggggaagagggaaatgtacactttttacagcagcaatattttgtatattatgtttatttcatgtggtgaatatgcaaggcggtacactacgcactggacagcatcagaaatcctctgttaatgtggactggagcatggtagatgcttgattgttttggtctcaaaatggtgtgctataaagataaaggtgaggggaagacaaagcacaccatatgtccactgttctgttctcatagaggaaattcaaatcccttttatctattagataatcaagggcactgtgatacagttttgagtaaaaagacattttttaaaagccttccagttttgtggattaaacctttttataaagatcatttataatactgttttaaaatgtgaggcaataagaattactttgtgttggatctgaggaggctttggtaaaacagtttcatctaaatgaaagtggtaatcctcttctaaaatagcaataactgaaaatgaaagtgttaattttaccttgtttgagttatcagggaacttagtaagtaatatcaaagcattttataaatgatatcaaagaagagtcaacattgatccagtcattttattttgtaatattgagggataattggttattaaactgaatagttcaggagactttacaaacctttgtttcaactttcttatctggaaataatatcatttataaagggacacttttatgtttttcccttttttatgttggttgatataacacaaagagatatttaggaaaatgcttattgatgaggtttattctatctgtttttaaagcaccgaggttgcattctagataaccttgtttattagcatggcatattttaatcattatttgagactgtcctgtgccttagataatcaagggcactgtgatacagttttgagtaaaaagacattttttaaaagccttccagttttgtggattaaacctttttataaagatcatttataatactgttttaaaatgtgaggcaataagaattactttgtgttggatctgaggaggctttggtaaaacagtttcatcta

SEQ ID NO: 313868 - DNA, 3050 bp, Homo sapiens
ccttctacaggaatgaaaattcttgcataagacaacttctacccatgcaaagctcttgtagaatactagttgctggctttcttgaaagttgcagggagcccaaaacaatcaaaataatttccttacaaatatttaaaatgtataaccatgacttgccatttctaacaataataaaaagactaaaacattaaagataattttttcctcagtggaaattttctatttgaacataaatccatcaaacttttttttctcgtgtgtgtttacatatgtataattttacatataagtatagtgcctttaggaaacagcttgctgatctcgtgtagctagtgtgtgctcttgtagctgtctttaattttgtcttttttattttatttagcatagtcatgatcttatgactgtgatgttccagtaaatgtaatgctcgtatggcagagacgctgaaaatgctgcagttcaaccttgcaaaattggctttaactgcagtttgtttggccgaaatccttctgtttggtttgagttttttctttgttttgttaacttctaaaaatcaatatggcatttcattttgttcttgtgttgttggctatgcatcttagagggaaaaaagttacttaagcagacttctcagttttttttcctcttctccaattatcctgtaggaaattcacagtatggccaacagcaagatgcataccagggaccacctccacaacagggatatccaccccagcagcagcagtacccagggcagcaaggttacccaggacagcagcagggctacggtccttcacagggtggtccaggtcctcagtatcctaactacccacagggacaaggtcagcagtatggaggatatagaccaacacagcctggaccaccacagccaccccagcagaggccttatggatatgaccagggacagtatggaaattaccagcagtgaaaaagtacttacattccagtagccagtatctattagcagccatattgtcacctcagcactgtggacacctccctgtgaagagatccttccattccatctagtttttggaaaaaccttgtggataagtggctgtttcatcagtaagcagcctttgtggtttagttataaaaggctttagtagctcaaaaatactcttgatttcacatttctactctagatggcaacattggacagaaaatgcaatgacataaccaatttgtaatgattttggaactgtgtttcaaatggactgttacagactgaaaggtgtgaacagctttgtatgtttatgaagggtaagggaatttaatacttttccacagatttttttgtaaggggaagagggaaatgtacactttttacagcagcaatattttgtatattatgtttatttcatgtggtgaatatgcaaggcggtacactacgcactggacagcatcagaaatcctctgttaatgtggactggagcatggtagatgcttgattgttttggtctcaaaatggtgtgctataaagataaaggtgaggggaagacaaagcacaccatatgtccactgttctgttctcatagaggaaattcaaatcccttttatctattagataatcaagggcactgtgatacagttttgagtaaaaagacattttttaaaagccttccagttttgtggattaaacctttttataaagatcatttataatactgttttaaaatgtgaggcaataagaattactttgtgttggatctgaggaggctttggtaaaacagtttcatctaaatgaaagtggtaatcctcttctaaaatagcaataactgaaaatgaaagtgttaattttaccttgtttgagttatcagggaacttagtaagtaatatcaaagcattttataaatgatatcaaagaagagtcaacattgatccagtcattttattttgtaatattgagggataattggttattaaactgaatagttcaggagactttacaaacctttgtttcaactttcttatctggaaataatatcatttataaagggacacttttatgtttttcccttttttatgttggttgatataacacaaagagatatttaggaaaatgcttattgatgaggtttattctatctgtttttaaagcaccgaggttgcattctagataaccttgtttattagcatggcatattttaatcattatttgagactgtcctgtgcctgattattttagctaaattcagggagattgcgtggggcaggaaagcatgcattgaaaaatttctaaccacggttatttaagcataatctgaaaacatctagcccaaaggtaagttgctattttcatcacagttgcctatgcccagggaataagatgtattctttataattgaattggtttttcccacgtctaactggaaacaaaacagaaggggcgtcataaatttgaataagcagaacatactgttctcaacatactgtaatcaaaaggaggaatttcagtgggtctctgtgtgtgtatgagagagagagtgtgtgtttgtgtgtttcaaggtcagaacaggtttttttgtttttgttttttgttctttgtttttttttttgagatggagtcttgctcttgtcgcccaggctggagtgcagtggcgcaatctcagctcactgcaacctccgcctcccaggttcaagcagttctcctgcctcagcctcctgagtagctgggatgacaggcacccgccaccacacccagctaatttttgtacttttagtagagacgaggtttcgccatgttggccaggctggtctcgaactcctgacctcaggtgatccacccgcctcggccttccaaagtgctgggattacaggcgtgagccaccgtgcctggccagaataggttttttctttcaacttgatcagtagaaaatggacatcaagtttgaacagataaatcatggacagccttattgtgattgaaatgcttgtaggttctgtgccaattttccaccactgtgtactttgttgctatttaaaactgtatcaactctaacggaagaataaattatttgtgattttaa

SEQ ID NO: 313869 - DNA, 488 bp, Homo sapiens
tacggggaccaatacagtcatggtggacaaggtcctccagaaggcatgaaccagcaatattaccctgatggtaatctctcctgatgttaactttcccattttctatccctgcctaatattaatgtagagagttatttaaaacatttcagtgaggacgaagaaactaacaatttgtttcctctaaattttgaaacacttcagtactctaaagtaccaatgatagcattagtttataatctaattcaaagtatattttaggtgttccattagtaccatcaggaatcacagtctgtcattggaatccttatgtaaaaggatctttttgtaatatgtttagggttgtttgatttcagccaaagcttatgtttattgatttacttttttttaataagagcttcattaagatataattcacctgccataaagttcacccattagttgacttgtattaattgtacaaatacatagagtatatagttctcaagtta

SEQ ID NO: 313870 - DNA, 397 bp, Homo sapiens
ctcatttgctaatccctagcatattttggactatgaaattcatttgcaattgaatataatatcagaagaaattacagggtgatactgtatacctaacgatataaaaaaattttgtttattgtaggtacggctgcttttttgtggtatgacagtgttagaaatgattcgtttgtaatcttctttgcctgttatggtcaaactattatctaattatatttttaaatttatcttttagggacagtatggaaattaccagcagtgaaaaagtacttacattccagtagccagtatctattagcagccatattgtcacctcagcactgtggacacctccctgtgaagagatccttccattccatctagtttttggaaaaaccttgtggataagtggctgttt

SEQ ID NO: 313871 - DNA, 2985 bp, Homo sapiens
  misc_feature (1411)..(1411): n is a, c, g, or t
  misc_feature (1416)..(1416): n is a, c, g, or t
  misc_feature (1422)..(1423): n is a, c, g, or t
  misc_feature (1433)..(1433): n is a, c, g, or t
  misc_feature (1436)..(1436): n is a, c, g, or t
  misc_feature (1440)..(1440): n is a, c, g, or t
cgagaggccggcgtctctcccccagtttgccgttcacccggagcgctcgggacttgccgatagtggtgacggcggcaacatgtctgtggctttcgcggccccgaggcagcgaggcaagggggagatcactcccgctgcgattcagaagatgttggatgacaataaccatcttattcagtgtataatggactctcagaataaaggaaagacctcagagtgttctcagtatcagcagatgttgcacacaaacttggtataccttgctacaatagcagattctaatcaaaatatgcagtctcttttaccagcaccacccacacagaatatgcctatgggtcctggagggatgaatcagagcggccctcccccacctccacgctctcacaacatgccttcagatggaatggtaggtgggggtcctcctgcaccgcacatgcagaaccagatgaacggccagatgcctgggcctaaccatatgcctatgcagggacctggacccaatcaactcaatatgacaaacagttccatgaatatgccttcaagtagccatggatccatgggaggttacaaccattctgtgccatcatcacagagcatgccagtacagaatcagatgacaatgagtcagggacaaccaatgggaaactatggtcccagaccaaatatgagtatgcagccaaaccaaggtccaatgatgcatcagcagcctccttctcagcaatacaatatgccacagggaggcggacagcattaccaaggacagcagccacctatgggaatgatgggtcaagttaaccaaggcaatcatatgatgggtcagagacagattcctccctatagacctcctcaacagggcccaccacagcagtactcaggccaggaagactattacggggaccaatacagtcatggtggacaaggtcctccagaaggcatgaaccagcaatattaccctgatggtcataatgattacggttatcagcaaccgtcgtatcctgaacaaggctacgataggccttatgaggattcctcacaacattactacgaaggaggaaattcacagtatggccaacagcaagatgcataccagggaccacctccacaacagggatatccaccccagcagcagcagtacccagggcagcaaggttacccaggacagcagcagggctacggtccttcacagggtggtccaggtcctcagtatcctaactacccacagggacaaggtcagcagtatggaggatatagaccaacacagcctggaccaccacagccaccccagcagaggccttatggatatgaccagatcatgcccaagaagccagcagaggaaggaaatgattcggaggaagtgccagaagcatctggcccacaaaatgatgggaaagagctgtgccccccgggaaanccaantacctnngagaagattnacnaganatctggacccaaaagggggaaacatgcctggacccacagactgcgtgagagaaagcagctggtggtttatgaagagatcagcgaccctgaggaagatgacgagtaactcccctcggggatatgacacatgcccatgatgagaagcagaacgtggtgacctttcacgaacatgggcatggctgcggacccctcgtcatcaggtgcatagcaagtgaaagcaagtgttcacaacagtgaaaagttgagcgtcatttttcttagtgtgccaagagttcgatgttggcgtttccgctgtattttcttgcagtgtgccattctgttagacattagcgtttttcgttgatgagcaagacatgcttaatgcatatttcggcttgtgtatccatgcacctacctcagaaaacaagtattgtcaggtattctctccatagaacagcactaccctcctctctccccagatgtgactactgaggggaggtctgagtgtttaatttccgatttttcctctgcatttacacacacaccacacacgcacacacacacaccaagtaccagtataagccatctcccatctgcttttctccattgccatgcgacctggtcaagcccccctcactctgtttcctgttcagcatgtactcccctcatccgattccgttgtatcagtcactgacagttaataaacctttgcaaacgttcaaaaaaaaaaaaaaaaaatcatgcccaagaagccagcagaggaagaaaatggtttgaaggaagtgccagaggcatctggcccacaaaatgatgggaaacagctgtgccccccgggaaatccaagtaccttggagaagattaacaagacatctggacccaaaagggggaaacatgcctggacccacagactgcgtgagagaaagcagctggtggtttatgaagagatcagcgaccctgaggaagatgacgagtaactcccctcggggatatgacacatgcccatgatgagaagcagaacgtggtgacctttcacgaacatgggcatggctgcggacccctcgtcatcaggtgcatagcaggtgaaagcaagtgttcacaacagtgaaaagttgagcgtcatttttcttagtgtgccaagagttcgatgttggcgtttccgctgtattttcttgcagtgtgccattctgttagacattagcgtttttcgttgatgagcaagacatgcttaatgcatatttcggcttgtgtatccatgcacctacctcagaaaacaagtattgtcaggtattctctccatagaacagcactaccctcctctctccccagatgtgactactgaggggaggtctgagtgtttaatttccgatttttcctctgcatttacacacacaccacacacgcacacacacacaccaagtaccagtataagccatctcccatctgcttttctccattgccatgcgacctggtcaagcccccctcactctgtttcctgttcagcatgtactcccctatccgattccgttgtatcagtcactgacagttaataaacctttgcaaacgttc

SEQ ID NO: 313872 - DNA, 3408 bp, Homo sapiens
cgagaggccggcgtctctcccccagtttgccgttcacccggagcgctcgggacttgccgatagtggtgacggcggcaacatgtctgtggctttcgcggccccgaggcagcgaggcaagggggagatcactcccgctgcgattcagaagatgttggatgacaataaccatcttattcagtgtataatggactctcagaataaaggaaagacctcagagtgttctcagtatcagcagatgttgcacacaaacttggtataccttgctacaatagcagattctaatcaaaatatgcagtctcttttaccagcagtgtgattcaagtaaggtgaaggaacacatgcttagagctgtggaacattttgaagattagcagccacccacacagaatatgcctatgggtcctggagggatgaatcagagcggccctcccccacctccacgctctcacaacatgccttcagatggaatggtaggtgggggtcctcctgcaccgcacatgcagaaccagatgaacggccagatgcctgggcctaaccatatgcctatgcagggacctggacccaatcaactcaatatgacaaacagttccatgaatatgccttcaagtagccatggatccatgggaggttacaaccattctgtgccatcatcacagagcatgccagtacagaatcagatgacaatgagtcagggacaaccaatgggaaactatggtcccagaccaaatatgagtatgcagccaaaccaaggtccaatgatgcatcagcagcctccttctcagcaatacaatatgccacagggaggcggacagcattaccaaggacagcagccacctatgggaatgatgggtcaagttaaccaaggcaatcatatgatgggtcagagacagattcctccctatagacctcctcaacagggcccaccacagcagtactcaggccaggaagactattacggggaccaatacagtcatggtggacaaggtcctccagaaggcatgaaccagcaatattaccctgatggaaattcacagtatggccaacagcaagatgcataccagggaccacctccacaacagggatatccaccccagcagcagcagtacccagggcagcaaggttacccaggacagcagcagggctacggtccttcacagggtggtccaggtcctcagtatcctaactacccacagggacaaggtcagcagtatggaggatatagaccaacacagcctggaccaccacagccaccccagcagaggccttatggatatgaccagggacagtatggaaattaccagcagtgaaaaagtacttacattccagtagccagtatctattagcagccatattgtcacctcagcactgtggacacctccctgtgaagagatccttccattccatctagtttttggaaaaaccttgtggataagtggctgtttcatcagtaagcagcctttgtggtttagttataaaaggctttagtagctcaaaaatactcttgatttcacatttctactctagatggcaacattggacagaaaatgcaatgacataaccaatttgtaatgattttggaactgtgtttcaaatggactgttacagactgaaaggtgtgaacagctttgtatgtttatgaagggtaagggaatttaatacttttccacagatttttttgtaaggggaagagggaaatgtacactttttacagcagcaatattttgtatattatgtttatttcatgtggtgaatatgcaaggcggtacactacgcactggacagcatcagaaatcctctgttaatgtggactggagcatggtagatgcttgattgttttggtctcaaaatggtgtgctataaagataaaggtgaggggaagacaaagcacaccatatgtccactgttctgttctcatagaggaaattcaaatcccttttatctattagataatcaagggcactgtgatacagttttgagtaaaaagacattttttaaaagccttccagttttgtggattaaacctttttataaagatcatttataatactgttttaaaatgtgaggcaataagaattactttgtgttggatctgaggaggctttggtaaaacagtttcatctaaatgaaagtggtaatcctcttctaaaatagcaataactgaaaatgaaagtgttaattttaccttgtttgagttatcagggaacttagtaagtaatatcaaagcattttataaatgatatcaaagaagagtcaacattgatccagtcattttattttgtaatattgagggataattggttattaaactgaatagttcaggagactttacaaacctttgtttcaactttcttatctggaaataatatcatttataaagggacacttttatgtttttcccttttttatgttggttgatataacacaaagagatatttaggaaaatgcttattgatgaggtttattctatctgtttttaaagcaccgaggttgcattctagataaccttgtttattagcatggcatattttaatcattatttgagactgtcctgtgcctgattattttagctaaattcagggagattgcgtggggcaggaaagcatgcattgaaaaatttctaaccacggttatttaagcataatctgaaaacatctagcccaaaggtaagttgctattttcatcacagttgcctatgcccagggaataagatgtattctttataattgaattggtttttcccacgtctaactggaaacaaaacagaaggggcgtcataaatttgaataagcagaacatactgttctcaacatactgtaatcaaaaggaggaatttcagtgggtctctgtgtgtgtatgagagagagagtgtgtgtttgtgtgtttcaaggtcagaacaggtttttttgtttttgttttttgttctttgtttttttttttgagatggagtcttgctcttgtcgcccaggctggagtgcagtggcgcaatctcagctcactgcaacctccgcctcccaggttcaagcagttctcctgcctcagcctcctgagtagctgggatgacaggcacccgccaccacacccagctaatttttgtacttttagtagagacgaggtttcgccatgttggccaggctggtctcgaactcctgacctcaggtgatccacccgcctcggccttccaaagtgctgggattacaggcgtgagccaccgtgcctggccagaataggttttttctttcaacttgatcagtagaaaatggacatcaagtttgaacagataaatcatggacagccttattgtgattgaaatgcttgtaggttctgtgccaattttccaccactgtgtactttgttgctatttaaaactgtatcaactctaacggaagaataaattatttgtgattttaa

SEQ ID NO: 313873 - DNA, 1451 bp, Homo sapiens
cgagaggccggcgtctctcccccagtttgccgttcacccggagcgctcgggacttgccgatagtggtgacggcggcaacatgtctgtggctttcgcggccccgaggcagcgaggcaagggggagatcactcccgctgcgattcagaagatgttggatgacaataaccatcttattcagtgtataatggactctcagaataaaggaaagacctcagagtgttctcagtatcagcagatgttgcacacaaacttggtataccttgctacaatagcagattctaatcaaaatatgcagtctcttttaccagcaccacccacacagaatatgcctatgggtcctggagggatgaatcagagcggccctcccccacctccacgctctcacaacatgccttcagatggaatggtaggtgggggtcctcctgcaccgcacatgcagaaccagatgaacggccagatgcctgggcctaaccatatgcctatgcagggacctggacccaatcaactcaatatgacaaacagttccatgaatatgccttcaagtagccatggatccatgggaggttacaaccattctgtgccatcatcacagagcatgccagtacagaatcagatgacaatgagtcagggacaaccaatgggaaactatggtcccagaccaaatatgagtatgcagccaaaccaaggtccaatgatgcatcagcagcctccttctcagcaatacaatatgccacagggaggcggacagcattaccaaggacagcagccacctatgggaatgatgggtcaagttaaccaaggcaatcatatgatgggtcagagacagattcctccctatagacctcctcaacagggcccaccacagcagtactcaggccaggaagactattacggggaccaatacagtcatggtggacaaggtcctccagaaggcatgaaccagcaatattaccctgatggaaattcacagtatggccaacagcaagatgcataccagggaccacctccacaacagggatatccaccccagcagcagcagtacccagggcagcaaggttacccaggacagcagcagggctacggtccttcacagggtggtccaggtcctcagtatcctaactacccacagggacaaggtcagcagtatggaggatatagaccaacacagcctggaccaccacagccaccccagcagaggccttatggatatgaccaggacccaaaagggggaaacatgcctggacccacagactgcgtgagagaaagcagctggtggtttatgaagagatcagcgaccctgaggaagatgacgagtaactcccctcggggatatgacacatgcccatgatgagaagcagaacgtggtgacctttcacgaacatgggcatggctgcggacccctcgtcatcaggtgcatagcaagtgaatctttcccgggggtaccgtcgact

SEQ ID NO: 313874 - DNA, 5497 bp, Homo sapiens
  misc_feature (1299)..(1299): n is a, c, g, or t
  misc_feature (5497)..(5497): n is a, c, g, or t
catgtgggcactagatctcattccccatcccctctctgctagaagtatccatacagagccgtaatcatcctttgctctctcctcatgagtatttcctgttctaatggaaactccatcaccatgtaaaaatgttaattcctatcacattgacctcatattgctctaggtgtctcatttttttttcttttctttacaggaagattccttgaaagaattgagtgtactggctttccttccactttcttcagcctaccccagttatgttttcacccacaccactcagctaaactagtcatgtcaagatcacccatgaccttcacattgctaaatccagggataaattttcagccctaatcttacttgaccatgagcagtagttgacatggtggattattccatcctctttgaaatactttgcttggtttctggaaccacacttttctggttttccttctatcacactgactgctcctttgtctcctttgctgatacttcctcatcaactggaaatcttggacagcccagggctaagctctatgatgtcttttacctacatttctttagtgatttcattcagcatcagatttttaaattccattcctttgccagtctttcctctaaattctagacccatgtatacaattgcctattcattatcactactaagatgtctaatggacttttcaaatgtaacctcccccaaaacttactcctcccatggtcttccctatctcaattaatagcttcttcgtctttcagtcccgagacccttcagcccagatcattttccttgactgttctttctctcttatatttcacatgcaaatgctgttgtctttatcttcaaaatatattcagaatcgaagcccttctcacacatcctctgccaccattttggtctgagacatcttcatctcttccctggattggtgcaacagcctcccaccttgtctccttgcttctgtggttgttcccttaaagcctgtgctcaggttagctgctgcatgaccctgttaagatgtgagctagtgcccaccactcctttactcaaaaccatccagtgacttctttttttcctctgaatggaaaccaaagtcctacagtggcctacatgacctcctatggtctattcttccacacgtccttacctagattttctcttgctgctcttccctcgctcattctcaccctgccgtacttactcccttgctgttctttgagtgttccagacagattacacaatcacctcagggctttggcactttgcagttccttctgctaggaacacttttccctcanatattctccttggtatacgtgtgtacatgtatgcacacatacacatgcacacatttgttctgtgtctctcctttccctctgttttctagtgctcttttatgtatttccagtactatttttgtttattgtcattctcccataattagacgataaactccatgagggcagggtttgagaatgttttgtgaactgttgtattctcagtgcctggagcagtactcaacatgagcagtggccagatgaattttgaatgaacgtctgctgcatactctctgctagagaaatgcggagatggtgaagccagtctctgcctatgaacagctctcatggaaaccataaattgaaacctgtagcagtaacactgcatataagtaaaagggcaacttggttatatgcatgcacaaggtgcaggtagcataaagggaggcgtaattaacaccaacttcaggacatccacacctggaagaatttttaaatggtgcctaacgtttgaccaaatggattacagggaagagaagggtatgttcagcagatggtatatagtgtgtgaaggctttgaggtatgacacagcattatgtgtaaggcaactcacacccacatcttaaaggacatgggcaaggagtgactggtaacaaatccaagggtcatatctagtgtgtcacgccaatgggcttggacttaatcctttctttctcctcctcttcccccggtcactattcaacttgcctcagtaagtatttattgagtatattctatgtgccaggcattgtgaggagcaaaaatagacaagggccttggctttgtggggcttaaagtctattgaaaggcagtcttgaatcaaataattaatgggtgccatcattgaatgttaagccagctcctgaagcatcaaagacatgactagagtccaaaatggaaacctcagagtttaagagtaggttattacaggggacctggaagatacagggctagtgtatatttctgtatttttaaccagataaatgcagtgcttctcttctccacattcctttcctcctcccatcctaacaatgcaactacaatagatcaggagtcccaaatccccgggtcacagatcagtactggtccatggcctgctaggggccacacagcagacggtgagtggcaggggagtgtgcaaagcttcatctgtatttacagtcactcctcatcactcacacattattgcctgagctcagcctcttgtcagatcagcagcggcattagattctcataggagcacaaactctactgtgaactctgcatgcgagggatctaggttacatgctccttaggacagtctaatgcctggtgttctttcactgtctcccatcaaccccataaaggaccatctagttgcaggaaaacaagctcagggatcccactgattctacattatggtgagttgtataatcacttcattatatattccagtgtaataataatagaaagaaagtacacaataaatgtaatgtgcctgaatcatctcaaaaccatctccccactcctaccaaaccggtccacggaaaagttgtctttaatgaaactggtccctggtgccaaaaaggttggggactgctgcaatagatagtatttgttggtttcaggattcttttagatttcttactatagtactttctttctagaccacacctactactacaaccatttctaatttatattgacttttggcaggggaggcaagggtaggaaggaaagttttataggaggacaagtctttttagtaagtgatcaagcaggctgggcttggtggctcctgcctgtaatcccagcactttgggaggccgaggcgggtggataatgaggtcaagtgttcgagaccggcttcgccaacatggtgaaacctcgtctctactaaagataagaaaattagctgggcatgttggcgggtgcctgcagtcccagctactcgaaaagctgaggcaggagaattgcttgaacccgggaggcagacgttgcagtgagccgagatcgtgccactgccctccagcctgggaaacagagtgagactctgtctcaaaaaaaaaaaaaaaaaaaaaaaagtgatcaggcaaagaactgaaaggagagagaatgaggaaaacaaaaactattataagtttcaaggtatgaaaagactttataatcaaggtcttctaaccaaatattcctaattagatttttttaattttccatatctttaagaaatatttttcagtttgtgacaggaaatagaccctttagcttggaccaaggctactaggcactggccaagtataaaaggcatagctctactctgctccatttagcttgtttctttatccttggctctgtcatttatcacaatttggaattgtcaacatgagcctgaacactaaaaaaaattctgctaacaaaggcactgtgttttccatgcctgagtcaacccactgccctttcctaaatgccaaagatggggaaatgggatggaatttcctggattactacttgtacttaaacctgagtaagttttgaatttggaagacacattccagccagagagggtggattttggacccatgttcgagtgtatcagccacccagattggttttatttaagaaacagataaacaaaatatcttaaagtatctgttatttctagccagaagtaacttccgtatggtttaattaatagacctgccttggctcatcttgacttacagagctggggttctatattctagccctgttctccccagttaacagtcctcagaggaagaaacgagtccataaggcagaatttaaaagctgtgtacaaatttaacatttttacccatggcaagacatctagagtaactgaattattgactgtctttgcttttggcaaggcaagacagcaatagaggatggaaattcaacaaaagtatcaggtgtgtatgtacatatgacattctaaaagggaaaaatgaattattccttaatcatctattaaataagctaagtttattttttaaaaacgtttaagcccaagaggagaaaatatgaaaggaaatgttagttatgcgaaaggttctaggtagtcaagaattcctttttcttttctgaaacccacttaaattcatttgcagcagccctagggggttgtcagaatcacattctggttaagtagtgtcagtgtgtcagatcaaagaagaaataaatcatcctcctcctcctcctgttgtgtgcaataaagtagcccattcaaaactggattcacagtaaccaactgtgtcatgtaaacaaagcaatcttcagattcaccttgtaggatggtgacaggtaaattaacaaggaagttgagaacaagaaggaaagctacctgggataaattcacggttttttttttttgtttttttgttttgttttgtttccttcagtgactttcaaaacgtcagcaatcagccctgaagtgtttggaatgcatactgaattgctacagggataaatataccattgccagaatcttctgtaggacagtcttactagaaatcagtaatcctgaggctgagcacagtggctgtcacctgtaatcccagcactttgggaggctgaggcaggcagatcacttgaggccaggagtttgagaccagcctggccaacatggtgatacctgtttctactaaaagtacaaaaattagctgggcacaatggtgggcacctgtaatcccagctactcaggaggctgaggcaggagaagcgcctgaacccaggaggcggagattgcagtaagccaagatcacaccattgcattctagcctgggtgacagagcaagactctatcttaaaaaaaaaaaaaaaaaaaaattgagcaaataaaaagttgtttatctcatggaaaccacgaggaaaatacacaagaaaaagtatagtaggctgggtgcagcagttcacacctgtaatcccagcactttaggaggctaagggaggaggactgcttgagctcagaagtttcagaccagcctgggcaacataatgaggccctgtttctactaaaaaaaaaaaaaaaaaattagctaggtgtggtggcatgcacctgtagtcccagctacttgggaggctgagccagggggatcacttgagcctgggaggttgaggctgcagtgagctatgattactacacccttgcactccagcctgggtgacagtgagatgctgtcn

SEQ ID NO: 313875 - DNA, 464 bp, Homo sapiens
atccaggcatttctacaaccccgcctgtggagttgcatgtttgcctgcatgctctgctttatctccaatgactatgttcccagcaagggccaacccaccatgtgggcactagatctcattccccatcccctctctgctagaagtatccatacagagccgtaatcatcctttgctctctcctcatgagtatttcctgttctaatggaaactccatcaccatgtaaaaatgttaattcctatcacattgacctcatattgctctaggtgtctcatttttttttcttttctttacaggaagattccttgaaagaattgagtgtactggctttccttccactttcttcagcctaccccagttatgttttcacccacaccactcagctaaactagtcatgtcaagatcacccatgaccttcacattgctaaatccagggataaattttcagccctaatcttacttgacc

SEQ ID NO: 313876 - DNA, 415 bp, Homo sapiens
gctgtcgctactactactaaattcgcggcccgtcgacgaccccacaagaatctatgatacagccttggctctctggatcccttctttgctcatgtctgcaggggaggctgctctatctggttactgctgtgtggctgcactcactctacgtggagttgggccctgcaggaaggacggacttcaggggcagctagaggaaatgacagagcttgaatctcctaaatgtaaaaggcaggaaaatgagcagctactggatcaaaatcaagaaatccgggcatcacagagaagttgggtttaggacagcaggtgctgttccgagactcagtcctaaagggttttttttcccactaagcaaggggccctgacctcgggatgagataacaaattgtaataaagtaacttctcttttcttcta

SEQ ID NO: 313877 - DNA, 671 bp, Homo sapiens
tggcgcggcggacgggatgaggcgctgcagtctctgcgctttcgagcgtttccgtgggacttgtggccctcctggcgtccaggaaccttcttcgccctccactgcactgggtcctgctggcactagctctggtgaacctgctcttgtccgttgcctgctccctgggcctccttcttgctgtgtcactcactgtggccaacggtggccgccgccttattgctgactgccacccaggactgctggatcctctggtaccactggatgaggggccgggacatactgactgcccctttgaccccacaagaatctatgatacagccttggctctctggatcccttctttgctcatgtctgcaggggaggctgctctatctggttactgctgtgtggctgcactcactctacgtggagttgggccctgcaggaaggacggacttcaggggcagctagaggaaatgacagagcttgaatctcctaaatgtaaaaggcaggaaaatgagcagctactggatcaaaatcaagaaatccgggcatcacagagaagttgggtttaggacagcaggtgctgttccgagactcagtcctaaagggttttttttcccactaagcaaggggccctgacctcgggatgagataacaaattgtaataaagtaacttctcttttcttcta

SEQ ID NO: 313878 - DNA, 1474 bp, Homo sapiens
ggcgtctcgtctccttaccctggggctacccttgccccgtcctactgcccgcggttaacccgccgcgagccgcctctcccctccccgcccgactcaaccctgccctcccccgtgctttgcagacgccgcccgggggcccaggcggctgatgcgtgtgggcctcgcgctgatcttggtgggccacgtgaacctgctgctgggggccgtgctgcatggcaccgtcctgcggcacgtggccaatccccgcggcgctgtcacgccggagtacaccgtagccaatgtcatctctgtcggctcggggctgctgagcgtttccgtgggacttgtggccctcctggcgtccaggaaccttcttcgccctccactgcactgggtcctgctggcactagctctggtgaacctgctcttgtccgttgcctgctccctgggcctccttcttgctgtgtcactcactgtggccaacggtggccgccgccttattgctgactgccacccaggactgctggatcctctggtaccactggatgaggggccgggacatactgactgcccctttgaccccacaagaatctatgatacagccttggctctctggatcccttctttgctcatgtctgcaggggaggctgctctatctggttactgctgtgtggctgcactcactctacgtggagttgggccctgcaggaaggacggacttcaggggcaggtaaggaaggcaaacaggaagggttcattccacagagactggctgtgttgaaaagatgctgaccggccgggtgcggaggctcacacctgtaatcccagcactttgggaggctgaggcaggcggatcacttgaggtcaggagtttgagaccagcttggacaacatggtgaaacctcgtctctactaaaaatacaaaaaattaggtggggtggtgggcgcctgtaatcccagctacttggaaggctgaggcaggagaatcgcttgaacccggaaggcggaggttgcagtgaaccgagatcacgccactgcactccagcctgggcaacagagtgaggctccgtcacaaaaaacaaaacaaaaaaaagatgctgacctatcattcagggcgagggtgtctaactctatcttcttctgcagctagaggaaatgacagagcttgaatctcctaaatgtaaaaggcaggaaaatgagcagctactggatcaaaatcaagaaatccgggcatcacagagaagttgggtttaggacaggtaatgggccttgaaggtggtggcccgggtaagagcggggacaaggaagtgctcttagaactgggtctaggtcttgccatgctgctttcccctctgacctgggttggttctcccctctgtccagcaggtgctgttccgagactcagtcctaaagggttttttttcccactaagcaaggggccctgacctcgggatgagataacaaattgtaataaagtaacttctcttttcttcta

SEQ ID NO: 313879 - DNA, 934 bp, Homo sapiens
ggcgtctcgtctccttaccctggggctacccttgccccgtcctactgcccgcggttaacccgccgcgagccgcctctcccctccccgcccgactcaaccctgccctcccccgtgctttgcagacgccgcccgggggcccaggcggctgatgcgtgtgggcctcgcgctgatcttggtgggccacgtgaacctgctgctgggggccgtgctgcatggcaccgtcctgcggcacgtggccaatccccgcggcgctgtcacgccggagtacaccgtagccaatgtcatctctgtcggctcggggctgctgagcgtttccgtgggacttgtggccctcctggcgtccaggaaccttcttcgccctccactgcactgggtcctgctggcactagctctggtgaacctgctcttgtccgttgcctgctccctgggcctccttcttgctgtgtcactcactgtggccaacggtggccgccgccttattgctgactgccacccaggactgctggatcctctggtaccactggatgaggggccgggacatactgactgcccctttgaccccacaagaatctatgatacagccttggctctctggatcccttctttgctcatgtctgcaggggaggctgctctatctggttactgctgtgtggctgcactcactctacgtggagttgggccctgcaggaaggacggacttcaggggcagctagaggaaatgacagagcttgaatctcctaaatgtaaaaggcaggaaaatgagcagctactggatcaaaatcaagaaatccgggcatcacagagaagttgggtttaggacagcaggtgctgttccgagactcagtcctaaagggttttttttcccactaagcaaggggccctgacctcgggatgagataacaaattgtaataaagtaacttctcttttcttcta

SEQ ID NO: 313880 - DNA, 1058 bp, Homo sapiens
ggcgtctcgtctccttaccctggggctacccttgccccgtcctactgcccgcggttaacccgccgcgagccgcctctcccctccccgcccgactcaaccctgccctcccccgtgctttgcagacgccgcccgggggcccaggcggctgatgcgtgtgggcctcgcgctgatcttggtgggccacgtgaacctgctgctgggggccgtgctgcatggcaccgtcctgcggcacgtggccaatccccgcggcgctgtcacgccggagtacaccgtagccaatgtcatctctgtcggctcggggctgctgagcgtttccgtgggacttgtggccctcctggcgtccaggaaccttcttcgccctccactgcactgggtcctgctggcactagctctggtgaacctgctcttgtccgttgcctgctccctgggcctccttcttgctgtgtcactcactgtggccaacggtggccgccgccttattgctgactgccacccaggactgctggatcctctggtaccactggatgaggggccgggacatactgactgcccctttgaccccacaagaatctatgatacagccttggctctctggatcccttctttgctcatgtctgcaggggaggctgctctatctggttactgctgtgtggctgcactcactctacgtggagttgggccctgcaggaaggacggacttcaggggcagctagaggaaatgacagagcttgaatctcctaaatgtaaaaggcaggaaaatgagcagctactggatcaaaatcaagaaatccgggcatcacagagaagttgggtttaggacaggtaatgggccttgaaggtggtggcccgggtaagagcggggacaaggaagtgctcttagaactgggtctaggtcttgccatgctgctttcccctctgacctgggttggttctcccctctgtccagcaggtgctgttccgagactcagtcctaaagggttttttttcccactaagcaaggggccctgacctcgggatgagataacaaattgtaataaagtaacttctcttttcttcta

SEQ ID NO: 313881 - DNA, 1151 bp, Homo sapiens
aacggcattccccaggagacaagaaaggaggatagaaaaacgacttaggaatctccttggagctcaagaccaggaacttccccaagccggaggtccctgaggcgctctagcgcgctggccgcactcgcagcccaggtcgccagtgcgcacgcgcaagattaggtggggcgccagagccggggcacctgcgcaggcttggctgcgccctctcgcgccgcacgctctgcgggttcctcccttcttccgagcctctcctctggccgccgcgcgggagagaggccgagatggcagatgagattgccaaggctcaggtcgctcggcctggtggcgacacgatctttgggaagatcatccgcaaggaaataccagccaaaatcatttttgaggatgaccggtgccttgctttccatgacatttcccctcaagcaccaacacattttctggtgatacccaagaaacatatatcccagatttctgtggcagaagatgatgatgaaagtcttcttggacacttaatgattgttggcaagaaatgtgctgctgatctgggcctgaataagggttatcgaatggtggtgaatgaaggttcagatggtggacagtctgtctatcacgttcatctccatgttcttggaggtcggcaaatgcattggcctcctggttaagcacgttttggggataattttctcttctttaggcaatgattaagttaggcaatttccagtatgttaagtaacacacttatttttgcctgtgtatggagagattcaagaaataattttaaaaccgcatacataataaaagacattgttgcatggcttatagtctctctgagtgttgcgtttgatttgttattttaaaaacatatttgttggaatatgtgaaggtgggtttataattttggatgtttcttgctttttcttcccaaggaggactcaacatatgaacatcgcattgttttaatggtgttactagtctttgaagacaaataatgagagtttataaatttagctttaacttcgaaatatctttccaggctaaaataggtccaacttagatttttaagctaattctcacattttctaagaacataggaaattgaccattttgggtttagaaacagtgctttatgttcagcccacattgcccct

SEQ ID NO: 313882 - DNA, 888 bp, Homo sapiens
  misc_feature (843)..(845): n is a, c, g, or t
  misc_feature (881)..(881): n is a, c, g, or t
aacggcattccccaggagacaagaaaggaggatagaaaaacgacttaggaatctccttggagctcaagaccaggaacttccccaagccggaggtccctgaggcgctctagcgcgctggccgcactcgcagcccaggtcgccagtgcgcacgcgcaagattaggtggggcgccagagccggggcacctgcgcaggcttggctgcgccctctcgcgccgcacgctctgcgggttcctcccttcttccgagcctctcctctggccgccgcgcgggagagaggccgagatggcagatgagattgccaaggctcaggtcgctcggcctggtggcgacacgatctttgggaagatcatccgcaaggaaataccagccaaaatcatttttgaggatgaccggtgccttgctttccatgacatttcccctcaagcaccaacacattttctggtgatacccaagaaacatatatcccagatttctgtggcagaagatgatgatgaaagtcttcttggacacttaatgattgttggcaagaaatgtgctgctgatctgggcctgaataagggttatcgaatggtggtgaatgaaggttcagatggtggacagtctgtctatcacgttcatctccatgttcttggaggtcggcaaatgcattggcctcctggttaagcacgttttggggataattttctcttctttaggcaatgattaagttaggcaatttccagtatgttaagtaacacacttatttttgcctgtgtatggagagattcaagaaataattttaaaaccgcatacataataaaagacattgttgcatggctatagtcaaaaaaaaaacacaccnnnaaaaaaaagcggccgctcgaattgtcgaacgcggcntcgaatt

SEQ ID NO: 313883 - DNA, 655 bp, Homo sapiens
gaattcccgtgatagacagactgtccaccatctgaaccttcattcaccaccattcgataatgcgggttcctcccttcttccgagcctctcctctggccgccgcgcgggagagaggccgagatggcagatgagattgccaaggctcaggtcgctcggcctggtggcgacacgatctttgggaagatcatccgcaaggaaataccagccaaaatcatttttgaggatgaccggtgccttgctttccatgacatttcccctcaagcaccaacacattttctggtgatacccaagaaacatatatcccagatttctgtggcagaagatgatgatgaaagtcttcttggacacttaatgattgttggcaagaaatgtgctgctgatctgggcctgaataagggttatcgaatggtggtgaatgaaggttcagatggtggacagtctgtctatcacgttcatctccatgttcttggaggtcggcaaatgcattggcctcctggttaagcacgttttggggataattttctcttctttaggcaatgattaagttaggcaatttccagtatgttaagtaacacacttatttttgcctgtgtatggagagattcaagaaataattttaaaaccgcatacataataaaagacattgttgcatggc

SEQ ID NO: 313884 - DNA, 447 bp, Homo sapiens
agattctgtttcttgggtatcaccagaaatctgggatatatgtttcttgggtatcaccaacacattttctggtgatacccaagaaacatatatcccagatttctgtggcagaagatgatgatgaaagtcttcttggacacttaatgattgttggcaagaaatgtgctgctgatctgggcctgaataagggttatcgaatggtggtgaatgaaggttcagatggtggacagtctgtctatcacgttcatctccatgttcttggaggtcggcaaatgcattggcctcctggttaagcacgttttggggataattttctcttctttaggcaatgattaagttaggcaatttccagtatgttaagtaacacacttatttttgcctgtgtatggagagattcaagaaataattttaaaaccgcatacataataaaagacattgttgcatggc

SEQ ID NO: 313885 - DNA, 641 bp, Homo sapiens
  misc_feature (52)..(52): n is a, c, g, or t
  misc_feature (78)..(78): n is a, c, g, or t
gagacagtcttgctgtattgcccaggctggagtgtggtggcacaatcacagntcattgcatcttcaatcacccaggcntaagcaatcctccccaccttgtagctgggactacagctcacagcacacctggctaaaattttttttttgttgagacggattctctatgttgcccaggctggtctcaggctcctgggctcagatggtcctcctgcctcagcttccaaaggcacaggccaagttgtagctttgtcccttgccatcatgcccaacaagaggttctataccttttaatgaattgactttcataaaaggtatagaacctcttcttggacacttaatgattgttggcaagaaatgtgctgctgatctgggcctgaataagggttatcgaatggtggtgaatgaaggttcagatggtggacagtctgtctatcacgttcatctccatgttcttggaggtcggcaaatgcattggcctcctggttaagcacgttttggggataattttctcttctttaggcaatgattaagttaggcaatttccagtatgttaagtaacacacttatttttgcctgtgtatggagagattcaagaaataattttaaaaccgcatacataataaaagacattgttgcatggc

SEQ ID NO: 313886 - DNA, 296 bp, Homo sapiens
cgcggccgcgcgactacgctgcgagagacgacagaagggttatcgaatggtggtgaatgaaggttcagatggtggacagtctgtctatcacgttcatctccatgttcttggaggtcggcaaatgcattggcctcctggttaagcacgttttggggataattttctcttctttaggcaatgattaagttaggcaatttccagtatgttaagtaacacacttatttttgcctgtgtatggagagattcaagaaataattttaaaaccgcatacataataaaagacattgttgcatggc

SEQ ID NO: 313887 - DNA, 1185 bp, Homo sapiens
aacggcattccccaggagacaagaaaggaggatagaaaaacgacttaggaatctccttggagctcaagaccaggaacttccccaagccggaggtccctgaggcgctctagcgcgctggccgcactcgcagcccaggtcgccagtgcgcacgcgcaagattaggtggggcgccagagccggggcacctgcgcaggcttggctgcgccctctcgcgccgcacgctctgcgggttcctcccttcttccgagcctctcctctggccgccgcgcgggagagaggccgagatggcagatgagattgccaaggctcaggtcgctcggcctggtggcgacacgatctttgggaagatcatccgcaaggaaataccagccaaaatcatttttgaggatgaccggtgccttgctttccatgacatttcccctcaagcaccaacacattttctggtgatacccaagaaacatatatcccagatttctgtggcagaagatgatgatgaaagtcttcttggacacttaatgattgttggcaagaaatgtgctgctgatctgggcctgaataagggttatcgaatggtggtgaatgaaggttcagatggtggacagtctgtctatcacgttcatctccatgttcttggaggtcggcaaatgcattggcctcctggttaagcacgttttggggataattttctcttctttaggcaatgattaagttaggcaatttccagtatgttaagtaacacacttatttttgcctgtgtatggagagattcaagaaataattttaaaaccgcatacataataaaagacattgttgcatggcaaaaaaaaaaaaaaaaaaaaaaaaaaaaaaaaaaaaaaaaaaaaaaaaaaaaagaaaaaaaaaacacacacacacagaagaaacgtgacggcacgaagaaagataaagacaccgcgcgcagagcaccgaggagcgaagcagagacaagaacttgaaccagacacgagtcgcgccacgcaacgggcgacactccacacgagcagagaggaggcgacgcgccagacgtatcacaagaaaccaagacgggcggagcaagaccacgagggaggaagaaaagagaaagaagacaacaaacacccgagtgggggagaacaaacgacaagggcgcgcaaacacacaaagaagatgaaaggcggcggcggcata

SEQ ID NO: 313888 - DNA, 1269 bp, Homo sapiens
aacggcattccccaggagacaagaaaggaggatagaaaaacgacttaggaatctccttggagctcaagaccaggaacttccccaagccggaggtccctgaggcgctctagcgcgctggccgcactcgcagcccaggtcgccagtgcgcacgcgcaagattaggtggggcgccagagccggggcacctgcgcaggcttggctgcgccctctcgcgccgcacgctctgcgggttcctcccttcttccgagcctctcctctggccgccgcgcgggagagaggccgagatggcagatgagattgccaaggctcaggtcgctcggcctggtggcgacacgatctttgggaagatcatccgcaaggaaataccagccaaaatcatttttgaggatgaccggtgccttgctttccatgacatttcccctcaagcaccaacacattttctggtgatacccaagaaacatatatcccagatttctgtggcagaagatgatgatgaaagtcttcttggacacttaatgattgttggcaagaaatgtgctgctgatctgggcctgaataagggttatcgaatggtggtgaatgaaggttcagatggtggacagtctgtctatcacgttcatctccatgttcttggaggtcggcaaatgcattggcctcctggttaagcacgttttggggataattttctcttctttaggcaatgattaagttaggcaatttccagtatgttaagtaacacacttatttttgcctgtgtatggagagattcaagaaataattttaaaaccgcatacataataaaagacattgttgcatggcaaaaaaaaaaaaaaaaaaaaaaaaaaaaaaaaaaaaaaaaaaaaaaaaaaaaaaaaaaaaaaaaagagaaagaaaagaaagagcaagaggaaaaaaagagaaaacaagagaggagggaaggaaacaaataaaaaacgaaacaaaagggccgcaaaccaagcagactgacgtggagagaggacaagtgagagtggaggaggcggtcagatagtaacacagggagttgcgagtggagaatagggggggtggaggggggacaacgtaggtgaaagaaacgtccaatagatgaaggtgggagaccatctgtgtgagggcgggacagacgaagcggcagtagcgaggattgagggagtatttacacagatgcggaggagaatcggggaggcggcacgggatatttgtaaagcggggaggtgtgaacgaggagacttgcgcacaagactaacggga

SEQ ID NO: 313889 - DNA, 983 bp, Homo sapiens
  misc_feature (836)..(836): n is a, c, g, or t
aacggcattccccaggagacaagaaaggaggatagaaaaacgacttaggaatctccttggagctcaagaccaggaacttccccaagccggaggtccctgaggcgctctagcgcgctggccgcactcgcagcccaggtcgccagtgcgcacgcgcaagattaggtggggcgccagagccggggcacctgcgcaggcttggctgcgccctctcgcgccgcacgctctgcgggttcctcccttcttccgagcctctcctctggccgccgcgcgggagagaggccgagatggcagatgagattgccaaggctcaggtcgctcggcctggtggcgacacgatctttgggaagatcatccgcaaggaaataccagccaaaatcatttttgaggatgaccggtgccttgctttccatgacatttcccctcaagcaccaacacattttctggtgatacccaagaaacatatatcccagatttctgtggcagaagatgatgatgaaagtcttcttggacacttaatgattgttggcaagaaatgtgctgctgatctgggcctgaataagggttatcgaatggtggtgaatgaaggttcagatggtggacagtctgtctatcacgttcatctccatgttcttggaggtcggcaaatgcattggcctcctggttaagcacgttttggggataattttctcttctttaggcaatgattaagttaggcaatttccagtatgttaagtaacacacttatttttgcctgtgtatggagagattcaagaaataattttaaaaccgcatacataataaaagacattgttgcatggcttatagctcaaaaaaanaaagaaaaaaagagaaaaaaaaaacaactgtgtggcgacggcatgtggcccaggaaaaaggttcggacaccctgcggagggccacggggcccacagagggcaggggacactgcgccaaagcggtgcccacaggagaccggggacagg

SEQ ID NO: 313890 - DNA, 1017 bp, Homo sapiens
aacggcattccccaggagacaagaaaggaggatagaaaaacgacttaggaatctccttggagctcaagaccaggaacttccccaagccggaggtccctgaggcgctctagcgcgctggccgcactcgcagcccaggtcgccagtgcgcacgcgcaagattaggtggggcgccagagccggggcacctgcgcaggcttggctgcgccctctcgcgccgcacgctctgcgggttcctcccttcttccgagcctctcctctggccgccgcgcgggagagaggccgagatggcagatgagattgccaaggctcaggtcgctcggcctggtggcgacacgatctttgggaagatcatccgcaaggaaataccagccaaaatcatttttgaggatgaccggtgccttgctttccatgacatttcccctcaagcaccaacacattttctggtgatacccaagaaacatatatcccagatttctgtggcagaagatgatgatgaaagtcttcttggacacttaatgattgttggcaagaaatgtgctgctgatctgggcctgaataagggttatcgaatggtggtgaatgaaggttcagatggtggacagtctgtctatcacgttcatctccatgttcttggaggtcggcaaatgcattggcctcctggttaagcacgttttggggataattttctcttctttaggcaatgattaagttaggcaatttccagtatgttaagtaacacacttatttttgcctgtgtatggagagattcaagaaataattttaaaaccgcatacataataaaagacattgttgcatggctaaaacaaaaaaaaaaaatcataatcgcgccaccgctattctctaacatcacactaataaatccaaaatataaataattttgggccctttttggccctcaacgggggacctttgccggccctttccctttatgggggggtgaaattatgacccctcgctaactgactccgctggccttcggcgatttcggttgggaaa

SEQ ID NO: 313891 - DNA, 839 bp, Homo sapiens
tgtaatgttatcccaacaccaatcatgcatagtacaatcttaaagaatgaaatatgaacttcagaacttagccttaccacctaagaactggtgcatgggtggggcgataacatcgcccaacacattttctggtgatacccaagaaacatatatcccagatttctgtggcagaagatgatgatgaaagtcttcttggacacttaatgattgttggcaagaaatgtgctgctgatctgggcctgaataagggttatcgaatggtggtgaatgaaggttcagatggtggacagtctgtctatcacgttcatctccatgttcttggaggtcggcaaatgcattggcctcctggttaagcacgttttggggataattttctcttctttaggcaatgattaagttaggcaatttccagtatgttaagtaacacacttatttttgcctgtgtatggagagattcaagaaataattttaaaaccgcatacataataaaagacattgttgcatggcttatagtctctctgagtgttgcgtttgatttgttattttaaaaacatatttgttggaatatgtgaaggtgggtttataattttggatgtttcttgctttttcttcccaaggaggactcaacatatgaacatcgcattgttttaatggtgttactagtctttgaagacaaataatgagagtttataaatttagctttaacttcgaaatatctttccaggctaaaataggtccaacttagatttttaagctaattctcacattttctaagaacataggaaattgaccattttgggtttagaaacagtgctttatgttcagcccacattgcccct

SEQ ID NO: 313892 - DNA, 1094 bp, Homo sapiens
aacggcattccccaggagacaagaaaggaggatagaaaaacgacttaggaatctccttggagctcaagaccaggaacttccccaagccggaggtccctgaggcgctctagcgcgctggccgcactcgcagcccaggtcgccagtgcgcacgcgcaagattaggtggggcgccagagccggggcacctgcgcaggcttggctgcgccctctcgcgccgcacgctctgcgggttcctcccttcttccgagcctctcctctggccgccgcgcgggagagaggccgagatggcagatgagattgccaaggctcaggtcgctcggcctggtggcgacacgatctttgggaagatcatccgcaaggaaataccagccccaacacattttctggtgatacccaagaaacatatatcccagatttctgtggcagaagatgatgatgaaagtcttcttggacacttaatgattgttggcaagaaatgtgctgctgatctgggcctgaataagggttatcgaatggtggtgaatgaaggttcagatggtggacagtctgtctatcacgttcatctccatgttcttggaggtcggcaaatgcattggcctcctggttaagcacgttttggggataattttctcttctttaggcaatgattaagttaggcaatttccagtatgttaagtaacacacttatttttgcctgtgtatggagagattcaagaaataattttaaaaccgcatacataataaaagacattgttgcatggcttatagtctctctgagtgttgcgtttgatttgttattttaaaaacatatttgttggaatatgtgaaggtgggtttataattttggatgtttcttgctttttcttcccaaggaggactcaacatatgaacatcgcattgttttaatggtgttactagtctttgaagacaaataatgagagtttataaatttagctttaacttcgaaatatctttccaggctaaaataggtccaacttagatttttaagctaattctcacattttctaagaacataggaaattgaccattttgggtttagaaacagtgctttatgttcagcccacattgcccct

SEQ ID NO: 313893 - DNA, 797 bp, Homo sapiens
  misc_feature (684)..(684): n is a, c, g, or t
aacggcattccccaggagacaagaaaggaggatagaaaaacgacttaggaatctccttggagctcaagaccaggaacttccccaagccggaggtccctgaggcgctctagcgcgctggccgcactcgcagcccaggtcgccagtgcgcacgcgcaagattaggtggggcgccagagccggggcacctgcgcaggcttggctgcgccctctcgcgccgcacgctctgcgggttcctcccttcttccgagcctctcctctggccgccgcgcgggagagaggccgagatggcagatgagattgccaaggctcaggtcgctcggcctggtggcgacacgatctttgggaagatcatccgcaaggaaataccagccaaaatcatttttgaggatgaccggtgccttgctttccatgacatttcccctcaagcaccaacacattttctggtgatacccaagaaacatatatcccagatttctgtggcagaagatgatgatgaaagtcttcttggacacttaatgattgttggcaagaaatgtgctgctgatctgggcctgaataagggttatcgaatggtggtgaatgaaggttcagatggtggacagtctgtctatcacgttcatctccatgttcttggaggtcggcaaatgcattggcctcctggttaagcacgttttgggaaattcnctcttagcaagatagtagcattccatagtaagtaacacactatttgccggtagggagatcagaataattaaacgcaacatataagcatgtgcagccaaaaaaaaaagcgcccg

SEQ ID NO: 313894 - DNA, 853 bp, Homo sapiens
aacggcattccccaggagacaagaaaggaggatagaaaaacgacttaggaatctccttggagctcaagaccaggaacttccccaagccggaggtccctgaggcgctctagcgcgctggccgcactcgcagcccaggtcgccagtgcgcacgcgcaagattaggtggggcgccagagccggggcacctgcgcaggcttggctgcgccctctcgcgccgcacgctctgcgggttcctcccttcttccgagcctctcctctggccgccgcgcgggagagaggccgagatggcagatgagattgccaaggctcaggtcgctcggcctggtggcgacacgatctttgggaagatcatccgcaaggaaataccagccaaaatcatttttgaggatgaccgggtaggtactgggcaccacctctctcgcctgctggtgccttgctttccatgacatttcccctcaagcaccaacacattttctggtgatacccaagaaacatatatcccagatttctgtggcagaagatgatgatgaaagtcttcttggacacttaatgattgttggcaagaaatgtgctgctgatctgggcctgaataagggttatcgaatggtggtgaatgaaggttcagatggtggacagtctgtctatcacgttcatctccatgttcttggaggtcggcaaatgcattggcctcctggttaagcacgttttggggataattttctcttctttaggcaatgattaagttaggcaatttccagtatgttaagtaacacacttatttttgcctgtgtatggagagattcaagaaataattttaaaaccgcatacataataaaagacattgttgcatggc

SEQ ID NO: 313895 - DNA, 4017 bp, Homo sapiens
aacggcattccccaggagacaagaaaggaggatagaaaaacgacttaggaatctccttggagctcaagaccaggaacttccccaagccggaggtccctgaggcgctctagcgcgctggccgcactcgcagcccaggtcgccagtgcgcacgcgcaagattaggtggggcgccagagccggggcacctgcgcaggcttggctgcgccctctcgcgccgcacgctctgcgggttcctcccttcttccgagcctctcctctggccgccgcgcgggagagaggccgagatggcagatgagattgccaaggctcaggtcgctcggcctggtggcgacacgatctttgggaagatcatccgcaaggaaataccagccaaaatcatttttgaggatgaccggtgccttgctttccatgacatttcccctcaagcaccaacacattttctggtgatacccaagaaacatatatcccagatttctgtggcagaagatgatgatgaaagtgtcattactaaggaaaaaccagaaaaaccattaggacttcaactgcccagctgttttccaaagttactgcatcattttgtatcccaccagcaatgaatgagcgttccagcttctccgtatccttatcaacacttgctattaccttttttttttttttttgagacagagtcttgctctgtcgcccaggctgcagtgcaggggcactcggttcactgcaagctccacctcccgtggttcacaccattctcctgcctcagcctcccgagtagtgggacaacaggcgcccgccaccaaggctggctaattttttgtatttttagtagagacggctttcaccatgttagtcaggatagtttcgatttcctgacctcgtgatccgcccgcctcggcctcccaaagtgctgggattacacgcgtgagccaccgttcctggcctattatattcttaaagtaagctagagaaaaggttattaagaaaatcataaggaagagaaaatatatttactatttattaagtcgagtgaatcataaaggtcttcatccctgtcatcttcatgttgagtaggctgaggaagacgaggggttggtctagctgtagctgtctcaggggtggcagaggcagaagaaaatttgcatatgagtagacctgcacgggtcaaacccatgttgtgcaagggtcagttgtatttacttggggatacctttttaaagtgagacattatttctgaaacttagaaacttcaaggcattaatttttaattcaatatatttgtacaaatcacagagttcaaagattagagcgagtacttaatggtaaaataccgtcttatatgcaataacattaaaccctcagaatacatttttttcttttttttttttttttgagacggagtttcgttcttgttgcccaggctggagtgcaatggcgcgatctcggctcaccgcagcctctgcctcctgggtacaagcgattcccctgccctcctgagtagctgggattacaggcatgccatcacgcctggcttatttgtatttttagtagagatggggtttctccatgttggtcaggttggtctcgagctcccaacctcacgtgatccacccgcctcagccttccaaagtgctgggattacaggtgtcagccaccacgcccagccccagaatacaaatttttaacatttagtataattagacagtcatggcattttaaggtcagagcttcttactcaaatgcagctcttttctgtaaggacaataaaatgttaatttttactcagttaacattctaaattagtgttttaaggtcatctcttttacttagaagacagttgttggccaggaaacgtttactgaaccagctttaaaaccgtgctaattcataattaaatgttgtgaccaatataggtatctgctgtacaaaattttatatagatgctcatcaacttaagatgggcttacatgctgataaacccatcataagttgaaaatattgtatgtctgttgaaaatgcgtgtaagacacctaacttactgaacattatagcctagcctagtctaacttaagcttgctcggaacacttaacgttaacctacagttgggcaaaatcatctaatacagagcctattctgtaacagagtgttgaatatctcatgtaagagtattttactgcatatcaccagtctggaaaaggatcagaattcgaagtatggtttctcctgaatgcatatcgccacaccattgtaaagttgaaaaatcataatttccccaacttacaatttttgtccattgtccatctgtacaatggaccttactgcatgagtaaggtaagcagagtccactgtcctggggcttaataaggtaatgggaatagaaatgtaagactctctcccttccctcttttcttgccaaaggaattaaaggagttccctttcctgagagctttttagaatgttgaagttaaccctcccaacttttttctctcataatgggaaagcataagcagtgaaatgggagttaaagttcttttctcttggcaaccttctcccctttaacttttattagggaagaaagctggcaacatacaaatagactccatgtgtaaatagagacaaattgactgtagatagaaccaaaaaacaaacaggatgacacagagcgagactaggtatttgccacaggatcctgcaagtcccgacaatgcaatagatctggtagtgttcaaaggaaaatccataatggtcataaggaagtcataaagaaagcaagatgtcttgctttattaagaaaacttaaacagcacttggaatataattaagttttttttttggttgggcatagtgccttgtgcctgtaatcccagcactttggaagttaaggtgggcagattgcccaagcgcaggagttcgagaccagcctggacaacattggagaagccccatctcaacaaaaaaatacaaaaattagccgggtgtggtggcatgtgcttgtggtcccagctccttgggtgggtgaggcaggaggatcacttcaacctgggaggtcgaggctgcagtgagctgagatcgtgccactgcactccagtctgagtgacagagcaagaccccatctcttaaaaaaaaaagtttaattgaacagcagattttatttctaatttgtttcttgaaattagtaatgataaatacctaatcttaatgagtctccagttgtagattatgctctgttgggattaagagtttccaaatatttgctcaaagggttgtgtttcaatgagagttttaagatttgatatttcagcttgacagtttgttatttaatggcaagaagtaataaattgcctgtgcctaagaaactttttttccttttccagcttcttggacacttaatgattgttggcaagaaatgtgctgctgatctgggcctgaataagggttatcgaatggtggtgaatgaaggttcagatggtggacagtctgtctatcacgttcatctccatgttcttggaggtcggcaaatgcattggcctcctggttaagcacgttttggggataattttctcttctttaggcaatgattaagttaggcaatttccagtatgttaagtaacacacttatttttgcctgtgtatggagagattcaagaaataattttaaaaccgcatacataataaaagacattgttgcatggcttatagtctctctgagtgttgcgtttgatttgttattttaaaaacatatttgttggaatatgtgaaggtgggtttataattttggatgtttcttgctttttcttcccaaggaggactcaacatatgaacatcgcattgttttaatggtgttactagtctttgaagacaaataatgagagtttataaatttagctttaacttcgaaatatctttccaggctaaaataggtccaacttagatttttaagctaattctcacattttctaagaacataggaaattgaccattttgggtttagaaacagtgctttatgttcagcccacattgcccct
